United States Patent Application Publication US 2007/0054278 A1 - sequence listing, part 37

SEQ ID NO: 94361 - DNA, 25757 bp, Homo sapiens
aatggtggctttactttcagcagtgtccagcccaggcagtgaggaggaccacagcggtggcagtgctgtcagtaagagcaggagcagcagccccaggctggccatggccggcctctgctcactgctggtcacacgctcagcaccctgagctctggccaagcccagactgcctctgcacgccctcctcccacctccttcccacctccccctggcagacatgaagacaagtggcccggcagggctgccaagaagcctggggtggcctgggcaaaggactctgggaagggtggctgcagggggatgacggttaggcagcggaggttaggccagtcctgggcgtagagcctgctgtccacrggatgctggggagagggctgcccgccctgtccttctcagccctgattctccaggctcacaggctagatctttgatctagcaattgcaattcaacccagaaatccaaaagctctgaaagcaaaacgaatttttttttctttgttttttgaaatagggtctcattctcttgcctaggctggagtgcagtggtttgatcacagctcactgtagccttgacctcctgggctcaatagatcctcttgcctcagcctcctgaatagctgggacaatcggcatgtgccaccatgttgcctaatttttgtagctttttttaatagagacagggtctcactatgttgatcaggctggtcttgaaccgctggcctcaagcgagccaccttctttgggctcccaaagtgctgggattacaggctggagccaccacacccaggctttgttttaaataaatttgaaacaaactcatttgagggcacgtctgccttgaactgaggcaaacttccttaaaggggcaccgtccaattgaaatagaattggagctacaaagatgagccatgtgtgcatttcgaaatttcctagtagccacatctaagaaagcagcaataagcaggtgaagttaattttaacgatctagtttatttgacccagttatttaaaatattgtaattacatctgtaatcaatatagaaatgatttgtttttatttttgtcatactaagtctttgaaattgatgagtagtttatgttcacaacacaattgttttattttgttattttatttttaagagacagggtctcattctgttgcccaggctggagtgcagtgatgtggtcatagttcactgcagtctcgagctcctaggctcaagggaccctcgcgctttagcctcccaaggagctggcactccagatgtaagccaccatgccaggctaagcacatttcaattcagactatccatatttcaggggcttgatagtcacatgtagctggtatactgggcagtgtcttagttttgtgctactacaacagaatacctgagactgagtaatttataaagaaaagaaattcatttggctcatagttctggaggctgggaagtccaggttcaaggggttgcatctggtgggggtcttcttgctatatcatcccacggtggagggcagaagggcacgagagctggagagagagaagagaaagaagctaaactcattcctttatcaggtacacgcttttgcaataacagcatgaatccattcatgagggcagaggcctcatgaaagattccatctctcaacactgttgcattgagaattaaggttccaacatacgaactttagggcacacattcaaaccacagcagagagtgaggacctagcgtccttattggtttcattcagtgtgaatgcgcatctgtttccttgcagaaatgttaatgttggtttcctgggtgctgtcccaaaccttgctggggctgttgtatgtatgtgcaccacattatctttctaaaatcccaacaattttgaattcagaaacatacttggtcccaagggcttcagcaaacagattacagatctgtaataataatcaaaagaacaccactaaagtgtgtatttgatgctccctatgtgcagatgctaggttagggcttctccaccttttaatttcgtcattgttcttttttctacccccggagtgtttttagacgttttaatcctgaaaaatctttagtaagaggcttattgagatattattcacataccataaaattcaccttttaaatgtgtacagtttcacagtggtttttagtatattcacaaagttgtgcagccatcactatctatctccagaatgtttttgccaccctgaaaagaaatcccatacccatttgcagaaactccctattccctcctccccagcccctaccaaccatgaatcaactttctgtgtctatggtttgacctacggtggatatttcatataaatggaatcatacaatgcgtggctttttgtgtctggcttctctcactcagcgtgatgttttcaaggttcatctgtgttgtagcacatgtcagtactttattcttttttatggatgaataatatcatctcccggggaagcccctcctgctctgatgatttaagaggatgaggactatggagatgacaaaccaaaagtagacacctaggccgggcatggtggctcatacctgtaatcccagcactttgagaggctgaggcggggagatcacttgaggtcaggagttcaagaccaacatggccaacgtggtgaaaccctgtctttactaaaaatacaaaaattagccaggcgtggtggcacgcaactctaatcccagctacttgggaggctgaggcaagagaatcacttgaacctgggaggcagaggttgcagtgagccgagatggggccactgcactgcagcctgggtaacagagtgagactctgtctcaaaatataaaatgaaatgaaatgaaatgaaatataaaataaaataaaataaaataaaataaaataaaataaaataaaatgaaaacaagacacctggagcagggcgtggtggctcacacctgtaatcccagcactttgggaggctgaggtgggcggatcacttgaggttatgagtttgagaccatcctggccaacatggtgaaaccccgactccactaaacatacaaaacttagccaggcgtgatggtgcagggctgtaatcccagctactagggaggctgaggcaggagaatcacttgaacctgggaggtggaggttgcagtgagccgagacggcacccctgcactccagcctggacgacagagtgagactccatctcaaaacaaacaaacaaacaagcaaacaaggagacacctgggaaacctcgggtgggaggctgtgggagctgtggacagaccgcattctgttcatcactcatccactgatgagcctctggattgtttccatgatttgattcttgtggacagtactgatgtttgtttacaagtttttgttcgaaaacctgtttttcattctcctgggtgtatacgtgggaatgccattgctgtgtcacgtgataattctatgttgaacctaatgagggaccatacgactgttttccacagtggctgggccatttacgtgcccactggcagaagatgagggttccttatgtactgccccatgaaattttattttacttgtttatttttttgagacagggtctcgctttgtcacttaggctggagtgcagtggtatgatcatggttcactgcagcctcgacctccctgggctcaggtgatcttcccacctcagtctcccgagtagctgggactataggcacacgccaccaccattttttgggtattctttgtagagatggggtttcactatggtgcccaggctggtcttgaactcctgggctcaagtgatccttccgcctcagcgtcccaaagtgctgggattacaggcatgagccactgctttcagccttcataaaattttaatactgcagatatactgcatgcttgtgtattgtatcattatctgtgctttatacataaaaagggtaaggatgttttgctccccaagagccatttttgcccccttgggagcaccactgggaacagaggttctaggggaagcttgtcattgtcattacttctgttaatccttgatcacccctcaagtgggtgctcagtcaacttgaacaaaatctgaggctccaagggagattgagtgacttatccatatatcctcttgattgttggaaagactggatctcatgtggaatggatgccaagtgagaaagccggacaggtgggctggcccagctatgaaaccgcccccctgctggggatggctccgtcccctctctccaggagacaccacggcaactccctccccgacggaggttcacctaccagagggaggcatctacttttggtttgtcatcaccatagtctttatcctcttagctcatcagagcaggacaggctctcaaagacttgaagttcccctcccttaattcacagacgaagaaagcaaattgatggggagtgactcgcccgaggtggagcaggaaagccaggagtcctgaggctgaggtcccagatccctacctgtcccattacagagcgtcgacagagttgggcaggcgatgtgtcacaggcctccaccccagcacacgcaacctggaggcaggggcctcgctgggaactggaggataaatgccgctgccagcatgtttgtatgcccatccctgctgtctgcagatacttactcgtccttcctttccttctgaaagctcgggtttcaaggtctggcttaaggcgtgagctgtcccttctgaatccatagaaagggagtgatggggcaattgtgaaaagcagatgcaaagtgtgccaagccctgagctgagcccagggacactggggagccacatccatgtgggctaccctgtcccgtgggtgctgcctgtggtcctcatcaggggaggagtcttgtttgtttgttgaatacggtctgggtggtggctctccaggttctgcggcagctcccaagtggaggcaatggggtagcatcaccagtgagctcttggtgtttctctgcaagggaccgctttcaaagaaaaaaggtcatgatacggtttggctgtgtccccacccaaatctcatcttgaattcccatgtgttgtgtggaagggacccagtgggaggtaactgaatcatggggtcaggtgtttcccgtgccgttctcgtgatagtgaataagcctcacgagacctgattgttttataaaaaggagttttcctgcagaagctctctttttgcctgctgccatctatgtaagaggtgacttgctcctccttgccttctgccatgatggtgaggccttcccagccatgtggacctgtaagtccatgaaacctctttcttatgtaaagtgctcagtctcgggtatgtctttatcagcagcatgaaaacggactaatacaggccatcgcagagacacacattaaactctcactatggctactttgggaggtgaaattggagggtcactgtggaaatttcctttctagccattgatacttaagcaaaatcatgatggtgtttacttccttgtttgtccttccccctctctaccttttaaatgttttattaagtgtgatgtacaccctggaaaatgggcaggtaatctgctgcttgaggtaccgccccaaatgcagcacacccacattaccagcaccagatccagaagcagaacccaccagcccctaacttctaacagcgaggactggtttttatttacatagacggaactctacaattcgtactcgtcagcatctggctcctttatcaatgttaggatgaaatttatccaaattcttgtgtcactatattttgaaattatctttgaatcctgaagagagttcttagatcccaatacagtaacagctttactttagtcggggaaatacactggtgtgtagggaatctggtgtatgtgcgtgtgtcctactactactaattcttggccccgaggggctcctgggggttccccgggcccctgttagggaaccgcgtccacttctcgccctctcggcccacttcggaggctcggtctgcggctgcgcacagcgcgaggaagcgcggtcacgtgactgctgcgggccagccaagatggcggcctcatgcttggtcctgctggcgctgtgtctgctgctgccgctgctgctgctgggaggatggaagcgctggcgccgggggcgggcggcccggcatgtagtagcggtggtgctgggcgacgtgggccgcagcccccgtatgcagtaccacgcgctgtcgttggccatgcacggcttctcggtgaccctcctggggttctgcagtgagtggccaagggtctgtctgggagggacgatgctctctcagccgttgatcctcggttctaaccgccccggggagtcgaggcggaagtgctcctttagtcgccgcctttgggcagctctccgagattagacgagcgggttctgccccagcctttcctgggtgggtctctaggtatagccggcgttaatcttgccacgtgtcagaagtgtgttaagtgaatccattgcgtggtctcacgtaattctcctagtaagtggaacccaggtgcgtggaactccagggctagtgctggtagctacgtccstgtgcagctacccttgtcaggctatgtctgagctgacaggatatttcattcctcatccctcaacgcagagctctgcagacagatgttttcatttgttcttcatgtccagcttttccccacagtgtgcagggcagcggtgtctgytccctcattattctccacgttggtatcttgagagggtagctcaaccccatctcaggaagaagtgggaacagcactagttgcctttaatccctgtttagaatctgctatcctagggtgatggggtagagtgggacttcctagggatggctctgtggtgggaaaattccactatccagasaatctagattagtttaattgagcacctactgtttgccaggcatcatgttaagtgaaggtaggtaagattcaggccctatctctgtgkgcctcctagagcaatstgaacaagaattggccgcattctctgttctggctagtgaggagcagagagaggttttgaaatatcttactttccaaaacactgtccgtgattcakyctgagttgggagattatctgactttagattgctgcttctggtacattaaagggatcattctcatttttcagactccaaaccccatgatgagctcttgcagaacaacagaattcagattgtggggttgacagaacttcagagtcttgcaggtaggatgccgtcaactccagaatcctctgaatccatgggctgggggcagggggtgttcgtttgaaaagccgtgcagattgccagacgctcctttggtagtcacaggtgttttctgacttgcagttgggccccgagttttccagtacggagtcaaagttgtacttcaggctatgtacttgctgtggaagttgatgtggagggagccaggtgcctatatctttctccaggtgtgtatcagcytctgcctccctctgtgagagccatgttagcagtttactttccagcacaaattggtactatattgcatattcatatgtgtgtgtgttgtgtgtatgggcgtttaaagacatgagtaggagcctatggtatgtgtctatttatggcacctatccatgctctctgtgtcattacagatagtcttacattgtactgactgtgtatcaagtgttttccatgtattaactcatttagtcctcacagttaccctaagaaatattgcatgtaggtaatacaagaacctgtttcttaaggttgttctcatttagatgagaaaacctagactgagaaaggctctgtaagtagcccatcgccatacagctaggaagtggtggaatcaggatttgaacgtaggtcgtcagtgtggttctatagtatacacacgcacgcatacgcgcgcacacasaaacacacatatatttttttgagacagagtttcgctcttgccgcccaggctggagtgcagtggcgtgatctcggctcactgcaacctctgcctgccgggttcaagtgattctcctgcctcagcctcctgagtagctgggattacaggtgcccgccaccacgcccagctaatttttgtatttttagtagaaatggggttacgccatgttggccaggctgttctcgaactcctgacctcaggtaatccgcccccctcggcgtcccaaagtgctgggattacaggcgtgcrccaccgcgcctggcctatcgttatacttttaatcccttcccttgatcactttttctttaaaaaatttttctttcttttytagctgaaggaagaatacttttttttttaaatcaatttttaatatatagaagcaccttcctcttttatttatttatttttatttttcctgagatggagtctctgttgctcaggctggagtgcagtggtgcgatcttggctcactgcaccttctacctcccgtgttcaagtgattttcctgcctcagcctcctgagtagctgggattacaggcatgtgccaccatgcctggctaatttttgtaattttttttagtagagatggggtttcgctatgctggccaggatggtcttgaactcctgacctcaggtgatccacctgcctcggcctcccagattgctgggattacaggcatgaaccatcgtgacccacaccttcctcttttaataggcagccttgaattccaatatgtgatgtactatactgcatgtatttagtctcatgttaatggatactcagattcttcctgattttgtttttacttttacaaatagtgtggctccaagcacagcgagcatatgccttttgtataagtccagtttctttcttagggtaacttcccagcagtggaattgtgtagtcaaagttgatgcattttaaaaatgtgtatgttactggatagctttagagtaaggttgggtcagtttggcccccgctgagtgggggtacctcttctcccccatgcttaccatcaccagctgttgttagacctttttagaatttgcattccaacaggtgaaaaatgccatctctttgttctgttttttgcctccttgattattgatgatcttggacttttcaggttggttctgtttgtttgtttggtttttgtttgtttgttttagaggcagagtctagctctgtcgcccaggctggagtgcagtggcacaatcatagcttaactgcagcctcatcctcctgggctcaagtgatcctacctcctcagcctcctgagtagctggrgctgcaggtgtgtcccaccacacctggctaatttttaaattttttgtagagatgaggtctcactgtgtttcctaggccggccttgaactcctgggctcaaatgatcctcctgccttggcctcccaaagtgttgggattacaggcatcagccaccgcacctggcccattctgtttcttttatgactttttacatctattttggtggtggagagggtctttcttctgcttattatcaagagctctgtaaagataacagactcatcaccatgtgtgttgtgaytatttttactgggtttattgcctagcatggtctgggtttcctccycttcaagtctctatctttcctagaaccccccaggtctgcctagcattgctgtctgctggttcgtgggctgcctttgtggaagcaagctcgtcattgactggcacaactatggctactccatcatgggtctggtgcatggccccaaccatcccctcgttctgctggccaagtggtgagagtctaggaaragggtaaaataccgtcccctaaaccactcaaggatgagtgagaagaagggccrtagtgggcctccggaagtcggttccttgtgggctctgcaggaggtggggtgaggctggtgaatcaggccgaatgctggttccaaatgatagaaacaggcctcagcaaaggaccacattttttggcccatgaaatggaagtgtctgtggaaatggttggtttcgagctcagcagtgtcactgggacccagctcacgtctgtctccacactcccttctggtggtggttcccggaactctcctagctcttgtcctcacgtaggctcattggggagggcagccctttctgattggctcatgtaggttacctgccttcctctgatctgcctgttgaggccagggggcaagtgctccagcagaagagctgggtctcaggagcatccatatctcatggacagagggtgggtgagggcagatccccaaattaaaacccagggctgctgttggtagctggagaagtgggccacagttgctgcagctgatgtgacagggagggaagaagggccagtggtagcagtgggacgtggagctgggaaggycatctgctgtmctctgagcccaactataacatctctgttatactctgcacggccagccttcaggtgcacatccagcctccgtgtgcatgtccagctgctgcgtgtacttccggccttgggccattggctggctgtggccttcgccctgatagtttgttcactggcagtggtgacagcagcagcaaacagcttagttgagcaaatggagcagaatggtcaatggtgagcacctgctgcatgccagtcctccatccaagccctttttgtattttaccctgttcaatctctatgcacctcaggagggtgtaccttttacaagtcaggaaactgaggctgagaacgattatgcctcttgccacacagctaagtgtgaggaccaaaatatcccaggcaagcccatttccgagctttctctgcatcttgagaggaacaggcgatgataccctggcggtgataaataacccagaatcgcgcatgccgtgttmcggctctaccctgcgatcagggctcagtctccgttaggagagaatgtgtacaatgctcactgaatccctttgccccacgttgagagcaagccgtgaccttacagcctttgcagtggtagcacagggtggctgagatcgctagtgaggccttcattgtatttcttccttttttttttttttttttttttgagacagtctcactctatgtcccagactggagtgcaatggcgccatctcggctcactgcagcctccgccttctgggttcaagcaattctcctgcctcagcctcctgagtagctgggattataggcacccaccaccacgcctggctaatttttgtgtttttagtagagacagggtttcaccacgttggccaggctggtctcgaactcctgacctcaaacgatccacctcccaaagtgctgggattacaggcatgagccaccgcgccyggcctgtatttcttccttttacagcaagagagaggatgttcactttggcagtgatacacagtgtccttctatttatttttttaaatttgtatttatttatttatttatttgagacggagtcttgctttgttgcccaggctggagtgcagtttccttttaaagtgattgtatttaagccaacaagtgacacaacataaaggagggtatatacagcataaagaaagaacactggcacagctggggctcagggagcacaaactctcccagctctgcggccttttctctgttgagggatgtcgagtcacgctgtggtggtagcggaggcctgtctagggctctgctgactgctgatctctcttttcaggtacgagaagttctttgggcgcctgtcccacctgaacctgtgtgttaccaatgctatgcgagaagacctggcggataactggcacatcaggtaccatggcctgggatgacggcggcctgggagaggcgcggggcccctgattggctgcagtgagagctgccttgcctgctgccgtcctgctgaggggcaatttgaaatactgagggcctgggaggtggtctttggtttggggaagctgggggaggagggggcagagtttctttcttagccagccakggggtccaggcagttttggtcctaggacgtctctctgtgcattcccaagtaattgcaaggcttcttcttgtcatcatctgagacttggattccccaagcgtccttcttttcctggagcctctgagtcctctattcctgaggcctttcttcagccctcccaatagccccgycatgatttcattgcagggctgtgaccgtctacgacaagcccgcatctttctttmaagasacacctctggacctgcagcaccggctcttcatgaagctgggcagcatrcactctccgttcagggcccggtaggcctcccatcctcagctgccttctctcctgctcrccactgccctggcctctccccttctcactgcagacctgggaayccactcatccrggggttggcaaactaaggctacaggccagtctsctgcttttgtaaatcaagtttcactgggacacaacacactcattgccttctgagttgtctacagccgcctttgagctgcaatagcagaatcgcgttttgcaacagagaacctgtggcccgcaaagcctgaagtatttactctctggccctttaagaaatgtttgtggacccctgcgctgtcttactctcctgccagtggcttcccaggcctgtggcaggatctgtggacctgtgtgtcccctggggtgtctcatggggctaaggaggggacctttgtgcaggtctacgcaccctgaggtgtgccctgggtaagctggggtggtgtgggagggcgtccctgcaccctcatcttgagtccaggggatgataagacagtaagtcccgtggagaaaaggaatgagtcagtcttgtttgctgttgtaaccttagcacccagcaacaatattagagaaagcaagcccaggcctcagatggcaggggtggcctggtgctgctgatgtggccgggcaccccaacctctgggagcctgcaggcctcgccacggcaggagatgcctctcctgggtcccgggcctgctctatggcctctcacaggctttttttctgctccttcagctcagaacctgaggacccagtcacggagcggtcggccttcacggagcgggatgctgggagcgggctggtgacgcgtctccgtgagcggccagccctgctsgtcagcagcacgagctggacaggtctgcaggacccctggggcacytggggttggtgtgacgggcacctggccaacctgtgttctcctcacccctgccagtcctgcatgctcccaccctgccacrgtctcaatgagaaygggagggcctgtgagctggaagaggggtgtctagaaacaggcccctgacattcaattctcttctcatagaggacgaagacttctccatcctgctggcagctttagaaagtaggtgtgtggctgcggtgaggagctctgggcttgtcgggggccactgagctgtaagctgcttgcctggyctgcagcatgttcctgtcccaggccactgggtggggcagcctggggacagcgggggtggtggaagtgggccgccctgaatccccagttgggtcattgagtgaccaggccctcaggctgaaatgccccctccaggagagtatctcacacaggctggtggcctccccgccagagcagtgctctttctccacctgaccaggtgactctggctattgtttatttaaaaawttttttctgaatgggcatggtggctcaaacctgtaatcctagaactctgggaggccgaggcaggcagatcatctgaggtcaggagttcgagaccaacctggccaacagggcgaaacctgtctctactaaaaatacaaaaattagctaggtatggtggtgggcgcctgtcatcccagctacttgggaggctgatgcacgagaattacttgaacccaggaggcagaggttgcagtgagctgagatcgcgccattgcattccagcctgggtgacagagtgagagtctgtcagaaaaaaaaaaaaattctatcagaaattccatgtagaattgtttctttttctaaacacagagtttgaacaactgactcttgatggacacaaccttccttctctcgtctgtgtgataacaggtactgcctgggaccctgggtgtctgtttggttgggggatggcggagggggaggggcacgcagcctttaccctgtgcttcccaygatcttgtctccttaatcctcactgcagctctgccatagggtcttatactgcttgacatgggggaaactgaggctcagaggcagggyagggagcccagatttgaatctgtagataccaagctttctactttttcagtagtttccaagcatcttttttttgttgttgttacgtcattggtgtcttttttttttttttttgagacagagtctctgtcgcccaggctggagtgcagtggtgcgatctcggctcactgcaacctccgcctcccacattcaagcaattctcatgccccagcctcccgagtggctgggactacaggtgcccaccacaactgcctaatttttgtatttttagtagagacagggtttcaccatgttggccaggctggtcttgaactcctgacctcaggtgatccayccgccttggcctcccaatatgctggaattacaggcacgaatcactgtgcccggycatgtcattggtgccttaaccaagcctcttaatttttcaaacggaagagcccctgtcccacagttactgctgctgagccctttcaaggtgactcagtgaggagggagaaaagcggaagcggtgtgggaagaggccgggtctgggccagctgctggtcctgctctcctccctcctctggcctctrggctcccaggagtggtttggaacccgcgccatatgctctgggggctgtgccagggcaggaggagtcctcgtgtcccctgtgcacaacacagacaaaaggctgggtccacccagtgggcggtcgggtgccaggccagtgcttaccccgccatgtttgcagcccgaggccagctggctgcaggtgaaaggctatgygtcaggggtcagggtgcacacacccctgcaggtctcrgggctcctgggttgcttctggaagggcccggatggggcctgactggagctgctgaggggtggagcttctgggaaagggatccctcctaggggggagtgtcttgggcctggggccacgtggcagggacagagatgggtccatggcagtgtctgctcttctctgtgaaggcaaagggcctctgagggagtattayagccgcctcatccaccagaagcayttccagcacatccaggtctgcaccccctggctggaggccgaggactaccccctgcttctaggtgagaggccagcaggaggctcagggaggaggcggggggarsagggtgggcgggatgtactttttctgaaaaggtggctctggaggccactgggggacgggacctgggctctggctgaactcccagsaggaggctacttcctggtgtgccagcccctccctgccaggtggccccaggggccgtttaccaaggggtttgaggaggccacgtcctttcagcctgccacgccctccattcagtcctcttccttcctgcaggagggctgggcctggggttggggccactgttgcccaggtgtgggagggcagtggctttgggaggtacggggacgatgtgtcaaacagcgtcgcctctcccagtgagatggttctcctttgcctccgtctctttccccgttgatttctccaagtggggagtcgtgccttggtcytgatgcgtctctagagctgcatcttccagcttcgagtgagcagagcagttggaggctgaaggccttttcctggcaggactctccacctagtctttgttttagacagtctcgctccgttgcctaggctggagtgcatgatctcagttcatgcaacctctgcctcctgggttcaagcgattttcccacctcagcctcccgagtagattacgggattacaggagcccaccacaacacctggcttatttttgtatttttagtagagacagggtttcaccatgttggccaggctggtcttgaactcctgacctcaagtgatcctcctgccttggcctccctaagtgcttggattccaggtgtgacccatcacgcctggccccagctagtctttagaaatgttaagctatttggctttattttcacagtgacagctggtttgtggtgggtgtgctgtggtttattattattatcattttgagatggagtttcgctcttgtagaccaggctggagtgcaatggtgtgatcttggctcacgcaacctccgccttcccgggttcaagcgattctcctgcctcagcctcccgagtagctgtgactacaggcgcctgccacgacgcttggctaattttgtattttttttagtagagatggggtttcaccatgtgggccaggctggtcttgaactcctgacctcaggtgatctgcccgccttggcctcccaaaatgctgggattacaggcaggaggtgaacctgggaggtggaggttgcagtgagctgagattgtgccactgcactccagcctgggtgacagaatgagactctgtctcaaaacaaaacaacacaacaacaaaaaaaccaaattgtggttacgtataaaaagtgtcaacttacattttcagatgtcccagccaggctgtgtggctgcttggccagcttaagccacttgtgtttggggctgttgggggccttatctgattttcactctycttgggggatgctgcctcactgtgctgggaggatttgtgttcccagggcagagaccagtgctctgacccacccctcttgcctagcagggtcggcggacctgggtgtctgtctgcacacgtcctccagtggcctggacctgcccatgaaggtggtggacatgttygggtgctgtttgcctgtgtgtgctgtgaacttcaagtggtaggagcagaacccaaatccttctggggatagctttgcagatccaccgctgagggggaagcagtgcagagggagctgcccacagtgaggccctgcccctcggtcagtccrgcacacactggaggccatgaggaggagccctgcggttactgtggctgggctgagcctcactgaagtagttgcttccatttagagctcatgttatatttaggttggtacaaaagtaatcatggtttttgccattaaaaatggcaactacttttgcaccaacccaatatgaaaacaaaaagcaccttaaataccagaactccactcggggcttttgctcctagggtagaattggtgggaattgcctgcaggcttacatggttttctttgtttttctctcccaccatgtcccttttggccaagctcacatggtcggtttgaatcagttaaatgagtgtcatgctgtggcctcactgcacccagcgtagacgggtgtttggaagggcagtgttagaggagattctagaagcagtagccccagcacaagttgagcccttggcccctgctcaggagccggcccctggatgggatttagggatgtgagcccctcgtgtgagctgagctcagggaatgtcgggatcaaacctggtgccctagaaaagtcatcttttatgtgctgagccagtccccagggcgttgcctttacttgttccatggccatggaattaagaaaaacatgcaaaaataattcttcagtccttgaagagcatccagcacagaaggtacaaaccccccttaaggctccctcctcaaatgggtgtggccattttgatgtgcacccccccaggcctttatacccttcagatgccaaatctaagaaccagctcccggaaaccacaccccctgttccaacccccagcctggcttgagcatggggtgtgtgkgggagcccaggtgggcaccccaggggtctggtgtcttctacaggcagctctcaggctcccttggttctctctgcagtttacatgagctggtgaaacatgaagaaaatggcctggtctttgaggactcagaggaactggcagctcagctgcaggtagccacgtctgccaccacgccagggtggggagggttctggagactggcaccgagccaggctccctgatccctgcttcccacagccagggtgggaccatgtggggtctggcggaaaagctagggagggagcagaggtcacagaggctggcccactctgctgtcccgtttcggtacagtaggctcgggaaagttaagacacacccccacctgccctctggatttatggagctgacactccacaaatgatgctggagctgggtgggccgggctgcggttgaggaagtgatcaggatcacgtaggtgggcgggcaaagggagcttctgggaccagccttgaaagatgggtggaattctgcaaaggttacttgtttcttattgcaaaaagtaatacatcattcttgccaacagaatgattggcaggattttcagtaaaggtccaggtcggaagtcrtttagactgggttccccagtctctgtcagaaccatggtactctgttggggtgtgaaagtagccacagatcatctgtagattaaggggtgtggctttgttccaataaaactttatttacaaacacaggctgtgggctggatttggcctgcaggctgtagtttgtgatccttgattcagasagtttagcaaggctgmaaagaacaccvacacccccttgttacccacagatgggtgggactgcgttggccagaggccgagaggagggtgctcacaggggaatgggcagcaygtagaggccgggaggtgctccagggcaccaagtgtgggaaagtgggacatrcggggaagtttccagaaactgtgatgtcaagttggaggcggagtgctgctggggtgtgaagrgtctcragtccaagtgagggagttagggacttgggaggggttgttgttgggtcggggacctggggtcakccaggtggtgacctgggatggggtggggacaggcaatgaggtaagctctgctctttatttttttgcagatgcttttctcaaactttcctgatcctgcgggcaagctaaaccagttccggaagaacctgcgggartcgcagcagctccgatgggatkagagctgggtgcagactgtgctccctttggttatggacacataactcctgggccagaggctataaaaccccaggacccctgctgtccttcccgcagcttcttcttrgagtctcagggcaaaycctttygagcagcacctcccagtggccagaagctgaaatgacagcagtrgtrcyrcctggtraawgaattggttctgtgacccgggaagctktggttggccttgatttcttctctggaggcttggaaacgcttcctctcttcttctgttcttcacgccccatgcccctgctagcgtattactgttctgtgacttccctgtgacctctgcagaactcctcatcctgcgtttggtctccaggtgtcccctttctgccgtgttcctaacattttgattcctgtcttgaaaaaagcacctgctgcaccgtaagcccagggatgtggcagctgcagtgggcttggctttgtgaggaactgagtgtgtccacgttgggggaacatcatacttgatacacacgtttttatttgcacaaagaaaatgctrtttttggagccagaattttcatgtctgatttatggtgattttcttaagaaccagaactgctggcagaaagggggcacccacacgcttagatagccgatgtcttattagagggcagtttgtggttcctgatttggaaattaacattctccaaacattccagtccaatgaaagttttatccgctttcccatataaaaattcttcccatgagagtgacttgattctcacaatcccgttggagtcgtgtgtgagtcctacagggtgagattcagcattgccatctccaagtgctcttcgtagggaaacagtttctgctcatgacgaggttccacttcccatctgatcccggcccggcctggaaacagagcacatgtgtttgaggatggcggtgtttggggacaggacatgagggtattgtgtggggctgctaggacaggcctggcggggtaggggggtgtccaagtcagtttacttggttcacaggttcccaggcccacccaggtgcctagaattggcctccaggatgggaccagaaagctggttttgcatagaaatggctagcagcagggaccgtgccgctgtccactctctgcctgtgtccgccccagcacttggcacagcgggacagaagcagagatctgaatagtcaacccactcttcacaaagcttagaaagcggccgggcacagtggctcatgcctgtaatcccaacactttgggaggccaaggcgggcggatcacttgaggtcaggagttcgagaccagcctggccaacatggtgaaatcccatctctacaaaaatacagaaattagccaggcatgatggcgagtgcctgtaatcccagctacttgggaggctgaggtgggagaattgcttgaacccaggaggtggaggttgcagtgagctgagattgtgccactgcactccagcctgagtgacagagtgagactaagtctcaaaaaaaaaaaaaaaaaaccacacgcaccacacacacacccacacacacacacagcttagaaggggctgctgttctcataagcacacatgtctgaagagccgttagccaaaatgattctttttttttgttttgagatatgaacttgttctgtcacccaggctggagtgcagtggcacagtcattgctcactacagcctcgactcctgggctctagcaatcctcccacttcctgagtagctgggatgacaggtgcgtgccaccatgccagtaatttttttattttgtagagatggggtcctgaacgcatggcctcaagtgatgctcctgcctcagcctcttttattatttgtttttagacgaagttttactctgttccccaggctggagtgcagtggcacaatctcagctcactgcaacgcctcccaggttcaagtgattctcctgcctcagtctcccgagtagctttgactataggcgtgcaccaccacgcctggctaatttttgtgtttttagtagagatggggtttcaccatgtgggccaggctggtcttgaactcgacctcaggtgatctgctcacctcagcctcccaaagcctcagcctcttacagtgttgggattacaggcgtgagacactgtgacmcgggaygattttcaatcacagttttttgttacgagtggaaaatgcgtatttataagaatgaagtagtacagacatgaatgtgtagaaatctctataatcctgccatccaaggatggcacctgttaatgtgtatatcagggatgtccaatcttttggcctccctgtgccacactggaagaagaagaatcgccttgggccacgcataaaatacactaacactagcaatacctgatgagctaaaagaaaaaaaatcacaaaaaaacctcgtactgtttgaagaaagtttacagatttgcgttgggccgcaggttggacaagactgctatatgtatattctaggttttcccctataggtatacttatgtgaaaatgattattgtgataaattttgttttgagatgaagtctcgctatgttgctcaaggtggccacaaactcctgggcttaagccatcctcccgcgtcagcctcctgaggagttgggaatataggtactcataaccatgtgtgggtgattattattagtttttaaacaaaaatggggttgggcgcagtagctcacgcccgtattcctaacactttgggaggctgaggcggcagatcacttgaggtcaggagttcaagaccagcctggccaacatggcgaaacctcaactctacaaacaatacaaaaaatagccaggtgtggtagcacgtgcctgtagtcccagctactcaggaggctgagatgggaggatagcttgaacctgggaggtgggaggttgcagtgggccgagatggcaccactgcactccagcctgggcaatacaaagccagactctgtctcaaaaaaaaaaaaaaaaaaaaaggtgggtgggggcttatactatgtgtgctgcttggcactgtttttttcacttaaaatatattgcaggttttttttcacgtaagtatctgaagaaagacttccttttttttttttattttttatttctttgcttttttgagacagggtcttgctctgttgcccaggctggagtgcagtggtgagatcagggctcactgcagcctccatctcctgggctcaagccatcctcccacctcagcctcctgagtagctgggactacaggcgtgtgcaaccacatctggctagcttctgtatgttttgtgaagatggggtcccactatgtggcccaggttggtcttgaacacctggggtcaagtagtcctcttgccttagcctcctaaagtgctgggatgacaggcctgagccctgcgcccggccagcctcctgtgcgaggtggtgggggactctgtcgtggaacccagtacgtcttcgtgtgctggcttgtttgttggctctgtagttaacgggctgccccacgtggacaggcactgggttgtctgtgtctctgtgtgcaggcagaggctgctgcatgtgcatctgtgcacatggctgccaggaggggctgtgctcagggggagctggggcaaaggctggtggcactggggggcttgggtgtagtgtggaggcgtgagagccaggtggccggggtgcagtctgcgggagctcgggggtctcttggcctccgtgtgtcctagtgtctttgttggtgagatgggacagtgacagcacaccctcacagttgctgggggctgacaaatgtcaggtctgaggacagttgctggcccactatggggccagttccccttctctacagtcaccctgctcgtcttccaccgactgggtgctcaggacagtggcgtggtggatccgcctgtacatcctgtgctccagcgtcctgcaggccacagctgtgtccagccctgaccccgactgcccctcccgccacctccattttatagatgaggaaaccgaggcccaagggcttagggaaccctgctctgaagcacacagtagggctgctgggctcagaccctccctccctgtgctgagctgccctcctcctgccgcaagccccccacgccccaagcccaccctgctcactggcctctgcctgagttccccccatggtgtgggagtgtggggcaacctagcttttccccggcacccagttctttcacttccactggcgtcctgcagggacagctcagggaccatgcaggcccgggtgggcgtggaggctcacctagctcggtggtgaacagctggcacgtctctgggttgcggacggtaaaggccacgtagacctcaggagcccgctggtcctcccggcaggcagccagcctccgcaggacgccgaccagcgacatgatggcttctgggcaatacagcacatctatggtgaaagcttcaggttactgaaagggaccagtggacaggtccaggtcatgctgacgtcagcagcagggcgaggccagagaggcagcggtcatatgagactagtagatgccatttgaccatttgggccattagatggaaaggcaattacttgggtgaaaaaggagaacccttagtagagaaagctgcaaaagaccgaagcaaaagaaaaaaatctccagactcactggtgttccttaaaaaaccagctctggttcttggcctatctagagggctttgaatgacacaaagcctgaccctgccatgaacttcatgtttcaggcatctgctgatttgtctgctggcttgcaggggtgggcttgtgtccctggccaccgctggacctgtgggtttcagggctgggacctaggaccacaggcagagctctgttccaccagagaggggactgagtgtgctggcaggggtgaggggttttcggtggcccagccaaacaccaccttctctcaagggccctgtcttcgtcccagaagtggttgttttcctcctgtggtctctgaaggacacagggcatggctctgggacagagccatgtggtracgactggaacgggagtatgcctgtctccaaaaagagggctgtgggttgaaggtcaccttaagaggcacccctgtcctktgatgtcaccctggaggcccagagtaactcttctggaagccccatcatgtccatgcccgacagcgtccattgttcccttttcccagagccaagagctgggtagagctgcaaggacaccacctgcacagggtgcccggggctgggcattacctgctgcaatgacaacatctggctggaaggcagagagctgatggaccgtcgcgacgtcccagtccagctgggccactgtcaccctggggctgtctaacttggcagtgatgtctgcctctaatgagaggccattgagaaggacattccctcggagctgctcaaggacccggctgtgacagtcgctgaagatgtatgcccgggggcggcacatcttgcagatggccaggcctgtgaggccagcaccactgccaagctctaggacagtcctggcgggaggaaaggggaccgtgtctgcgactgcaccagggtaagcctgcctcggtgccctgccctgcgccccgaggtcacctgttagtgaagactgccgggttctcgatggcccattctgcaaggtagagggcggcgtcccatgtgaccaggcctgtggtaccgtaggagatgatggccgtgctctcggagagtgtgaccgagcctccygagggctgcaccaagagaaggcgagagagtcagtccagcgatcagaaggcaagtggcttagaagacaagtagccccaccacatggctgaataaaccatgacaggaccaatcgccactcagcaatgagaagcagctaactgttggcatgccaacagctttcacgggcctcaagggtgtcacgcggtgtgaaagacactcatctcaggccacacaggattccattcatcgaaccttcctgagacaacggaattctggcgatggaacacatgtcagtggtggccaggggacaggtgtggctatgaaggggtggctgccttgtgatgattcaatatgctgtttttcctttgtggttttctgtatctatgttttatcttatttttttttgagctctgtcacccaggctggagtcagtggcacgatcttggctcactgcaacctctgcctcctgggttcaagcaattctcctgcctcagccgcccaggtagctgcgaatacaggcgtgtgccaccatgtccggctactttttgtacttttttttgagacagagatttgctctcgttgcccaggctggagtgcaatagcgtgatcttggctcactacaacctccacctcctgggttgaagagattctcctgcctcagcctccctagtagctgggattacaggcgcccactaccacaccccgctaatttttgtatttttagtaaagatggagtttcaccatgttggccaggctggtctcaaactcctgacctcaggtgatccccccgcctcagcctcccaaaatgctgggattacaggcatgagccaccacgcccggcctgatttttgtatttttagtagagacagggtttcaccatattggccaggttggtctcgaactcctgacctcagatgcaaccacttcggcctcccaaagcgctgggattacaggcgtgagccaccacgcccagccctgtcaagtattctttgaggactgggcaccaggtccttgtr

SEQ ID NO: 94362 - DNA, 206160 bp, Homo sapiens
  misc_feature (1)...(206160): n = A,T,C or G
ttaccagagacagtgtcagcaagagggctacatctggactggcccctttgatctaaacatcatcattatgagaagggaaagactcctagcttcaaataattttcttccaagtttggtgggaaaggactaaaaaaaatgtacatattggaggaggggtatctgttgactatttaagtcagaaatgtcctggctaacttgactttttacaacatcatcactttatctcctatgaacaatgatttcacctaatatctattctcactatcatgccacaaaatggcagcaagtaggtattttggagagtactaaatggggctaattacagatatcatttacctgctctcattcaactccgtgaaggtgttattggctccttggccactcacagtgaattctatagctgtgtaccttcctaggagttggcccaggtagagatataaacagcacgaagaacagtttagctcagttcatgaatgagaaattaataactaactattcttagaaattagggtatttctgacttttggagattgatgtcacgaacaaaaactattccacattctgagaaagtcaagaaaatgtgacttcaggcccgccagaggcagcctcctgtgtgctagaaggacccttcacccaacctgacgcctcttggactccacgtggctaataggtgaggacattaactcataggaatcttggaaactaacaaaataaatagtacctaggtatcaaagtccttcgaaaggacttgttctctgatcttacagtagcagcttccactcccctttgtaatggctgcgctcagaagaacgtgaaaaaagaaggatttaaaacaactggagacacgtactccagacatgtcttttcccattaccccaatttgatatcagcgaagtaccagctgtcccctggtaaactttggtgatggagaattttaaacacacacactatcttgctaatgcttttattttctgttttcaccatatactttctgctacttcctaatgctattcctgacatacagcagtgctgaataatctgtacagcaacaaggtggaatagaaagaacacaaactggaatgagaaaggtccaggtttgaatcttggctctatcatgtacttaggtactgcatggcctggtacacatataaatacagggcacttgaagtctcaagtttatttccatgttaaagcagacacacacacacacacacacacacacacacacacacacacacacacttaccccgcaaccacttacctcggtgtattagtctgactgagctgcaataacgaaacagtaacaaaataccacaggctatgtagcttacacaacagaaattaattttctcacagttctggaggctgaaagtccaagattaggtgctgtaagggttggtttctggtgagatctctctccttggcttgcaggcttctcattgtgttctcacatgtgtagagaggaggagctctggtgtttcctcctcctccaaatttatatgtattacacaccacaccacacacacacacacacacacacacaaatatgattccatttatatgaagtttaataaccagcaaaacaaatccatggtggtagaagggtgatactgactaaaaagtcacacaagggaatttcctgaggagatggacgttttctatatcttgacctgggtggtggccccatgcatgtatacacatgaaaaggtcttcaagctgcatctacacttaagagttgtgctttttattgaatgtgaattgtatcttcctaaaacactgtctaaaaatattacactcctcccaactcccaccataacccatctctaccctagacccagggcataagatacagaagcagaggattcagagaggatgtatatttgaaaaagcttcccacttctctccattactccaagttgctaaacatccttttaggaattggaattaagctggactatatacatacatgtacatataaaacttaaaaatttgtaaaaggcccctagagatcatcagagttttcttaacaaagcaggcttactttccagttggctttgatttggggaacttgttctgctttcagtggcttcagcatctttgaaggtgtaaaatgaatgcattaatgagaggaacacattggggctgggaggaattgtggaagcccacgggattcttctttgtatttgtagtttgaattgggcttataagaatctggtaattgctttgagaaatgtaatattgataagttcttacaattgcaaagctttaaagcaaacatgtagtgatgtgttcaggacctattccatgagtcgaattccttttcaccctgatgtagtataaggagacttgagtgtgacaaagatttaggaaatgggtttcttttttctttttgaaagaaacttgaaactagcttttatatatttatcctgagaatgaaaggtttttgtcacttcaagctgtactttctatttagaaaatattctttttttttttttttgagacgaagccttgctctgtcgcccaggctggagtgccatggcgcgatctcgggtcactgcaagctccacctcctgggttcacgccattctcctgcctcagcctcccaagtagatgggactgcaggcgcccaccaccacgcctggctaattttgtatttttagtagagaaggggtttcactgtggtctcgatctcctgacctcgtgatccacccgcctcggcctcccaaagtgctgggattataggtgtgagccaccgcgcccggccttagaaaatattcttatttgtattgcctttctgtgatctattctaaagaaaaagaaatatggctagtcagatacactctataggcttttaagttaataacgcatattttttttctttttcaagagaggatctcactctgtcacccaggctggagtgcagtggtgtgatctcagctctgtgcagcctcggtctctcaggctcatgcaatcctcccacctcagcctctctagtagctgggactacaagcctcgagctaccatacctgactaatttttgtattttgtgtagagttggggtttcgccatgttgcccagactgtcttcctgtaagtaaaattatctaaatttttaaaatgtgtccacagggttagtgctaaatcttagctttacttatcattgaacactcagccacattcattggagtctcaacattcattctcatctgaaggtggtgtgaaaacagtcctgtccccagacactggctttatccactggctttattgcttagcttcctccacaggcatgccatctatctggagaagagtactttgatggaagtttagtcctgggaaagacctcagagatgaactattccaaccaagctctgccctctttgccacactctacttagaaaataaattcaggcctagaggtgaagtgccttgatcagggtcccaaggctggtcagaggcagaaccggaacccttgtgtctgcccaagaaggacaacaagtcctttgctgcttcttttatgccacaacagcctcagggtgctgtgctcagtttggtagcacagtgatgttagagcaacacaatatatttcctagtgtcttttcactagaaaagacaccaagcaagaggtctcccatctcccaggaaagagcaaaagccagagttttacattgagatcctgaaggcattttcttatctttaatcctaatcctgtttgggtccaatttcaaagagatgaagagcatgcactttaggcctgacagactagggccctgatcatatcttcctagttgtatgaccctcagtgagacaggtaatttcttcatgcctcactttcctcatctaggaatgggggagtgctttccacactttctggaacacagtcaggcactgcctaatgttttctttggaaacccagcacgtctgtacagctatttcctttaaaatgtgagaaagttgatttcccttcaaccttttctttccatcacttttgcattgcactcggcgttttctctaatttacagttctagagattggcagatgctcgaagaaaatcagagtcactacggatttatttattttattttattttattttattttatttttttgagaggagtctggccctgtagcccaggctggagtgcagtggcgcgatctcggctcactgcaacctccgcctcccaagttcaagcaattaacctgcctcagccccagagtagctgggactacaggcgcacgccgccacccccgaaacattttttgaattttagtagagacggggtttcaccgtgttgcccgggctggtgtcgaacttctgagctcagccaatcccccagctttggcttcccaaagtgctgggattacaggtgtgagccaccgcgctttttggtttccaattctcttccccaagaggccaggaatttttgcatgagttgccggacactgaagtgatttgggacaatacattgtgtgccaacgacttcaaggtcccttttcaacaaaggactggaatcttaccgagataaatcccaagacatgtttgtagcaatgcaaaggaccacagaaatctagacaaattatttaattttgcagctacagaaacctaggatctcaggggctgggatactcctcagttatccaatcgggcagggcctaaaacccaggttcagtcgcctggctccgagctttttccatcataccagctgcgtctcattaactccacctccgaaagtgctaaggaagttccctcccagtgcctacccaggcagggtggggcgattctgtggcatggaacaaaccgggaaaacgacattttccaactctcagcacacaggctgctttttatcattcctacggggcgggagggggcagggagagaaggctaagacaccgggtccagtacccagagattctagggagagatctctgagattgcctacttggtgaggccaccttactttctcctggtctgttttcccctgtggggtggctgcatgaaacgtcctgcttggagggttccccaatataaggtggactattctgaatgtaggtcggggtgagcaagttcctgccgccgccccgtctctgcggtcctcggaagtctaggtgggctcttccttgccttgcctctttctccccaacggcgggagcagcccagggttggggtggctgcggtcgccttgctctctccacttccacgtctcttactccagggagtttcatccggtcctccgtcctcggcccccaccttttaaaacattttccaaaactaccccattaaaagtgtgcgacttctccgggcctgcagaaggagctcctgcagcccggcattcctcggattccagcgctgtgacgtccccaaggacggcgcgcctccagctcgggagctcgggagctggggctccacgtttcagcgcgcgcccgcggcgcccccggcgcgcgccctcccgggccgcattcctccccgcccccggccgcgcgcccagcgctccctccgcctcccggcccccagggccgcggagcccggctctggggtgggggagccgtggccgccggcgcctgctccgtcccctcccactcgcacggccccttcctccctcctctcccggccgctcgcatttcctgccgctctggctctcccggcccctcaaagttctttccaactttttctcggcggagtgagcgcagcgggcgcagactcgggggcaggttgctgtgcttctccgggctcagccgcctgctctcctggctcaggtcctcggggagccctagacagacatcaagtggccactggcgctccttcccctcccagctgagccatcctccccggcctcctcgggcgggacagccccgtgcttaggtttttctccttttctcccccggtgcgcctctgctcggactctcgcgccgggatcgcggcggaaacctccctcccctttcgcctcctgcggctccttcccttcgcccctcctccgccagtcactggaatcaattccgtggggaatcggctccgccgccgcgaaggacagcctttccgcgcgggactccggggcgccacgggggccatgtaagcaggtaagccccgtccaagccgggagttgggcccgaggttggaggccgccttggcgctccgggcgccctgcagatgacttgggcagacgctggcaacgccaacttgmgattggcgscccgggacgcctggcagggcagcctggggcgcggggtggccgggccgcaggggtgttatctcgcggtgggagctgcccgcggtgaggcgcaaagctggtcccgggagcgagctggaaggtgagcgcagtctggggagtttgtggttaaacccacaccctggtcccctctctccattcccttctgcgttttgggaacgagagagggcctcggaagggcaactagagatacctagaccttgggggctagaggatgaaagacgaacgacgtcgcggtcgctgcagcggtagggggatgcagctgcccgacgctcccaatcacaccccaccaccaccgggaaggaatcttgaggggagcggagttttcctgccctctcactaggccccagtggtgccascgaactcctgggcgtcgaggctcctacttgggtggtcgagctggctcgtagaaaaaaagctgtggccaaacaatttcagatcaggtcttcacctcaaacttccaaagttgtaggtattaacagcctctccttccccacgtgacccccagatctcaggtttgaatacttgtaaatggggtttacaccttttcgtttggagagagcagtgaggtaacgctgcccctatctccctttccctctcacttccttgggttcttgttctccaaccttctcatccccacctacaatttcagaaattgtggggtttccgcttaagtctagggactggctgtcgcaggttctttgtgaaggtgaggaatctctagactgcaggtgcgggcagttacagagtttccaccaatgtgttaacttcttgaaatggattagtttactcattcatccaacaaacccagcttctactctgctaggaacagaggatagaaagatgctaaatgagatcacagggcaggagtctgcagcctagtggaggaaacttgaaggccggtgaagaatgataatacatggaagaggggttctgtgagagtctgaggcgagcttggtcctggtgaagggtgcactacacttagaggatagaggttgtgctcctctggagggtgtattccaggcagaggaaacagctcgtgcagagtgaacacaagaaggacagaaagtttccctagccatctgggggcctgaggggcatttatggccatgttggtgcagtgttgctgggatagcattctctccacccccaatatcaraaataaatctagaagcacgttagccacttatgggaaccacaagtagcttacmgaggagccaaggcctccctaattggatacacctccatgcctgctgctgttttaccacaagcagctgttgtatgatcatctacattttaattggcccatgctcggtttcattaaaatggtattgattcttcttttttgtcccccacattcaagcaatgattccttttttaaaaaggctgtttgacagccgtaggtgtggtaataccgcagcattacggaccttgtattataaagttagctaattgtttggtgatgaggttgaagcttgtgccatagaaatgacagccttaatgagcgggagctgaatggcatgatgccctttttgcccagtctgaatgggtggccatgaggtgcaaaattcgttcatctgtatgtcactaagtttgttatacttttctctgcttttaagtcattactattgctttagcacagttgtgctaaagtcgttcttttctctgaaactttatgaaaatagaaaacactatcttgcacatttttgtagactaatggcccaggattcagcaaatcctgcctagaaaagtttcttacaatgcagtagcattctgtacgtggtttgcctttcaagggtgtctcttcactggactgaagtggtgttgtagtattgttcatagtggctgagtcctggctgaggtggcagacatccagcttttggtgacctcaggccagtacatcagagtgggaagaacacactgacttcctacaactttgggtgtttatccaagcccctctaccagcatcttttcttatctcaggaacagccccttcacagaagttttcctgaaggtgtagggacctgcatgagagaaatggctgaagagaagcccactcccactaatcccagacatttgcccagtttccatcattggcttaaacatgtaattattattaacacttgagttattcagatttgtgcatactgtgtcatgctggtagctgtaatagaaaggacagttaggcttttaatagggaagcaccataaggaattcagagaaaaatcagaatttttagaataattcttatttgccctgaacggatgggctaagtgtcaagaactatgaggattttttattttccagtgccttccttccttattagaggtttaaatttgctccggggaagcaaacatcaaccctttgattacatattatagcccccctgggttccatattcttgtcatttttgaacaaggatttcatcaaattcttgcatttgagcttcattacttagtcaccaaatgctgtgtttttaaaaaattcattttaagcctgagaacagtgctgtgagctttgttagagataaggcatgagaaagacaagatgaaatacttaattagccaattaaggaatgagggaaaacaaacacgaaagctttggtagggaggaggttcaagttaatgttaaaatacgcttttggatctccccttacggatttaaattgatttaatttacgcttcctctgtatgcatcccatggagggcttattgagtggtccaaggggtatgtgtggcaaattctgtagcttttcctggctgtcagtgtgctggagcaggcggtccaggtttgggagtttgaaatatagctaggttggaattctagcgctgccattttttagctgtgtgatgttggatggacgtcatagcccttctgagcctcagtttcttcatctgcaaaatggatctggtaacatttggcctctcaggatatgtatggagaattcagtgtcatgctgtataacagtacctcacacagaataggtcaaggatggctatttatatgttcaaggacttgtatgtggccatgaatgtgctctttgtgtgtgatttttttcagcagcctgaattcacatgtgtgtcaacatacacataaagctttgtttttgacttttttttttttttcagtctattggctcaaaataaacatgttggctggcagctgccatgtggctcctcctacaagaggaaattgagaggtgggggaccaggcagtagagaagtttgaggagggaaagccactgagagattagaagggcagagaacaagatccttttccttgtatacttcttactgtaatgatggtccagtgttttatataaggatccttgtatttctaatgttgaaatctagttgattaaagaatgttaggataactctgtctgcctttaactagagtacaaaagctagctgctgtatctttgcagccttgatttccctttttgaagcccraatataaacagtaaactgcaacacttctagtgtaatgccagccactggttatttgaactttaatgttgtctttcatctgagaagcctagagtatttgacaaacgttaaatcatagatcttcgtatcaacctcaaagcggaagggaatgttagaaggaatgaacaatgttagaacaatgttagaaaaaagggcaggtatgcagcgtgtgttcttgaaacaggatggcaaagaattggttaaatcttttctgcaggattgcgtgcagggctggagatcatatgaaggtatcctacccctttggggaatcggggagagagcccaggaaaatgcaggcctgacctggacttttgtaataggaggggagaggaaatgtatcttgcccagaccagcagtgcctttgccatatattgcatgcatgctgattatgaaaataaataatcttataattatttataattctgaattaaaggatatgatgcaatgcttgtggatgaaggacacagagtagctgtgtaaaaggtaatagtgactaagtgcctttttgtgtgataagggtagttctggctctaggttgggttataaatgacatattaacattgttttactttcctttcctttttcctgttggttctgtgtttcttgacttttcttcccccctcaagcttttgtttgattttcttcaggatccttgcaattggaaaaaacatttcatagccattcttagatcaaccttacatgtaaaatttgatatgtagttgatttagcttagtttccttaggggctaaattaggcccaggtcaagagtttcatcttgagcctcgtcaattagtttgaccccgaggactactgcatatccagagagccgtaaccctagctggccatcccgtaaatgctttatgttggtcaatagggaggagtctggtgagaaaatgagaaagggatcctttggtgatgtagcatcgtctctaagtagaaaaatatcctcttcacgtttagattgtttgagattttagtgctgaactgtattcctaagttaggaagccataccatgtgggccactgacttgatctactttgccttacaagttttgcgttcacagggaaaaattactcacagttgaaaattagccacagttcctaatgcatattttcgtatgaaatgtgtactttatttctacttaatttccttgtgtctttggaaattcacctctgggggttaatttgttcacactacattcctcaagtaattggggcattagccaaggcagtagattgtcaacctccagtgagcatcacctgcagggcttcttaaacaaaggttgccgttccccatgcctacctcggtttctggattcagcacgtttaaggtaggcctgagaatttccatttccaaagagctcctgggtgatgctcttggtcctgaccaactgcattttgagaagcactgagctaagaagtcttgcttggttcacccacccctgttcctcaggcttggtatggtggtcactttttcactgcaccagtttgaatgattccattcctggttgctttagagctgcagagaggcttggttaatggcctygtatccctagccaggttcatgtaaagcactaattagatgtttccatgttrctggatctccttggctatcgtctccagtccagacctctctgcttgctaccaaacagttgggtttatctggtgcttagatccatctgagtgtctgctatacatgccacatcctacctgtcccaacttgaactctccagtttcttgtcacaaaatgtgctgcttccaaattacctatctcagtgacattgctatctattgagttagctgctcaagccaggcatttggagttttcttcaacctgtcattcttagcaccctcaatccctttctcaaaccccagtaacaaatcccatcagtcattaggtcccttcgagtttgagtctgtaaaagtattttccatttgctcctttccctccatccttactggcctcttgagattgttccaagagcattgctgtggtttgaatgtcccctccaaaactcatggtaaaatttgattgccattgtaaacagtgttaaaaggtgggacctttacgaggtgattaggaggagccttcatgaagggattaatgtcagatttgttatctcaagagtagattgtgataaagggagtctggcccctggtacctttctccatgttctgtgcttgcctctaccttccacctttgcaccataggatgaccctggccaaataccagcaccatgcttttggacttttccagcctccagaactgtgagccaaataaacttctgctctttataaattacctaatctgtgatattctgttatagcagcagaaaattatttttactctttcagcgctgcagaaagggtttttgatctcaaatttttgaagattttacttttttgagtactatttaattgtttttccccttatgatatggattcctatcttctcatacccatctgctgctctttctctctatctgtgctagcgcccctaacacttagtggtgtttaattctcttctcctttgttacattcagacccagagtggtcttaccccttcctgcctgcttaacctctttgtggtcaactaaggctccaccttcactctgctcctccccactgaagccttcctttcctttcctttcttttctctttctcacctccccttccctcctcttttttctctctcacctcctcttccctcctcttttttctctcttacctcctcttccctcctcttttttctctctgtctctttcttctgttcccttcttttttttctttctcgttttgagatggagtctcgctctgtctyccaggctggagtgcagtggtgctatctcggctcactgcaacctccacctcccaggttcaagcgattctcctacctcagcctcctgagtagctgggattacaggcatacagccaccacacctggctaatttttaaatttttagtagagatggggttttgctgtgttggccaggctggtctcgaactcctgacctcaggtgatcctcccaccttggcctcccaaagggttgggattacaggcgtgagccactgagcccagcctttcttttctttctcgttcttttcttttccttctttctttgacagggttttaccctgtcaccaaggctggagtgcagtggggtgatcatggcttactgtaccttgacctcctggatttaagtgatcctcctacctcagcctctcaagtagctgggaccacaggtgccagccaccttgcctggctaatttttaaaaaatttttgtacagatggagtctccctatgttcaaacccaggctggtcctgaactcctgggctcaagcgatcctcctactttggcttcccaaagtattgggattccaggcgtgggcccctgtgcccagcccattcttttctttatagtcccatagcactttgaaattaccagcattagtaagtttaccatattatgcttgtttaccttcctatctcctctactaagttacaagcctctctggtagggatcttattcagttcatcttaggtggaggttgggtagccatagccatgatgacgatgatgttgccattttgcagataatgaattggagttgattattttttaaaagtgtggccgggcgcagtggctcacgcctgtaatcccaggattttgggaggctgaggcaaggggataatgaggtcaagagatcgagaccatcctggccaacatagtaataacccccgtctctactaaaagtacaaaaattagctgggcatggtggcgtgcacctgtagtcccagctactcaggagaatcacttgaacccaggaggcggaggttgcagtgagctgagatggcaccactgcacaccagcctgggagacagagcgagactccatctaaaaaaaaaaaacgtgttatagaatcagtgaatgaatgcatttctgaaatgctgacctgagggataagagctcagcctagtttgtgatttattatttattctttgataaataattactatgctctgggaaaattacatcttgttaatgactatatgtaatttttaaaaattaaacagatatcagtatgtattatacatatcttattatctttgttcatttgaggagacaaattccatttttaagctattttctgaagttactcatactatggttcttaatattttgctatacttggatacttaaaaaacatggtaatttttcctctcattttcaagtctaggaaatgttgtagatcatgggagaataaatatcactgaagggttaggaaggaggaacatctcagggttaagatataaacctttcaggtttggatttaccgattagaatatgcttagtttccgtcctatgcattattgtcttttgtatcatatagaaaagagaaaaaggcagaataccccattattcaaactcaaagttactagtttttacagtgagagaaagttggagagaccctatgacaccatgtcaaggcagatttgccagctcacgcatatccaagacagcctgttctacttatggaactataataagcagcagtgatatcattgatattcccccccaaatcacaagcttggctctcaccgttattttagctcctaagtcaacgggattaaggcagatttcatggtcatgaaagtgaatttgtcatgaattacgtatatacttcagcttgatgtttaaggttctccacaaatgattcccacgtgggcgtctgatttcttcagatttatgtcccactattcctcagggttatgccaaactgcaggtgtttcctgaacaggcccagtcattttccacctaatgttgtgctgtttccttgcctaaaaatcctaacactcatcattgcctatcaaaaccatccctccaagccctccttcaataccactttctctgggcagccttccctaatctctctctgggtcaggccctcttgccattctggccttggcattgacctcactgtgccctgtgtcctggttaacctacctcaccccctcactggcctgtcagctgcctgggaactgccactgcttcactcccccatgtccctgcctgtaactgtccatgcaggtctgccttccccttgcccaagaatgccctgtgaggctgaggctgcccccccgcgtcattatgacagacacctgttgtggcaccactttgtgtatgctgtcccctctcttggtgcgggcaccagtctcccttctatgctagagtcttttctaaggtatgtctgatattttcgctctcctgcttaaaatctttcttgccaccatatattgtttacacatatacacaggcacacacatacacattttctttatacctttactacatatatacatgcatactatatgtgtgtgtacatataacatacatactatatgtgtgtgtacatataacatacatacatatatatgtgtgtgtgtgtagtaaaagtataaggaaataccagaaggataaacacaaaagacagggtatggtgagcaggggtggaggtgaggacagacatgtgatactgttttgtttcctaagctgagtgatggaaacgtgtgtttattacattctcccttctaaaatatttcatttaaaaactgcttatgattaaagtacacactctctagcagagcactcaaggctctgcacagctcttttttaaaaatgtaaacagaaagtctcatttatttttgtctgaagcacacaggagctcactcagcacaatacaataagcgaatcatacaaatattgagaaaaaatattcccatgaatacatatgtatatattcttaagagcagcaatcaggagtttaacaacaatgtaaagtggttttctctaaataatgctttctgatgggcttttgggtaggaaatggacaggtaaatcaccatcacgtaacagatgagctaagaataacatctgttacccaagtcactggaaccctgtggcctgcgaaagccctcttggagtttacatttaattccgtcattggcctggttgacttccacatttcactaaatttggacaagatcaagaaactaacccctcaactctcaatctctcatactcagggatgtgggagggaagggcaggtgagatcaggtgtgaacacagtcagggctctgcatagctcttgatcacacctaacttcctagccttgtctggcctctcccctaaacatctcttggctccctgtgaaccttctccaaacatttctcagggttgaaaccttgttgctttgacttatgctgttattgttactttctgcccccactgcaattcttttttacatctgatcacataatctctttctgattctytaatgtgtatatgatttttatgtcctttttggaggttttatctgatgttccctttttattattagggataataatatccctaataatagttatattatcattgccatcttctctgccttcctataatactgtactgtttgcttattttcacacctttggagacatattttgtaatttatttatacttgggtttatggcatctgatgcagagtacatgttcaataaatgtttagggaattgatgagtaatagatgtaagagaaatgtttctaattgaagtaatttttttaagagtgtgtccaaaaaaacttcaaaacaaattgaaaggaatatttcttgggttcaatatctgaaattttgtttgtaaatctaatggatttacacatggatttcctagctctaacccatgatttgtattagatactcttcttctgcttttcccatttgctttatggtggtggattttttttttaaataaataaatagctgttcacgctcctcgtcctttcttttcccccatcaccatggagtagcttcatggttgctgtagtagtatctgtggacgtgtgtgagtcccagttgggaagtagctctaggctgtgaagtggtaccacttgtacagagtgatttctgccatcagcgctgcttgctctggggtggagaagtgacacctccatttagaggagaagctgcagtttatttttgtggcagatgtgtcccactgaagagctgtaataaccataataaaggaggattatgccgtattaggtttatgaagggtgcaccagtctgtttctagggtcagtggtgacagctcaagccagcaattaggtttcatttaagactccaggaggcaattagcattcccttctgcccaggaaatactgtgatctattaggcctattcttttgcattatacattttgtaaaatgtgctttaaatgatgaaggtacacattttttgacacataagcaagtcttcaatttatcatttgaaaaatggggctgacttttagactccctgtgtgtttaaatccgtgggttataatgactaacatcctgggtggattgtgctttttaaatcagtacatttttaaaagatcatatatattcttttattcaaaggtaaggaatttcttatggaatattatataattatgtgatttatgaggggaaaaatgggactgatgtgaaacaaattaaaactccaaaataatgaaatgacatctaccagtcttaattatattctttagaaaattattgttttacctaagaagtgtctaaaaataaaggctggggaggatgatttgtgcagtgcttctgctgagcagctgtttggttgttcctaaaatgaggcacgttttctgagtgccaggttaggtatgagtgtgtactttgtgccccttcatccttatgaatgtgtttaggaattttagctttgcccgtgaatatgcactaatatttagtagttattcaaactgctttcctccctcctcctctcttccctcctccctcttctttattgcctttctcactcctccctcctccttcttcccttccttcctttggaataaattagctcaaataatagtaaattattcctttggaataaattagtttggaggattctgatagattaattaccgtatatgtattcaacattaatatctttttgggtatgataaaagagaatgcacagtgagcagcacatcaggccagaagtgcaaagaccacctatttccatggggcaattaggctatctccttattgtttggttcttggtttacatttttttctcatttgtagatgataaaactataatagtgactgagctcagtactttgaaatctgtgtgtgttgacattaaaggctctgagaagtcttgcagtaaatgaaaatgtttcaaagctaaattcattttagtaagaatcttttaaaaaaaatctatgttatggaacacctgtaatatggaagggcactaatagtaaatggaatacctaccagagaaatcttggtttagaagttacctggatagagaagacatgtttgtggtctttaagaaactcaacatctaatttagaccatgtagtggcttggatcgttaaaatgattaaacatttaaagtcatcattagcagaccagaactaactttaattttttaaatagctagacttttgtgttttgtagcacataacaagagcaaattcaaagcaaaatatcaggaattattcacaaaatcaattttcaagaaaagtttaaagagcagtaggcatttagtttaatgtctttatagtacattgaagagtaacgttcagtttaaatttgagacactgagaatctcatccttcaaagaaaaattcagatatatccatttggcttatggaggctagaaaatgtggttaatattaatatatacagtacggaaaaatctttgttctgcaaattctggccttctgccctctgtctcccccacttacttagttagaatactgccaagaagcaagcaagcaagcaggctggggagttgtaagccactgagagctttagaaatgccattgcaattattttattaatagctgcctctgttcaaattgttttgtgtaattgggcacgtaacaggcattgtgaatataaataatatgaacagcttttctccaccatggcctctttacttatgtcaagctaatttgctcagtattctcttcatcggttttccccactcctatctttggccttttatacagcagagctttatgtatagaaaccccctttctgctataacctttaaacttgtaacaacattatgaaggagatgttatttttatctatagtttatccttgagaaatgtgagaattaaagaagttatttgctcagctctcacagctagtaagtggagtaagtggcatgtgaacccgttctctctgattccacagcccaagttcttaaccaccacgttaggctcagaagtctgtgtaggtcaagtacatgtgttccttcctccttccattcattctttccttttgtctatccaccagcttgtttaataaatgcattttgatgttttcgaaagtggagatgtttttctgtggtcataatcttgaaaagaatcagcaactaataacgtagcctttagccccatgtggctgtttagcatttgaaatgtggctagtctgagttgggatattgctgtcagtgtcaaatacacatgggaccttgaagacttgttatcaaaaaaaagtaaaatatctcataattttttatttattatatgttgacataatattttgtgtatattgagataaatctgttgtcaaaattaatttcacctgtcttgatttacttttgtatgtgactacaagggaatcaacaattacataggtggcttgcatttatggatcacattatatttcttttggacagcaccgtcatagatggttatcaaactactcttaggagccctagttcttcagtgatgcctaagaggactgaaggaaaagtagttagagacagaaagtaaaagtagttataggtgatggtaaaatgtaagcctgatgacaccttagatgaccagcagagagagactgatattaattggcctttagttagtatagtacttaccgtgtgcaagtgctttgtccagtggattatctttcttgatccttacggcaaccctgtgaagtaagcactatctttggcctattgtagatgagacaactcrggcttagaaaggctaagtaacttgcacaagatcctacagctggtaaataaatactggtttactatgtaacatcatggcatgcaaatactagtgaatgatggagcctagtgtcaaatctgggcatgaatccagagcttgtgcttgtatccactcttcatcaccacttctcaaaggcaaaaaggaaaacgttacctagacctgatctgcagcagcccttctgctcattagtatctaccgggggtacccattattttccctagcagtgaaaggtatcatctttaaactagggaatatagtaaaaaccattgatgttccaggaatgagctcaagttatcaggaaatgataaaaatcaaactggatgtgcttcgtttactaactcaaggttgtcctaattagaaagatatttaaaataaattgtttttagaaacttgaagcataccagattcttttgtaactgagagacgtgggtatatttcatagcaagtacagattttgtaaatacaaatattagacattttttctctcagtgtaccaacatgtttaaaaaattggtataaacttagccacaaacctatgaccagctatttaaaaattttttgatgttttttataggttggcgcaaaagtaatcacagtttttgctattaaaagtaatggcaaaacccacaattactttgacatcaacctaatagttaatgttcatgtgtagacataatttcatacttgtaattttatatactccttcataatctatacataatttctgtatttttttatttttttgagacaagatcttgagatcttcctacctcagcctcctgagtagctaggaatacaggcatgtggtaccatgcccagctaattttttatttttttgtagagacagggtatcactaggttacgcaagctggtctcgaactcttgggctcaagtgatcctcccgcctcagcttcccaaagtgctgggattataggtgtgagccaccatgcccagctaacttgtagtcttaataactaatatttgtagtatctttacaattgatatactataaatcctcttaatattttttaaaaaactaattaattttttaaagacaaggtcttgctctgttgcccaggctggagtgcagtggtgtgattatagctcactgcaaccttgaattcctgggctcaagcaatccttccacctcagcctcctaagtagctaagaccataggtgtatgccaacatcctgtgccaaatttttttatttttcatagttatgggtttcatcatgttgcccaggctggtctcgaactcctggccccaagttatctcccccacccccaccccaccccggccttggccttccaaaattctgggattataggtgtgagctactgtacctggcctttttttgttgttgttattattgaaagcatgcacattttacatttcttgctatcgcatagaagatgatagtgaaaatgattcacattaatactttttttgctgttgaatttattttaggattaattatgagtgagattgatatagtgaacatttttgtgattcttgaatcatacagatgcaatggaatttctaatgtaggtcataaagataaattcagtggtaacacagctttaccctcatataggtgagggtctttgagatcttgctttcacacaatgtttgatgacaaggaagtggattatctcagcaaatccttttttttttttttgagatggagtcttgctctgttgcccagactggagtgcaatggcatgatcttggctcactgcaacctccgcttcccaggttcaagcaattctcctgcctcaacctcctaagtagctgggattaccggcatgcgccaccaggcccggctaatttttgtattttttagtagagatggggtttcactatattggccaggctggtctccaatttctgacatcaggtgatctgccctcctcagcctcccaaagttctgggattacaggtgtgagccaccatgcccagcccagcaaacactttcttctaactcttgcttttgtctgttttttacagttgccttctttataatctgacaaaagaattgttgaaccctaaatcgtacatgtgaaaggttgaataataacctttgcactagatttacttttgcsataagtgttcactaatctttatgtcattgaagcagacaaagcgtgttggatagaaatatttctgttatgaatatggtatgtacagaattgttgaaaaatatatttataaagaggtagcatctaaatgagaatgaaaagatgtggcgatatagatgtaggtgcagatgaagtataaacagatacttcattgacaaaaataattataaatgattatatcattttcaattaatttctggtactcattggcttgccttatatcgatatcttttgtgtctacctattttttatttactttttcatgaccttttttcaaatatatgtttgctatatccgctactatataacttgtcatgttttgatgagaagttattgtcatcaaagagtggtagtgtaatgagaagcatgtaacgtcattgaaagctgttgtgcgaggggatggtgaataggttgtctcttcacatcccattggccaaagtatatcacatgaccaagccaagactcactgggttgaggacttccactcatcccacatgattcccaggcaagtcacagggaactggatgggatatcttataggaagggagcaaagattcgggatcaataattccgtcttttatttatttatttatttatttatttatttatttatttattgagaaggagtcttgctttgttgcccaggctggagtgcagtggcgcggtcttggctcactgcaagctccgcctcccacattcacgccattctcctgcctcagccacccaagtagctgggaccacaggcacccaccaccatgcccggctagttttttgtatttttagtagagacggggtttcaccgtgttagccaggatggtctcgatctcctgacctygtgatccgcccgcctcggcctcccaaagtgctgggattacaggcttgagccaccgcgcccggccaataacgtcttttattataccacgattggttatttaaccattctcttgtggcttgatactcagattttccccaattttaactattacaaaaagtatcactataaacatagatgaacaaattacatttattttacttggagagttcttcattagggtttagtttccaaggtaggttctgtgggttagaggcaagaattgcttgtagatcttgttacatatggccagattgctccctggaaaaactatcagcttatagcagcatcatcaatctttaagtttacaactttcctcacatcctgctagtgctgggttttgaaattttcattttgttgatttcataattgcttaccatttaatttttgtaattacgaatgatggtatttaaaaaatatttagaactaattctattgttattgatctattacattgagtaaaacaagagccacttataattttcttaccttgttttgaaagtcattaaaaaatacaaaaacacaactcattttcatcctccttgttttcttggccccatatttttctcagtatactacttttttttttctttttctctctcttttttttttttttgttttttgagacggagtctcactctgtcgcccaggctggagtgcagtgggacaatctcggctcactgcaagctccgcctcccgggttcacgccattctcccgcctcagtctccagattatttgggactrcaggcgcccgccaccacgcccggctaattttttgtttttgtatttttagtagagatggggtttcaccgtgttagccaggatggtcttgatttcctgacctcgtgatctgcccgcctcggcctcccaaagtgctgggattacaggcgtgagccaccgcacccagcctttttttttttttttatttaaaccgctgaactttttattggcctcctgctccccaaagggtaccctgcttctgctggcttaatgtctcagaactttagtgtcgttggactgagacaccactttgccactcactttgcggcaggtggtggtcttttgaatggtttgcgtggagttgctgctgtccatcaccaagattgaagattgaagtcctcaccgtcttccagcaggcagcggtaggtggtgaccctagcctccagcttggccttgatgttcagcagggcctcgcactcctgggcttggtgttgcgcctcttcctgggtctgggccagccctgacgccaggtgcagcaggatctcgttgagctgctccatctgcagggtgtagcggacctccacctccctcaggctgttctccaagctggcctkcagatttttcatggagtccaggtcgatctccaaggactggaccgtacgtcccagctccgtgagtgtcatctcagcagctccaacctgggcggactgggtggtgaccactgtggtgctctcctcagtccgctcagaccagcacttgtccagctcctctcggttcttccgagccagcttgtcatattgggcccagatgtctgccatgatcgtggcgaggtcctgagatttgggggcatcaacctccatggtcaacccagagctggcaatctgggcttgtaggccttttagttcatctttgtggttcttcatgaagagcagctcctccttgagagcctcgatctctgtctccagctgtggccaagtgacattggtgtcatcagtgaccttgcagagcccgtaatgctgctctccacagactggcgcctgagagtctgtctcatacttgactctaaagtcatcagcagcaagatgggcattgtcagtctgcagaacgatgcaggcattgtccacagtatttgctaagatctgagccctcaggtcctcgatgatcttgaagtaatggcccccagtctctgacctggggtcccttcttctccaggtgctcccagattttgctctccagcctccagttctcgatctccaggctcctcagtctgtccaggtaggaggccaggtggtctttcaggctttgcatggtctccttctcgttctggatgcctcctattcctgccaggcccccagccatccctgcggccaggccccgggaccccaagccatcccagaagctggtgkagcaggacacggagatctggaaaccagagcccctggcacgtgcataggctctggccacgctgttgaccagctgggcggctggacagagcccagggaccagtaattggtggagaagttggagcaagtggtgaaactcatgctgtctggggaggagaacragaggacaggacccaggctttgccaacgacctcagtatactactacttcaatacatatttattctgacattaaaataagacagtgaaaaagtaaaaacaaaacatacttgatacaaggttttataacttttatctcaatcaaatcatagtaattatcactacagaattgaacaagtggtcaaacctgctcagattgctgagttttgtttcatattttaaagtcttaggagggaatttatttattgccctgttgcctaatattggatggctttaattccatggttttcagaattgcctattgccatatggtttacatacaaaataccacctgaaacataagaacgggtctttcctacggctttccccccacaaactgtaaatgaaaactttttattactgactgtatcctctcatttggtttaacttacaagtgtcatgttgcctgctgttacacttgtctttggcgtctgctcagaaataatggtgtctagacagacccataaatatcctgggttatagttcctcatttaaggctctgagacttcacagcaggggcaagaagacttgcagggcagatacgagaaatcttcaggccacttaattcagagtccattggcagaataggcagagaakgtgtgtgtgtgtgtgtgtgtgtgtgtgtgtgtgtgtgtgtgttaggctgggttgtagagatgggttttggaaatgatagttgggtcttgaaactactattggagtgcaaatgcctcctccctcatttggcggagaaacgtcaaaaatcctcagaacggaagaatccattctctttattttgggacacagcctggtaaaacttgtaagaaattatgacagctctgtgggaagcaagtgcaagtgtgggagaagcaagttgatgtgtgaagcagacatcagtgtgtgaaccagagtttatttgaacagtagtagttgctggtggcagaatgttaaaaatgtgagtattaagagtattaatgatgtgactattaagacttggattagtgttgaagaaatgtgaacttgaatagatttgctatgaaagtcttcggattttttttcctgtaatggattttatttcaatttcagttcactttatatgagtctccctggaattcattgcaaatttcttttgaaaggtaaggacccgtttgtttatgaagttttgattttttaggaggtaaatatttgaggcaaagttggtactgaggttcagagtaaatgggaatgaggatgttttatattaatatagaagttaagtaattacagagaaaagcttttaaaaattagtgcagtaaaatagggtgcttgtttatattgaattgttagatatcttggctgaatttataaaaagaaggttactactgaactcttaaaaggttatcgtactcgtcgtaaatattttcgtaaactgctaatagttttgacaacaaaaggagtgcttatctttggaatatattctccttcactgaattatttattttggaagagttgaggctaagggtgtaaaatatattatagagccaggcatcatggtgcacgcctgtgattccagcacttagggaggtcagtgtgggtggattgcttgagcccaggagttcgagaccagcctgggcaacatggtgaaaccccgtctctacaaaaaatacaaaaagtagccaggcatggtggtgcacccctgtagtcccagcttctttggagactgaggtgggaggattgcttgagccttggaggcagaggttgctataagctgagatcctaccactgatgcacaccagcctgggtgaccgaaggagaccctgtctcaaaaaaaaaaaaaaaaaaagaaaagaaaagaaaaaagaaagtattatagatttttagagctttttggttaggggttgatcacttatgggaccccacactgtgttgccctcaaagagttactgttaccatgttcactccctaatactttctccttgcattttccttccattccttttttcttccctcctagcctgaatgttggcctactagtgaaatctgcttatggcctaacctgatgggtaattaacagacaatatgttgtagttgttgacctaagaaggcctgagactattagtctgttttaacatacctgcatctatgaggtatctgtagtcagctctgtttttcttaagtagaggtttatccattaccaacagtgaatgttcaatgcaaggaatagctttttaaaacatatggcaaatttgtggttctttagaatccattgtcatatagtggttaatatatatatatwtttttttgagacacactctttcgcccaggctagagtgcagtggtgccacttcggctcactgcaacctccacctcccaggttcaagcgattctcatgcttcagccttccaagtagttgagactacaggcatgtgccaccatgcccggctaatttttatattcttagtagagatggggttttgccatgttggccaggctggtctcaaactcctggcgtcaagtgatctgcctgcctcagtctcccaaagtgctgggactacaggcatgagccaccgtccccagcacatgtttgttgatgtccacaagttgttagaggttgtttataaggaggatggtagccaaaactgttaatttctcccatgtctctgtagaaggaaaacctgtgcagcacgctctattttgctagtgtactcagttgtcaaatagatagccaacttgtgtgtgaccaatcgtcttttctccttcactctgctgctttgaagaccttggtctctgaaacacatacttttggtcaggtatctatgaccatagagattaggacccatcttcttgactttttttggcagagagacagtgtctcactctgtcatgcccaggctagagtatagtggtgtgatcacagttcactgcagcctcaaactcctgggcttaagtgatcctcccacctcagcttcctgtgtatctggggctacagacatgcgccaccacacacagctaaattttttaattttaatttttattttttggtagagatgaagatcttgctatatccccaggctggtctcaaactcctggcttcaagtaattttcccaccttggcctcccaaagtcttagagctacaggtgtgagccaccatacccggccccatcttcttgacttacataggctgtgggtatcatcaagctaaagcccattttttaaaacaaccatacctcaattcttttttttttttttgagatggagtcttgctctgtcacccaggctggagtgcagtggcatgatctcggctcactgcaacctccacctcccagatttaagtgattcttgtgcctcagtctcctgagtagctgggattataggcatataccaccatgcctggctaatttttgtatttttagtagagatggagtttcaccatattggccaaactggtcttgaactcctgacctccagtgatccgcccacctcggcctctcaaagtgctggcattagaggcgtgagccactgcgcccagcccccatacctcagttcttaaagtatctcaagaatattaaaaccaattaccctaccactcaagtatatccactgtgtttttatatattatttctaaactttctattaattatataactgtaatcatgtyatatatttagaataatagtcacatagagcaatatattgtgagaatactttttctgcttttcttcccatttatctttttagtcacacttttctctgttgccacatattcttaatatacttagaatgttaatggatgtatagctcattgagtagtatgttataattaacaatttccatttgttgactatttgggttatttccaggtgtttgtttggctactataaataaaataccattaacgtctttgtacatatagtgtctttttttctttccagttattcctttgggttgaattcccaggagtaggtttaatgcatgaaataaaataacatatacatttttatgttcttcgttgccaaaacttctcttccaaggattgcccagtttacatactgccagattttataatttgtaaggctgtatttagtcactgttttgttttatacatgaatattaaatatttattaagatatcgatgacttaaagttagagtgtcttattgcaatattgatccttggtaggtgctcagtaacttttgactttagagaggagtgactttagagagaagctgtcgagagaagtgcttatcagtgttactattttcaatattgtaaccattcttctttctgtgtatcttactgatgcttaaacattccttacagacttttagtaaaaaagctatgaagagaaaaacattttaaaaccaccagactgcatttggctgataggctgcaagttcagcttacctactttctctaccaccttacagatttttctacttcattgtgtttgactaggcatgtgttcctcagcatgcatttctgccttagtctgagatccagtccatgttttagccacatgaccgttcagaatcttggaagcaagaggaaacactgttatgtcaatagaagtttttggttaatagaaaggaatgctaaataggaaattattaaaaaatatataattaatttttagagaagactctgaaatagcagtggaattactgatgcatgcttcaagcctatcctcctttcattataatggttagggtgattaaatccctttattcagaatttttgaattctgaagtgatttccccagatactaggccttttgggttaagaatgagctgagtccccttgagaattagggcttcgcagtataaatttctaagttggcattggttactcctgatcgaatgcataagatcaagttctggaacagggagagcaaaagtatagacccaatatattctgtagaaacctctgcctgcacgcagacagaaacctacaaatgtcctttaccatctggtctaatgtgtatgtcttgaccggagctttcctctgcagaaggtgggggctttcctgccaaggctctgagatccgcaccttcttgccttatcaccttctgtttttttttttttcttttttggagatggagttttgctgttgttgcccaggctggagtgcaatgacgtgatcttggctcatcgcaacctctgtctcccgggttcaagtgattctcctgactcagcctccccagtagctgggattacaggcatgtgccaccatgcccagctaattttatatttttagtagagacagggtttctcaatattggtcaggctggtctcaaactaccaacctcaggtgatccccccgcgttggcctccgaaagtgctgggattacaggcgtgagccaccgcgcccggcccacctgctctctttaccacttcatgactttctttcctctcctctggttttctaatttttcctcttttctgtctcatcacttcttccacacatctcaaacctaaactaaacctggatttttcaaacactgataatcagaatgcctattcttctctgctgtgtttgggccagtcagtacttggatataatcttgggttcctttcattgctgtggttgtggtgatctaagaactgtttttttttctaccagagctacctctctttttctattttttttttcttttaaccatctggggaccttgagtccttacttaacagattctaagggtagtcagtctccttggagtgtatattttattggcaattgaatatattcaaatggcatttttcctttaattcctatctgacctttagaaaatcagatagtgacttttggaatggtatttgaattackgttggtatgtgtatactctgactccaaattaatgttagtcactttattgtctaaaaacgctacccaggcaccattagaagtgactctagcttggccgggcgtggtggctcacgcctgtaatcccagcactttgggaggtggaagcaggcggatcacctgaagtcaggagttcgagaccagcctggccaacatggtgaaaacccctgtctactaaaaatataaaaattagctgggcgtggtggtgtgcgcctgtaatcccagctacccaggaggctgaggcaggagaatcgctggaacccaggagacaggggctgcagcgagctgaratcatgccactgcactccagcctgggtgacagcgcaagcctccgtcttaaaaaaaaaaaaaaaaaaaaagttgactttagcttgttccttgagagtcccttaggccatgtaagatgaaactactctgggcagatgtgtaacgggccaagtccattttgaatttttgcacctcctcctaccatcccccatcctcacccatgtggtctagtggaaagwgcacgcctgtggaatttcagaaacctgagtcccaagtcactaattagctattttggttttaggcaagttacttagccacccatgactcagtttctttgtctttgttgacttagttgatctagtagaatatgattcctaagcttcccagctgaacacctctgtacagattcatgaattctagaaaactttttgttttaactctgtggttgaatttgcggtcagagtgaaagaggaaacttctgtgctgtttactcttcagaagaaactagttgccaggtttgtttttgtccaggaaagattcaagtagcaaatttaaatagtaaatttaaacttttgttttgctgtgataagtcatgttatttgaatgatcttagcattcgcagctgacccttcccatgagaaatgggactataacgtatgcagtatacttgtttttacatttgtttacattacaattaattttgtttggatatattttcagaggttcaccaggtttgttgggatcattttagaaaagtgtcccgtcagaggttggaagtggttggggtaagaggtttagtagaatttagccgaagttttgctccactgtggaaaaagatacatattctgttgtacctccactgccctctgcaaaacattgccttctgtcacagtgctggcaccgacttctgaatcttcgcagagatttagtgctgattctgtgtagttctttaaagtgtttgtgggactgctatatgttacatatatacctccttggcctctcctgagctgtggtttgcttccttttgggaattgcaacatgatctccagggttttgggtttcctgacaccctccatggcagattcctttatagtgtacacttactacattaatttgttttgaaagtttcataacttattttgaaataatttgagacacttggggtgtttcaaattctgggctggaaatctctagagaacaggatgtgatagacaagagagagaagagaagattgggaggtgggtgaaggattttgaaataggaagccatagctgatatgttagagattgctggagaggagcatagtctgaaaaaataaatttcacaggagatatgttgtctttccattgatcctattatattttgaatccttctccactcgccccctcccgccttttttttaagagatagggtctctctttgttgtccaggctggaatgcagtggcacgatcatagcccactgcagccttgacctcctgggctcaagggatcctcttgcctcagccttccgaggagctgggactacaggtgtgcagcatcctgcctagctaatttttacatttttgttagagacagagtcttgtttttttgcccaggctggtcttgaactcctggactcaagcagtcctactgcctcagcctcccaagtagctgggattacaggcatgagccaccacgcccagccctcttcayttttactgccttgatacgtgcatactgtttcctcttctaggcccacttcatatagaagtagtttcaaaaacttgtaaatcagcttgcaatgaggaattgattttcttataagaaaatcgttctatagaacgatgtgaaaattggtgctttagttctcagctgtctggcaaaagccttcttgcctcttatgtagcatactatagaatctagtcagccagacgtggtggctcatgcctgtaatcccagcactttgggaggccgaggcaggtagatcacccgaggtgaggagtttgagaccagcctggccaacatggtgaaaccctgcctctactaaaaatacaaaaattagccaggcgtgttggtgcatgcctataatcctagctacttgggaggctgaggcaggagaatcacttgaacccaggaggcagaggttgcagagagccgagattgtaccactgcactccagcctgggtgacagagcaagactctatctcaaaaaaaaaaaaaaaaagaatctgattactctcaaatactatttcagtgcaaaaatagattcccagccccagtgttcagtgacaggaactcaaggatcctggtcagccaccgcaggaggaggagggactccaggccttgtgttggtggccagtactcctggggccagcagcccagatacctccggaagtggggtcactgaaactgcactcagggcccctagttgtcaaatctgtggttgcttaacaagggggtatgttctgagaattgacttattaggcaatttagtcgttgagcaaacattatagartatatttacacaaacctagatggtagagcctactacacacctaggctagatggtgtagcctattgctcctaggctacagacctgtatagcatgttactgtactgaatactgtagacagttgtaacataatggtaagtatctgtgtatcgaaacatagagcacagtaaaaatatggtattataatcttctggggctactgtcgtgtatgtggtccgtcattaattgagatgtcatgtagtgcatgacagattgctctgggttcattcttggttaggaargacttccagtaagaggtatataagaaaaatgggatgatatggggatatgtggggaagtggatgtgtttctgcgagagactgtgttgacctcgggatgccaggttcaagggcactgcctctataaagatggatctgacctgtccttgtagatcctatattgtgacaatgtaaggattgtccaaggatgaatagcacattaatctcccataaccttaggtgcctcactaagtatgattaagtcttaggagtgagaataattttcattattttggtctgtagtcagcttctgatcaccaccacaatttcaaaagatctcgatttagtgtttccctgcttctgaataggccgagtgactgccttctttctcctcagtcttatcttgccagcattttaaatgtaattgatatcacctgcaattttatgccgtcctaaacaaggagttgcccacattaagtcttttaaaacaccatggcatttattttcacaattggttgtcttttgtttataagtaaagcttttactgcttgcggtctttacttttgccctctggtggtcttcattttcacttttcttgtcctttatttaaaacggccttgaattggttaactgcacttctcagcaacctcctccacttaccaccatttggtgtaggctcaatgaatgttaactgttttttacgctggtttaaactgaatataattaggacagcgaatttgtttcagaacctgatggaaaacaggtattgcatatatatttagtggttacgttctgcgggcttggatgtttgtatcctgcttgttccttttctgaacacagatagttatttgagttgaattagctatttgttgactggccattttgcaagttactgtttttgaaaacaagatattaatttaatcaaagcttactttggtagtgattgtacctacttccaaacttgccgtaggtttccatattccattgaagctacttttgatccttaagatgctacatgactggtatgaaatctctcatagttgtggggaaaagatgatataagaagcttcaggctggacatagtggctcacacctgtaatctcagcactttgggaggctgagggggacagatcacttgaggccaggagttcaagatcagcctggccgacatggcgaaactgtctctactaaaaatacaaaaactagccgggtgtgacggtgcacacctctaattccagctactagggaggctgaggcaggagaactgcttgaacctgggaagtggaggttgcagtgagccgagatcgtgccactgcattccagcctgggcaacagagcaagactccatctcaaaaaaaaaaaaaaaaaagcttcagatttatattttgttgaagattaagtaaaaaaaaaaacaacaaaaatcttatgaaacatggttttaggtaccttctgacaaacaactgggggatgtgctgcatcagttctgcccatacttttcctaactgcgtattttcctacctttagttgtttttcttattgaagtcttctagttcttttgttcgtgtgtgtgtgtgtgtgtgggtgtgctttgagatggagcttcgctcttgttgcccaagctggaatgcagtggcgctatctcggctcactgcaacctccgcctccctggttcaggcggttctcctgtctcagcctcctgagtagctgggattacaggcacacgccaccacgcccacctaattttttgtattttttagtagaaatggggtttcaccatgttagccaggctggtttcaaactcctgacctcaggtgatccacccattttggtctcccaaagtgctgggattataggcgtgagccaccacgcctggccgttctttcttgtttctgtttatactgkcacatttagtatttatacatctttttctctcaaggaaggcatctgccgttttaattggatgattatatcagagggctcttttctatatcttagctagagcaggtatctgagaagtcctttttgccattaactaaggggccgtcaagtactttgtgaaaacagcatactcgtgtatgcatttatatgagaaatatttttataaagcgattaacatgccatgtgggccatggatctctcactgattcatgtgttttcaagaaaacatgtttttattttttaaattgcattgagcttcctttaaaaaaactgttatttctccaaagataaatttcattttctacttaggaaaacagatgactctttttccctcaaatgccttctgtgaaatgacatgtggagctgttaggcattgtgaatctgttttatttaccccagtgttacagaaagamggaaggcaattttagcttctttaaagagacactggcctggggtaaataacaatttagtccaggtgggtagaaaagaatgcttatgacattcttttcatcagctccatgtgtaacctccaagcaggaggtcaggcagtaaaacatttgagtgaactggtgaaatgttttgtatttatttacaaggcacttaaacacaagactgatcccaataaactcaacaagtcagagtgatggaggaaagtatatggtgcatgcagaacagtaaaagcggggactggaggggggcctgtagattgcatttagcctgctcctctcttcctacygtggagagatgaccatcagtgcagtggttatgggtgagtttcatgaggaaggtaatgagcccctttctgttcccacctgctgctgaactacttgacattttcttttagattccaggcatcctgaagtatttaaattctgttttgctgaaaattcttcattctttttgtgtaactttcttgaatcaaaacttctgttccaccattcttagtgttgtatctgttatgctggagttgatgacttgattccattgcttaccacagtctaatttaaaacaaaagcattctaaaaccttctcagtttcgtcatttttattgttactatatatttattggtttagatgtagtttgtagagaatcaaaagaaaagaggacagtttctttggataagacgttcataaccttttctcctcaagaaagcctgccacatagtaagctctggggtcagtaagtcattgccggcttagctgttgttcattttctcattgcatctctaccaaatgatgggcagacagactgattcatacctgactgttctgcatatattctgcatatatatatatrtatatattttttttttttttttttgagacagggtttttttctgtcactcaggctggagtgcagtggcatgatcatagcttactgtggcctcgaaccccgcgggctcaagggatcctcccacctcaccctcccaagtagctggtactataggcgctagccaccatgcccagctaattttttattttttgtagagacagaactttctttgttgcccaggtggttttgaactcctgggctaaagccgtccgccccccttggcctcccaaagtgctaggatgacaagcgtgagccacgacacccagcctgcttgcttatattttgaataaaagatttcatggggcgggagggttaaaactctttgtgaatattaataatccagattaatttgaaagaactttcatgtaatatgctactcaaaaaacagtatatgcaagcgattatctctatcacctagcagaaggctaggcaggattggtttaacaagtaaataagaataatttagtgttagcctgctatacaaataagagtgctttagtatctgaaactgtccctggaatgtatcaatgtatattaggaagttacttcagtatattatggaccagcaggcattattgagaactcactgtgttgcaagtttggggcagtaactctgaaaataaataaggtgcttctagttggagatgggggtgggggaacagactcaatcagatcatttttggagtggtgagggctttgatacaggaatgcaatgctgtataaaggtgcttccctcttgattgttgagttttgttttgttttgttttttgagacagtcttgctctgtcacccaggctggagtgcggtgtcatgatctcagctcactgcaacctccatctcccaggttcaagcaattctcctccctcagcctcccaagtagctgggattacaggtgcccaccaccatgcctggctgatttttgtatttttagtggaggtggggtttcaccatgttggccaggctggtcttgaactcctgacctcaggtgatctgcttgccttggactcccaaagtgctaggattacaggcatgagctgctgtgcctggcctgtttcgttttgttctttttaattaaaggcaatgatcaaattatctaggaaattagtttaaagccaacatacctaaaatataaaacagaacacaaggcagatattcttaggacattttcctcaaactaacatttatttatcttgctgcctgaacataaagacttttttttgggtagcgtagttacttaattttacctctttttttgtttcagtttagctgaatataactttatctaaaataaagtgaatagctgttgtatttagaagtagcacaaataatagggtaactgtaccccttccttgttctgtcccacttgcacccagccaacccatctgcccagtgggattttaaatggtttcagtccttgggctcaagagaacccagaggaagttcatttttgaagtctcatcctctctgtatgaataaattccttggtcattatctactgtttttcattctttgtgaaatagatcatctaccacagtggataatagaggataatactattcaagacaaaagcctatatttggaatagtttatgtaatgtaacatatttaatatgcttaatgaccttaatgaaatgaagatgtgaaaaataaactattgtcattctggggatatcatttatcagattctaaaagggctgtttctgaatctggttagggagtttcttttattagtagtggcgaatagagagtagtggtttggatatattggtgtcatattttagttgggtagaaatatctctgacatttttacatgatgtgttttcccatcttctccaaaacaataatttcatcctcgggaagagaaattcatcccatccatggtggattttcggatacagtacccagttcaatcttttgacaaacatttattgtttaccatgtgctaggtgaaataaatatggtagctcaggggttatgaaaagataccaacgcattgttccttctggggaggattttataagttttttatattttaagtaccttctttagaggtctttatattataagctttctatattttattttatttttagagattragtctctctctgtcacccaggctggagtgcagtggcacaatcttggctcactgcaacccttgcctcccaggctcaagtgatactcccaccttagcctctagagtagctgggattacaggcatgtgccacgactcctggataatttttgtattttttatagagacacagtttcgctatgttggccaggctggtctcaaactcctgagctcaagcaatccacctgcctcagatcatggatataaagctttgtatagtctagagggactagggaagggtccctttccctccctactcctcctgcctccwgttatatttttctttccatgtcatctcagaagaaaggtaagtttcactttgctgatgtgttcctgcatattttcatttatggcctctggctagtgctatgattagatttttgggtatttcttactttatgttttttttttttttaatattatgctcattaaatttggtgagttgacctagcagtaccatctcaagcttctttagattcaatgtgcactttgtcttgagttaatcttaaccttggtggttagtgtgccaaggagacatacttgaaggcttttcccttctccatttaggatccttaagttttgatgcagtaattatttcagaaaggaagacatatcatgcattttgtcatacatacataaagtttgtttatgtggaaattttatagtacactgaccatgccttcacagaaatggaggtgaccatgtccttgaggcagaaggaggtagctgtgcagggctggcagttgccctgtaaaagatgtggacacgacattgtaaaggcttagaggtaggaccgattacatttgcctggatgacaggtgacagccttaggagcggaggagatagctgggcctggaaggttggataggacatatttggtgggaagatgagaaagaatttctccaggaggaaagagggaacatgaactgtgagagaggagagcaggtgccttaaagttcaaggcatagtccagaagccaggaggagtatgcctggtgcgtagcgtaggtggagtggggtggggtggggaacaggaattgctatcaagtggggatatgatagtagcaaaggaatgtgtgtgccttttctgtttgtaaagattagaatttccctaggtggaacacttagcacctgcctgcctctctgagtttttttttaatatcaaaattaattcagtgttttcaaacaaacattgcctttctatttcctttgaatctatacccaaggaaaataaatatttacagtcctggtaatactatgtattgctgcggtaagctgttagtagtaggtaacttcaaacaaactttaccaaccacattttgtgtttgttttgctctggtgctaatctggcaagaatgatgtccagcaggaaagtcaacatatcttaataaactgtctgcttttataggaatgctagctttctggcagatgtcatatcagcccagcatatgctgcacagtgatgactcttttaaatatatttcagtgggaacagcaatgtctctcactggtcactgccatccttgcaaaggatactctgaagggctgtgaattacttttcaattcatatatggtaccttggcctcttgcattgttggcactgaaaacaaaaccaaaacacacaaggcatcatagagaaattattcctaccccttcaatagtgtggcttcaactgtgaaaaaaggaagggtgaagacactgtagaagcaaaaatttgttttattttaatattgggctcatcagctatgcaggtgccaatacagagaaattttcttgagaacctggcagtggcagggttaatctagctcctctggggtgaggtggaggtgtacttcctgcttttatgttatcgaaagaggagtgcaggaaattatacctaggtattaagagctttgaaaagttgagtacaaagctctttatcagatatagcaggcctaactgagaatatcagcccaattgcagtttttccaggaaaattgtactttgccaaaggtaacttttccagggtcagtgaaatagcaagatatttctcaagagaaggaagtagaaaggaaaatcccttttatgggattaaaaattcagtaagtatcctgaactcagttttttttttcttttcttcacatttgagaatcatttgtttttatgctagcaatagagaatgctaagacgaaattcagaaaacaattcctgttgcaatagcactaaaaatgttgaaatatttagaaacaaatttctctaaggaggcacactgaaaaaccacaaaacgtcaatgacagaaatatcagatttaaataaatgaaaagatattccctacttatgaattggaagctgttattaacatgatagcactacacaaagcaatatatagattcagtgcaatctttactaaaaccctactggcttatttttttttcttaaatagagaagctgatcctaaaatatatatagaattacaatatacccttagtagtcaaacagtcttggaaaaaaataggaagactcacattttctaatttcaaaactcactacaaatctccaataaacaaaagagtgtggtgctggcaggaagatagacatattatcgttaaaaaaaaaataagtgcctagtggatagtggatacttttacatctaagagtattttttctcccaaatgctgaactcagtttttaaaaactccattaactaatgtgtaaatttttcattgtctttaatcactgaaataaggcttttttctacttacggagggatttctctcctgatttattgatagttgactggtcaaaaggcatggaaaagctgccattccctgggctctgttgccatttgatttatttagaagatgtaataggaggaagaatttctgttcttgctgttagtcctgctcggtcacggcagtggatgatggagagagatggatgcttgtttattgtcggctacaggaggggagctgccaggcgaccgaacaaagttctgcttagtatgtgacttgtaccgatgcctccagtgcctgctctggtccacatgctgggtttaggggctctcagattctctgctttgttcaattctctcaacagttcttatttcccttctaaagaggaaggactggagggcacactgcaagtctcttttgcagccttaaatgtgtggtgttgcacaaagtggtttgagctggggtcatggggtgaaggcttgtttggatgatggaggagttggcacacatcctcagtattattttcagtagtatggggactgcctgagtcagccccgcccgcctgcccgggagcacattaaaactcaggcaccagcaccatcgaggggggaccccaggctcagggaatcagactgtctagtagagagagtctgggaatctgttggcaatctgcacctttacaaattccctggtgccttttcagttgtaaaaccactggttcatactttcctatccatagaggactgctctaagtctatatggcaaatttggaaaatcttccctcaaatgctgcatctacgggatggtgggtragtggcccagagcaattcttatgcatcagtaggacccatacatgcggcatgtcttaaaatcatagtcgtggcttcatgatatctttgtagagcgtttgagggctttcaagcactaggtttattgccttttaaaatagggtgttttatcctgtttgaggactacctcagactgttaattttgccccctgaggttatatgttgactctgcccgctgctctggaatttgtagcctgggagcatccagatggtaaaagaccccctggagttactgagtcaactttcaaaattatcctggatttaaaaaaagacaaggagagaaaaaaggaaaattgagggagggggaggaatggtacaagaaggggacctttcacaattgggcaggccctgaaattctgtccctattttaagtatttttcttgcaatcctgctgctgctgctgctggttctaatgatggtgatggtgaacaagagtaataacacagcaaccaaaaataataaaaatatcaggaatttaatgagaatcgacttttgccaagcactgtgctacccaccttgcacacattatctcatttaatctttatgacaacgctatgaaatagataccattattattgcccccattttaccgatcgagaaaccgagacagaaaaaatatagctcaactgacacagctagcagtagcagatgtgggattcgaactttgtgaaatctgacttggaagcccaggcacaagatggaatgcaggttaaaaatccaaatgcctatggggctaggcaggaagagtaaatgagtaaagcacacccgtagcacacagagagtggtgggactgtggccaagaagagaatgcttgccctgtcaatgagggtagtcagttaagtcctagataattgtgcctagactgaaattcaggccagtgctatcagattttttttttttgaagaactaatggaaatcagtatttttatgtgagatattttgatgtttaaatggtggcaacatgttcaaatttttaaagaacactgagccaaacaaacatcagattgtaagcggggtcttaaatctgttttgtttacttccacttgcacagcatctaaaacagtgcttggcacatagtaggtactaagtacatgcttgttgaacagatgattgaatgaatatttgtggactgcattacacttacaggcagccagtttccaactttcctactgcttcccccaactatcttttaggtttttctgctgcttcctatcccagaccagatcatttttcatttttcagctaagtatatagaccatgtgtacttcaaaggttacatccttctagtttgaattggtgtttggaccaggattcttggtggggattttaaaattgatttaaaaacttattttttggctgggtgcggtagctcatgcctgtaatctcagtattttgggaggctgaggcgggcagatcgcatgagtctaggagttcaagaccagcctggccaacgtggcaaaaacttgtctcyacaaaaaaacacaaaaattaaccgggcatgatgatgtgcgcctgtggtcccagctacttgagaggttgaggtgggaggattgcttgagcctggagagagaggttgcagtgagccaagattgcattactgcactctagcctgggcaacagagcgagatgctgtctcaraaaataatacgtatttttttagcatctaaaaacattgtagtgaaaaacacataaaattttttaagtgtgcaaytcattagttgtgctgcaatctccagaaattytcatcttgcaaaactgaaactccacccattaaacaacacctctccattttctcctgccctcagcccctggtaacccccattctgctctgtttccatgaacttgactactttagatagttcatataaatggaatcatacagaatgtggctttttgtgactgactgattgtgtcagttgtacccaagggattttaattttattaaatttcctaagaagaaggagcatgccaaaccctatagggccacatggagaagcagcaggattggttaggaggcagaaggagtgaggggacagcctaggccaaacccttattttgttttccttaggaaaggtgaggtaggacagggtgagcagctaagactggcaagtttgagtaaatctggtaggctgtggggtacagcagtctggtgggtggccctgggtggatttaaggcaagatggaacactggcttttgataaaggagatggttgggggtgtgggcactgagttggtgagtttgcctgtggaagatgtgctggggcaggggcctcagaatttactagccctctaagaattgactagccctgggagatgcagcctttccccagtcagcaaggccacaaatctaagaccatcgagaaggcagaaaataatacaatgtagtttatagcaactggccctgtgatggatgccaaacagagaattatagaatctaaaaaaagacagaacacttaatccactcagcataatatcctcaaggttcatccatgttgtagcatgtatcaggatttccttccattgtatgtatagaccacaagttgtttatccaaccattcatgtgttgatggacacttgggttgcttccaccttttgcctgccatgaataatgctgctgtgacatgggtgtgcaaatatctcttcaagactctgttttaaattcttttgggtctatactcagaaagagaatccatagatcctaagggaattctgtttttaatttgttaaaggtactgctgaactgttttctgtagcagctgcaccattctgtattcccaccaacagtgcacaagagttccaatttttcccacatcctcgccaacacttgttattttcttttctttctatttttttttttttgataagggccatcctgtgaggtgatacctcattgtctcactgtggctttgatttctactgatgattagtgttgctaagcatctttcatgtgcttattagtgatgcttttgtattttacaatttggtagtctgtgtttttaaattgagtcacacaatttaagtgtgagttttgaagagttataaaaacgtattttttattagtaccttttgtagtacgggaaagtcttctcaaggtgattgcttttttgcacagagaggcaaaaggttatccattcagcctaacttcagaagctgttaaagaatcagcaactagcagtggcttatgccttgtaatcctagtgacttggaaagcaggaggatcacttgacaccaggagtttgagatcagcttgggcaacacagcgagatgtggttttaaaaataaaaaaaaaaaaccaaagacttagtttggcctggtggcatgtgtgcctgtagtcacggatactcaggagctgaggtgggagacttgcttgagcccagcagttcgaggctgcagtgagttgtgattgtgccactgcacttcagcctaggtgacagagcaagacctcatctcttaaaaaaaaaacaaaacaaaaaacaaattgataactatacctggggactctggcctctggctttaagccagatcttggaggacagatcattcattcacagaggacctactgtgtggtagccaaggcatagaactgcccagaccaagtccaaacatatggagatggtctctagctatgtgtccaaagtagagggattgccttacctcctgagagcacttctctatggaagctgattaaactttttggggtgagattgggagggcaaatcaggtgaaggagaagtagaactgagtgtgagtttttattcagaaagctgaaccatctgataatggcagagtttagtgtattcagaaaggattgaaaaactaaagtggacctataggaaaagtaaataagtgatctttrtatttcattgcaatgtcattacaggcatacaccattttattgcgtttcacaggtattgctgttttcttgtatagatggaaggtttgtgacaaccatgcattgagcaagtctgtttttccaacggcacgtgcttacttcaagtctctgtgtcacattttggcatttctcacaatatgtcagacgctttcattatcttgatatctgttaaagtgatctgtgatcagggatctttgatgttaatgttgtagttgttttggggtgtcacaaactgtgccacataagatggcaaactaaattgataaaagttgtgtgtgttttgactgttctatggcccagccactccctcccttatctctccctctcctcccgcctccctattccctgagacacaacaatattgaaattaggccaattaagaaccctacagttacctcagcaacatctagaaatgattaaatttagtgagggagacattgaaagccaagatagcctgaaagctacctgaaaggccccggtgtgtgatgttccccaccctgtgtccaagtgttcacattgttcaattcccacctacgagtgagaacatgtggtgtttggttttctgtccttgcaatagtttgctcagaatgatagtttccagcttcatccatgtccctacaaaggacgtgaactcatccttttttatggctgcatagtattccatggtgtatatgtgccacattttcttaatccagtctatcattgatggacatttgggttggttccaagtctttgctattgtgaatagtgctgcaataaacatacrtgtgcatgtgtctttatagtagcatgatttataatcctcttgtgccagtttgctaagttgtgactgaaaggaaaagttcttgaaagaaataaaaattgccactccagtgaaccacatgaatgataacatgtgcaacagcaacagcaaaacagccttattgctaatagggagaaaaattgagtggtctggatagattgaaccaaccacaaactttccttaagccaaagcctaatcccgagctaagccctaactctcttcaattctgtgaagactgagagaggtgaggaagctgcagaagaaaagctggagctagcagaggttgactgatgaagtttaaggaaagaagctgtttccataacatgaaagtgcaagtttaagcagcaagtgctgatgtagaagctgcagcaagttatccagaagatctagctaagatcactgatgaaggtggctacactaaataacagattttcaatgtggatgaaacagccttttctagaaatttcatagctagggagaagtcagtgcctggcttcaaaacttcaagggacaggctgactttcttcttaggggctattgcagctgatgactttaagttgaagtaagtgctcattgatcattccccaaatcctagagtctttaagaattatgctaaatctactctacctgtgctctgtaaatggaacaacaaagcctggatgatagcacatctgttttcagcatggtttactgaatattttaagctcactgttgagacctacggctctaacaaaatttctttcaaaatgttattgctcattgacaatgcatcttgtcacccaagagttctgatggagatgtataagaagatgaacgttgctttcatgcttgttaacacagcatccattcagcaacccatggatcaaggagtaatttcgactttcaagtcttattatttaagaactacattttttaaggctatagctgccgtagatagtgtttcctgtgatggatctgggcagagtaaattgcaaacctggaatggatttaccattctcagtgccattaacaacattcccaattcaygagaggaggttaaaataataataacaggagtttggaagacattgattccaagtctcatgaatgattttgaggggttcaaactttagcagaggaagtaactgcagaggtggtggaaatagcaagagaactagaattagaagtggagcctgaatatgggactgaattgctgcggtctcatgataaaacttgaaaggatgagggttactttttatggatgagcaaaaaaagtggtttcctgagatggaatctactcctggtgatgatgctgtgaacattgttaaaacgacaagaaaggatttagaatataacatatacttagttgataaagcagtggcagagtgtgagaggattgactccaatttggaaagatactctactgtgggtaaaatgctgtcaaacagcattgggttctccagagaaatctttcatgaaaggaagagtcaactgatgtggcaaacttcattgtctttattttaagaaatggccatagccacccaacttccagcagccaccatgctgatcagcagccatcaacatcaaggcaagaccctccaccagcaaaaacattaggacttgctgaaggcttagatgatccttagccttttttagcaatacagtatttttttttttcttagagatagagtctcattatgttgcgcaggctggtgtgctgtgactattgacaggttcaatcatagctcactgcagcctggaacttctgggctcaatggatccttccgcctcagcctcctgagtagtggggactacaataaagcattttaaaattaaggtaacattggctttttagacatgatgcttttgcacactttatagactaatagtgtaaaacaaacataacttttatatgcactgggaaagcaaaaagtttgtgtgacttgctttattgtgagattcgttttatcgcagtggtatggagccaaacccacaatgtctccgagatatgcctgtaattgatattgactggaacaaaagaaagttgattacatcagtttggtgcaaacagtggtcatgtctactgtccccaaatcctagagaagaataaatttaactctgtgacagctgatttgtagtttcattgttaaaaggtgttctatatatgtcttgaaagtgttcttctaggatgagctatactgactcaggattaattataaaaaggtatatatgctgtgtcttgacttctgagatgtcctttactgatagagcatggatgcaggattaatcaaatctgtagccttagagacaggaggcattcctgcctttctggtttgcagacatggagggctgaaaaggatgggggtggggcatggtagtggagattgttagccagtgggttaatggttaatccctgcaacatgccagagatacacctaatctttgatgagacctactgctcagaatgaataatggttaaccattccttacctttgactaagaccatatacctttcatagtttgttttttaaagtatgtggaactgtgaagtttttttttcttttgcaaataacatttgcatatcacagaagttttatgactcattcttggtaaagaaagcaggtgatatccatgaatrgtttgtcatcttttagagacgagtagaatgattgctatcgaattttcatttaacttaaacacagctgtgtagagacaatataaagtggtcctttcctcagtacaaaacatggaaaaaaaaaaaaacccgcgctcttgttagcagatgttagtgtgttatgctgcacatgccaccgagacattcttgtttatgaggaccagtcatctggactggaaaaagatttttgaaagaaaataaagggagcaaagaaaaattcgaggtctccctcccctcacaggggctgttttgtgctgggtgcagcgtcagttatgtgatggctgactccagggagagagccacctgtatccctggttaatgagcattggccacctggcagaaccccactaccacgaagatacagtttcacttttaccgtttgtcacatccaattaaaggttttggcattcttgcctacttaaaaaacattctgtaaacattagaaatagtttttatatttatttatttatttattttcttcttttagacacaggatctctatcttccaggttggagtgcagtggcaccatcacaacttactgcagccctgaactctgcaactcaggtggtccttccgtctcagcctcgggagtagctggaattataggcacatgccaccaacacccagctcatttaaaaaattttaaaaaaaaaaatttaagagacggggcctcctgtgttgcccaatctggtctcgaattcctgacctcgagcaatcctcccactgtggcctcccatagcattgaggttacagggtgtgagccaccgtgcctggccagtttttatatttaggaaaaaagctagcggaaattggctcttcccagttctgagaagtttttcgattaatgctattgatgattcctaacttgttatcmgtyttagtttcctttccttagtaatcgaaggaattgtccttggcttcccttcttcatagtaatctcactgctgcctaagcagtggatgcatggttacgtggccagtgtctctctgtctctgtgtctgggcttaggtttaccctgagagagttcattgtaaatctgtgctgaactgactattcgctctgagttggaatattttytgcttattacaaactcgatttttttgagacaaagtctaactctgttgtccaggcaggagtccagtggcacaatcataacttactgcagcctcaaactcccagactcaagtgatcctcctgcctcagcctccccagtagctgggactacagacacatgccaccacctcggctaattttaaaaagttttgggagaggtgacgtcttgctgtgttgcctaggcatgtctcaaatttctgaattcaagcaatcctccagctttggcctctcaaagttttggggttacaggcgtgagacactgcacccagctgcaaactattaagaaaaagtaatgaaaggctgagctcttttctttgtagctaagcctcttgagaaagttctgaggctgctgcatctcccattccgtcctcagctccttacatcgcagctggcagctccaccactgtgtgggcactgaccaccccacccccccgaagggaccagccatctcctgttggccatggtgaatgtttttcagtccttatctgacctccctttggaattggacattgaccagatccttctccttgaagcgttaccatctcgggtagtcccctgctcgagatgtttctcctgcttccctgggtgttccctttcactgtytgttgaaggttctcctcctgctggtcacccattgaatgtaggtgtcaggtgtcatctagcattggatcccatgtcctcctgtcacacttttttttttttccctggcgggtattcacagctgggtttgttcacatgaccgccacaatgaactcatatttaactcagacctctcgttgggggcccccaaatttcaactgcttgtcaggatctttccatgagactggccacaagtatcttaaacagagaattcttagacagaattcatctactttttccttaaacctatcttttctcctatattccctaccttggtgagggtgtcacctctgatgaagttaaacacactgggggtttggatcaacctaaactcattttccttcaccctctttatgcagtaagtaccaagtctttcctgttactctaaggtagttcctttttcctagtccaagccagtcctacttgtctgcagattcagtatgttaccttacctcctgcaggaaaattccccagcattctgtacccagcccttatcctgggattggtctcccctcgattaagctcattcaggctggtgccttgcctcattcaccatcatttccccagggcctagcagggtggtgccttggaaataatttaatttggtggaagtgtcttagtacgatttcatggctaatgggtgtgctactcttgtcattcagagatggggctgggacatcacctctgtggacattgtggtcctaagagccccgttcctgggtgcctgccatttgcttgcgtcaagttggacatgacagctacgggaaaatgattgagggcagaaggcagttttggtgcgacaggaagagcacaggcttccagggctttgctgtaagatcaggagagaataatgcatcagaagtacctgatgctgagtctgttctcaggaatggtgtgtttgaggcagctgcccattgcccggtgcttgccatgtgcttggatgcaaccatggctaaaaggtttcctatctggctatgtggtgattgactgtgggtcgccttcctatggtatttctgactcctcgagtgtaatataaaggtcttcgcagaggtagggctaacggagaggcagcggcagttgttcaatgttctataatgtaaattgaaagatttttctttagttttaagctgagttttccacattctcattactagttggggaggaatgggaaagtggtgacattattcgcagcattcctatgaccattctctggttctacagaagaggtgtgtttgaggaaggcacccaagtttcctgactatttctcacacttctccatcacaagaaagccctatgtacaaaatgatgagagtcccaagaagcatcatttgctctaggcttgtccttactgtggaagctcagagactcacctttgatctaaaataaataaacaaaaagccataaggcaaaccttattgaagtaggtgatgtcgggtgtgtttgctgctgaacgcatacaaacactttatatgcagataaaataaaatgactcacaacattgctgacattagtgtgtgttcttcctgcagctaagtacatcataggattttaccgaattacaccgactaattgtttattgaccaacatcacactagtgggatcacaagaccacatatgacagtgctgcactttgctttgagagaggaaagggaagaatgaacctgaggagagctgactgaaatgtaataattctgtaccgagatttgaagtgaaaatagaatgccaattttgagttttctgtttcttaaactctattttaaatgtttattttgtcttacaaatgtacgtctacatattagacataaaaatggaagcgaggcagctgccgttaaattctggcttcagtctcttctaagattcagtccttctgattactgagctgtgtcaaagatgccatatctaaaaaagaagtcaacgtctttcctacttcatcttcaatactcacatatacttaggacagattatctcttacatgtcattagatattagttttgaagatttaatgagttcctgtaaagtacttagaatagtgcctttcataataaatactgtatagtgtttgccattttattattgttattgcttatttttaacaaaaattgtatttaaatttgcttgtagtgacatgtttctccaagtgtatgctagtataattttcacagtgtgaatttaaaactctgaatctctcatttaattggatcttatccttttggttggaatttcctttagagatactttgtcaacttttgtagagttaggctggtaatatatattttcaataatcaatactaataggtttttaaaatgacagatttgagcaacttttcacttaatttttctaagatcttctgcaaaaactgagggaagcctgaatacatcctatgcaaataattgacataaggataacacagtttcatttatgttttccctatttttttctgtgatattgttatttttaacattattgygctatattttattatggaacacttttttacacaactaaatcactctgtctttattttgatcatttgttccaagtcttcaacattttttcgtaacgtttaaatgctaaaactgtttagttggcctcgcacagtggctcctgcctgtaatcccagcactttgggaggctgaggtgggagggttacttgataccgggagtatgagaccagcctgggcaacatagtgagatcctgtctctaaaaataaataaataaaaaataagttgaatgaatattacaaatatttttcaagacctgctgtgtgttgcacactatttgcatatgtttttcttgtttaccactctgagctgtattgtattataggacaatgaagctattttgcatataggaaaacaggtttataaaatgcacatcattgtttggctagtaaagaacagagttgggttgaacacagatctctctctgttaatctcaggctcttaattatcatggtaaaactttttcaaaatgaccctaccgccatcagtaggatggtggaatagggggtccagccctcttccccccttagaagcacctatttaacaaccctccagggatgaaaaatctttatgagagctcccaaattcagttctatgcattaaatatatgcaactttttgtatgtcaatcacaccttataaagtggtttgaaaaataaccttttttttttttttttttttttttgagacagagccttgcaccgtcgcccaggctggagggcagtggcacagtctcggctcactgcaagctccgcctcctgagttcatgccattctcctgcttcagcctccccagtagctgggactacaggcgcccaccaccatgcctggctaattttttgtattttttatagagacggggtttcaccgtgttagccaggatggtctggatctcctgaacttgtgatccgccggccttggcctcccaaagtgctgggattacaggcgtgagccactgcacctggcctaaaaaataacttttgaagttatgtgccatgaaaaatggatttaacttggtttttctctatactacgcctggtgatcccaattcatttccttaattagtgtttattgagccactaaatattgtttattattccaggcccagtgttaggtgggagttcaacaggaaaaagagaggcatagggttacctctgaaggaatttatagcctaattgttcatagaatacttactctgttttgggctgggcgtggtcattcatgcctgtaatcccagcactttgggaggctgaggagggtggatcacttgaggtcaggagttcaagaccagcctgcccaacatcacgaagccccgtctctactaaaaaatacaaaaaattagcagggtgtggtggtgggcacctgtagtcccagccactcgggaggctgaggcaggagaatcacttgaacctgggaggcggaggttgcactgagttgagagtgccactggactgcagtctgggcgaaaagagcgaaactccgtctccaaaaaaaaagaatacttactctgttttcatggattaagttttctgtgtttaaccagctctcacatggcttaataacagtcacactgtaacattattaaaayatgaaaagacgaatttggcattttacccagctccatgagacgaattgcgctatttatcacattattccttgaactttggtgttgccttaaaattgtacagcctatcaatgaagaatacatttttatctttgctatatttagttttctcaagctgctcttgggcatggtgaatcttttcattgttagtgttttacatagtttctagcagtaatgaataattacgaaggaccagatgtttttaaacctttcctctaatgctcacagccatccttccaagctaatctgccttttcttcatgttartgatgagggacctgaggctccacatgccccacagatgttgtcattccagggtagtcagggcagtcatttgctggcttcagatttctttcaataattttttttttcttttttaatgaagaccttagataggatgtaacagattatccccttttccccttctgtgagagccaaggtgccttatatcggttaaaatctggtgaaacctgtggtgaattgattgtttctgtctgyccctcagtggttctgaaacattaggaggttgtccttgagagaaatctcagcacttcactcagtgagccgatgcctcaagccacttgtatttggaaccataaaagagctgtcagttcaccaagttgaaggaggagggtgttggtggctttctttgttgccggaaagatggatctgattataagaagcctctcaagtagagagttgaatccaaagaactaggaaaatctgggtgtttaaacaaagtttgagttgacatgggatgttgttgagattgcagcttatttaggaagggaagggggtagatctctggctccttctaattaagagtttgtgtccagagtctgcctttgtcccaggctgctaagattatttttccggtgtctttgacaattgccacaaatacaagaatatggacccatgtgggtatgtcttacatatttgggggaatatttttctggaaactttgattcttggtcatatccttattgatacattagaataaaatataaagcaaaaatgccgtaaactggaatcatgatccatcatctagaatgagaaaatgtcccacatttgtggacatttgcggacaatgtgtgacattttctcattctagatgatgttgcttcaagagtgttactgaaacgctctggaaggtagaaccatttgtcctttcccctcctcaagcctgctggcacagaagtgtcacgagggtaagagttcctgtaggaaatgtaatggcttttgaagttgagtttcctgtaatgtgaagaggctttctgtatttgagacataaaactgagtattattttctttttaagagttgtctcctaggcaatctaaaaaaaaatgaatgcttaaattagaaataatataacaaatttatggagcattcatttgatagcctaaccatttaaaaaactgcagttacgtgaactctggcaaactttctgaattcacataaatggatagttttaccatgtaaagtgttagctttgaagttttcttttgagggaagaratacaatgtgttaaaattaaattatgtttgtttttgtttgaatggctgaaagatgaacatgatgcaaattttaaaagtacaaatctttttggcatacagtaagaagttttcatttcactcctgctcggcagcctcctggtccaccttccagaggccaatagttgatagttattaatatattcttcagagatattttgtatgtataccagcatatatatatatatatgcctaccctctttttccacacactcattctactgatcagtctctctagggttctatatcactatggtctcttattttgacaggcattaattctagtatatagcgagcctcctcattcatttttttctgttacgtgcacagactgtccacataacctctctgtggtgcagtttctaggttgcttccagattttgcagtgaacgaagaattttctcacacaagtatgagtcttagaataaactcctgttagtgtaatgctaggtcaaagggtgtgggccgccaggtgtgatggctactatctcttatcccagtactttgggaggcagaggtgggaggatggcttgagtctgggagtttgaggccagcctggacaacatagtgagactgtctctataaaataaaaaaattagccaagggtggtggcgcatacctgtagtcgtagcttttcaggaggctgaagtgggaggatgacttgagtccaggaggtcaaggctgttataagctatgatcacaccactgtactccagcttgggcaacagagtgagaccctatctcttaaatcagaacaaggatctcgcaggaaaaaaaaattttaaagggtatgggcatatgggtattttaaattttaatttatatggccaaattgtttgccatggaaattataccaaattatcagcaatatattgtggtgccgtgtagactattggctttgaacacattttcttgtggatgggaaattgagaatttttaaatatgcatctttagaataatatgttaagtatatatgcatatttggatatgtttccatatattattgagtaatcatatttgattctctttttggaggctaggtaagtttatgtggcagttttcaaacattgagagctattaggttgaaaaaatatggataataaggtaatctgaggaacttttagtttcttgccctttctctcttacatccctctgaattatttaagatccaactgagtcttgccttcttccatgaaaccttccacaattattccagctcttattgacctgggatagcagagcctgtactcagtgatatgcttttattagaatgaatctctacagtatcatgtttgtgtgccatgttaggagactcacagcgttagaagggaaagagcaaggaggagcttaactcttggctttgccctgtgatttttatctagctctagggacagaaacaataacattcagtagatactgttttcttagttttaaataagaaatacttcccccagtactttgttataatattttaagcataacttgtattatttttctgaatataaaagtaataatgatcattatrgaaaatataagaaatataaaacattttataaagcagaaaataaaaatcacccagaaccctatcagctatgagtactcatggccatcatttcttttgtccttttctctctcattgtgtttctctctctctctcrtgtgtgtttctaatgaaattgacagcaacatgctgatatagttttatattttcctttttttyccccctaagaatagctgatggcttgggctgtttcctcacagaacttttcctatgcatgtatatatacataatatgaaatgtagagaaagttttgaaaaaagaaattagaaacaaaattatactatgcataatgctgcatttgcttttgccactcggtaatatatggtaagctgcctgtctcaggagtaagtatagatcattctagttcttataaatgttttgtacctttgcaccaggtcccataggcttccagtgatatcatgttttctgtattataaataatgcaaaagtgacatcctttttcatagatgtatgtagaascttgtagcatagattaaaagtggaatgactgggctaaatgctatacacacttaaattttgatggataatgccaaatttctgcttaaaaatgttttacctgtgtgtatgccaataaatagcctcactatcctcatcagctctgaaaatgatctctttaatttttttaacttgatagattaaaaacattgcctcttgtgcatgtttaatttacattttcctgatggtgaggttgaatgtcttcatatgcttcttagctgtgtgtctttcagctataaattttccatttttctagtttctgatcgattattgagatttctttgatactaactttttttgtctgttacatatgttgcaagtattttcctccaggttgttgttttctttctttatttcttccccccgaccccccaccgctgccccaatagagctcaatttctggagaccaggttgttgtttgctaacttatttcttgttgtcttgagccatacaggagttttaatttatttaataaaatctgtatggtctctcagttttggatcttatttacaaagaccctccaatttaaaaatgtattttcttatgttttttttctagcacttttatgattttgttttcttacaaagactgagctagactgaaggaatgattgaactttatttcttttcctttgtagtttaatcatgaaaattgatatatttttatataggatttttataacttaccaaagcagttctgtggaatatagatcaaattagatattaagttaaaactgaatcatagaaattcagattatggataaattgttctttaggactttaaaaatctctctccagctgtcatttagtttctaatagtgttctctggtcccttagggatcccagcacttgggtagggggtaaggagtgtttaaaaagaatatacaggtatcatcaaatcagttctgcttttatctgtaatatttcatttgaaaataaaggtgctgctgaaaacaagaaacagaaaacccacaatttgctattccattggaagtttggggagcagggcaggtactagtaactcattttccccgaggggtttcagtgagttggtatgggtcatgagtgaggtcagtgtgcagtataactagaattccttgcccctgaggaccttggctgaactccccttgacagagctgggctaagcctaacactgggctaagccgtatcctgttacagttataaagtatgttccgcagtgtgaccttctgctctagaacactttgcacactattattccacatttcctcttggatacctctctcacctgttcactgggatctagttatgcagaagcaataaatactgcagagcaaaagtatttttgttaggaaatgaagtacgtttctaaatctgtgagcacaaaactgaaatggaaaattactgagcaaawtataagctcaggaccaagaatgccaggagagtttttttttgtttagaaaagaaacatgaagtgttgtttatctgtgggtatgaaaaatgtattaaaataacacatgaggccgagtgtggtggctcatgtctgtaatcccagcactttgggaggccgaggcagggcggatcaccrgaggtcgggagttcgagaccagcctgaccaacatggtgaaaccctgtctctactaaaaatacaaaattagctgggcatggtggcgtgtgcctgtaatcccagctactcgggaggctgaggcaggagcatcgcttgaaccagggaggcggaggttgcggtgagctgagatcgcaccattgcactccagcctgggcaacaagagcgaatttccgttgcgaagtaaataaataaataaataaataaataaataaataaaataaaatagcacatgataactgttctgaaaagcacttttcctcccccatcttaatttgataatgtcagtcttgtctaagtaccttttctcctggagtggattaattggaacactatttttttagactcttgaattactgcagattttctgaccaattgttattcctctccttaatggtacttagtttgcttcagaagatttgaattaaattttggttttggtgtcatctttcamatgtcctttttattccttcagtgttgatttttaaaccactgtccccctacttgtaatagctacagtaataggtaattattaggcattgttatctgggccagggactctgatagtgctttatatacattatcttatttaatcttttcactgaygccgtgacatgtagttactgttttcatcttacagatgagggaaccaacgctcagagagtttaaatagtatgccaaagattttacagttggctgaaattcaaacatagtattgaaattcagtgctctttcttcagatcccaagcttttcactagtrtagtgtctttagattttttcaccttaatgagtaactctgtgtgtccctttctgggatgatgctgagagaggagaaaatacatctcaccactaatgctggtcccagttctcagacagttgcttctaggtccaaagtgattttattgtgcagtcatctctaagacctgttgagtttcatgagtcaagcaagaagaattccaggtctttcaggcatctccttccctcaggttcacttgtggtgaagatgacacgtggtcagtgtttctaattatactttggtcttccttttccttgaatattgtcaaggaacacaactgcccttcccccttctctcccttccattcagtagtgtagtggtaactcagtcttagaaacatcaggagaggccactcttcctttagacgtccaaacattttgttagctttagttctccctgctttgttcatgtaaagcttcatttatatgaccaattccgtgtcatctctttctacccttgcaaaaaaagagcttaatgttagatgacaaggcaacacaataacaatgcaccacaacagagcataaagttaaagttggctaacttggcagggtaaaaagaagtacatccagggcttgttcctattttgaccaaaaagcattaaagtgtattcttatatggcaggaatcgccaacctctctaagcttggggaacattagcctgtgtgatagggctgacaacaagatgactggtacaaggagtgaggtaagaaagagagargaggggccrggtgctgtggctcacacctgtaatcccagcactttgggaagccarggcgggcggatcacaaggtcaggagatcgagagayaccatcctggctaacatggtgaaaccctgtctctactaaaaacacaaaaaattagctgggcgcctgtagtcccagctactctggaggctgaggcaggagaatggcgtgaacctgggaggcggagcttgcagtgagctgagatcgcgccactgcactccagcctgggcgacagtgcgagactctgtctcaaaagaaaaaaaaagagaaagaaagagagaagaggaaaaggaaggcactaaggacgggagagaggacacttgtggagtgctgccagtgatttctttggttctctttctttgatgtgtccacgtaaattgagtgctacacctttagaagtggttctttttaaaaaacttatttgtatttttaaattttttaaattttaagttctggggtacaggtgcagaagttgttcttacttttttttgatagatgccaacaagaatatgttctgtgaaagatcttaactagtgtaatcattctgtcatttcacatttgaaatcttgaccatatatgtgtgacattatatatacgagtcttgcatataaagtgtgtttaacctgggtcagtatgttagcatgtatcattgtcactgatcccactgtgtctctgaatagattacagttatgtataaaagatcaatttcctgttttgctctctcgccatctctcctaattcattggaatgtgatgactctttattgattgcctaattcatttctttttttaatacttttttatttttaatttttgtgggtacatagtaagtatatatacttatggagcacatgagctattttgatacaggcatataatacataataatcacatcatggaaaatggggtacccatcccctcaaggatttatcctttgtgctgtcttgtacatggttggtgggaatgtaaattagtacaaccaccgtggaggaacagcttggaggttccccaagaaactgattcacttctttttcatctcttggagcccttccacctgcaggttcttgatcagaagttcctgtttccaacacatcgcccaggccatcactctgaccattggcttcacttgcagctgtccccagtcagaacctcgtaggcagtccgttctgaggcttcctcgcacccaggacccctctgccctgcagccagcccaatttgggccttctgacctccaaacatgtcttgctttcccacttaggaattagaaacactgggaatgatcatcccccctctgaaaacagtcaccaccactgcctgttggaatcctgctagacataaataaagccttagctcagtttccttaatggcacctttctcataccctcataccctcctgctatgtgttgtgaattctgccgcattcttttttttttttttttctttgagacagattcttgttctcttgcccgggctggaatgctgtagtgtgatcttggctcactgcaacctctgccttgcaattctcgtgcctcagcctcctgggtagctaggattacaggcatgcaccaccacccccagctaatttttgtatctttaatcgagacggggttttgccatgttggccaggctggtatcaaactcctggcctcaagtgatccacctgccatggcctcccaaagggcttggattacaggtctgagccaccatgcccggccgacaacacattctttgtagccaggcatgcggcaccagcaaggaatgcctcatttgatgataccattgttacactctgtcatcatcaaatgtcccaacgtatacacaaaactttaatctgattctccttagggtcatgcaaagctaaaattatttataaaggcatttaaatgaattgtgccattaaaattaaatcagtgttatatgtgtgtctctacaggtttgtaactcattatttatggacctttggggttgaatttacagatgctgaatctgcagatgccagaggcccaaactgattttcctaggggccatcttatctcctaagtgatagctacatggttgtggacatgtctgcttatttcttctgccttttggggggcagggatgatcttttactcattattatattctcccgaagtttttctttttctttttttttttaaacacagtatcctgcatttgataggttcctttagtaaatgtgtcttcattaaatgaattaatgaatatcatattttaaaataaaatctcatcccaaaatggaaataagtagagaatggagtagaaaaagaaaatcctctatttgaaatgaggatgggcagcctgaaaatggaagcgacaagtcagggtttaagaatagactgagtaatctagatgtgactgtaagtgctgtatttgtgagatatgacacctgggtctttaaaccaagatcgagtgtagtaactaaactgcttttgagggggaggatagaaaagaaaagaatggaaggaagcaggtggacgtttgctctggcaggtgacccagatgaactagacttggggaaagatttccccaagtcttrtgttcctgtcttgtcctttagtctccttccaaatccagctttctaagtgctgcagtttttcattgtaagcctagagggccatccagttgtgctttatcacaggggtcccagaccagtaccagtccctggcctgttaggaastggcatcacaggaggaggtgagtacygcctgagctctgcctcctgttggatccacagcagcagttgattctcataggagaaggaaccctatcgtgaacagctcaagccagggatctagattgcacactccttatgagaatttaactcatgtctgatgatctgaggtccaacggttttattccaaaaccatcgctccccactcccatttgtggaaggattgtcttccttcaaaccagtccctagtgtcaaaaaggttggggacctctgctttatcgaccagtgaataaaagttggaataccctggcagaacaggcagcccacagccgctgtagatagagctcatacacagcagttttacctgtgaactaacattacattgcagcattgtgagagcatataaaatgaagtttgggtttagagttttaccaggccattctcagtcctacatcattactatcatctatggatttaaaaatcatattaaagaaaatataatttaaaaaatcttgcccatgccactgggtagggggttatgccatattaagcaatttgtctttctttctttctctttctttctttctttgtttttctttctttctttctttcttccttccttcctttcttcctttcttcctttctttcctttccttcccttccttccttcctttccttcccttccttccttcctttctttcttttctttctttctttccttcctttctttccttcccttccttccccttccctcccctccccttccctcccctcccctcccctcccctcccttcccttcctttcctttcctttcccttccgtctcgctctgtcacccaggctggagtgcagtggcgcaatctcggctcactgcaacctccacctcccgggttcaagtgattcttctgctgtagcctccgaagtagctgggattacaggcgcgcaccaccacgcctggctaacttttgtatttttagtagaaacagggtttcaccatgttggctaggctggtcgtgaacttctgccctcaaatgatctgccagccttggcctcccaaagtattgagattacaggtgtgagccacaatttgtgtttcttaaaggaacacaaatataactgtgaattctaacatcttccacagtattctcatttatgcatacacaatgagagacactcgtttgtcctatttatagccaaagatgctttgttgaatatgacatgaaacaatatgatttttaactatacagttttactgtgatctgatgatcaacatgatacaattaatagtgctctgtcagaggtaaatgttaacagcaacagctgctttattctcagctggggtatcaattcccagggaaatgcttattttgggagaaaagatttatttcaaggttatatgtgaaacatttcccccttgtaactttgtggaaaaacctaaaggatccttaaatatctagctctggaagggacttgggttggttgacgaagtgattccaccaccccattgcctcattgtaagaggagtgactttgtacttgctcaaagccttgggattggaggaaaaagcaaagctgggaaccaagggcaaagtggtttattataagaggattggctttggcctatactttattactagtaactaacatttattaacatatgtgtcacttaccgagctaagctgcaaaatctaaactctcagaagagactttagagctagatgctactgttagcctttattttatagacgagacactgaggcttagagaggttaaataaattggccagttgataagaggtggagtcaggacttgaattcaggcatctctagctccagagagaccatcctagaataagtccttaacttcagttctctttctcatgcatttgttcagtcagccaacacagtgatgtgatgcctgctgctagtaagtaccctacgaggctctggagctgcagagttgaatataaaatgatccatgaccttgagcagctcatgactgcatggcacagtgggacaggtgctgggagagagggagtctatgtccagggctaagcaaatccagagatgaggcatcaaaccttagagaggggcaatttagagaactttcctggaaggttgactccaaacgcgttctgaaagacaaataggagtcgactggatgaaaattgggaagtgtggcctctcagaagcaataatactcaaaggcttggagattagaaacggtatggtggttccatggttcctgctctttgcaggtgactggcgcatatgggaaaagggtgggcaaggggagagggcatggtacagatggatacggttttgggtttggctctgccacttcctggctttgtgtccttgagcaaaatctcaacctccgcaagcctcagtttcgtcacccataacatgaggataagtaatatacttacctcagtactgttatgagggccaaatgatataacaaactgaaaatgcttaacaccatgcttgacacatcataaatgctcagtccattgaagctgcggttactaatcaccatcattattgtcactatcttccttttcctcattatttaggtaggcaaggcccagatcttaaaggacctttctcaaaccaccttatgttgtctttcgatgcagccttagctacaccatgaactagcggaaattctgatgtctttgaatgctgggtggaaggatagagagaatttcatatttcgagaagcggtgacaagttcattttgatgaaatgtattgcaacatagcagagaggtcaagagccttttctgatgtctgtgcttgtgatgggaaaatttgtattgaggaaaaggcaataatattacagtgtcacttttgcaaaaatcttcttaagcacagctgtcaaaaacctctttccagagaaggccatttgccctctgtgatcctgaagaattcatccccactagattatgagctttctgaagacaaaagccaggttgtactcatctttagatccacagtgtctgrygcctttcagttgctcagtgaaaatgggtgaaagttaatgatgctcctgaatgttctggtatttggcattttacaaagggcagatattgttaagaaaaagataagacttatgacagcatgctatttcattccttttacatgggttttatgtgctcagctctgatattgccctgcttagatgctttagtgattttgattcttttgtgtgcctgtacagagagttgttttggggatgattaaagtgttttatggtaggtgggctttgtgagagcagcacagctgtgtctgtcttaaacagttttatcyctattgtctagtgtagtgcctggcccctacaaggtacgtgataaatatttgtaataatmaatttctattaaaaatgtggctcaaattactgtgaaacataatcttaatttaacaaatttaacttacttttcttggcccataagtacaagtagaagattatctgtgctcagtacaaaatttcattcaagtttgggtggagacgctcttaatgtttaaaaggttggcttctgtgttgtatggtgtataggacccttgctttctcccttgtgccattcactgttgttatagggtaaggtctttgggctgaatggctacagtgttttagatgtggactttaggtcccaactctgcactgcatctgtctgctcttgctaacatgactgcaatgttggaggaatgtcatagcatctccaggaaagcgatcctgtaatgcttggtcctccttctctctcaaatgcagctatttatgttgccattggcccaagatcatatggacagcatctacctcttcttcccaggtgtgttagagaaggggccttacaacccagccagcttatctttcatcttttaggtcactgcttaacatgttagctctcaacaaagtgctttcaaaccttcttcacagactaattgcaaagtatatattgatggagcttttttgccctgttgctcttctaattggatgtaacagtcgttttttttttttgagacggagtcttgctctgtctcccakgctggagtgcagtggcgtgatctctgcttgttgcaacctctccttcctgggttcaagggttcaagtgattctcctgcctcagcctcctgagcaactgggattacaggcacatgccactatgcctggctaacttttgtatttttagcagagacggggtttcaccgtgttggccaggctggtctcgaactcctgacctcagctgatctgcccacctcagcctcccaacrtgctgggattacaggcatgagccaccgcacccagctggatgtaatagtctttgatgcaccttctttaattctagtctggctgatctctcataaggtgttccctgcctcctcctccttccttcactttaattcctgtctttccttctccttttctttctctagtcatatgtgaactacccatgaattagtgactttaggattgtgctttgaaaaataggcatattttacttgaatttgttttagtataggaattgggttaaaagaagtggatgcaatgcagttcatttctgcacttacctgtgaaaatataaaagcatacagatttttttccagtatttattattttgtggtagaatgaaaaaaaaaatagatgctttggggatctgatcaaagcgcataaattaatgtgaatagctgaaggttgatgcatctgggtgacagggggtcaacttttccagatttacggagatgtaccagagttaaagcatgggatatgccatgtaaacatctgagaactttggcatgttttgatttatttttttcactgcagtattgagattggcctatgttcactactagggggaatgggagagggttcagggaggttgtttttgtttttcaaacagaaggggaacaatgcttagcaaatgcccctgggtgtgtgcctccagcaaacacatacattgggtcaagaccctgatttctagcctcccattgcctctcatctcagtttttttccgttttgttctgggccctgggtagtctagcaactttgttcctattgtcccaaccctaagtactccgaagaatctatttctctaatgtggtaagtagttttatacaacactgtcagcaggcggtgagctgtaagttatatttccattgggagagacttactttgctgtatcccactagaatctaaggaaaaatcacaataaaggctyatactttaagayattctggaagatgggagaccatgtagcctaatggagacagtatgagctccatcactagctagtgtatctcaggtaagttacttagactctgtaaagtttgatttacwgttctgtagactgaggataatgcctctacagagttgatgacatgrgtatgagagataacatatgtacagtttagtatggaggaagtgctccatagatggtaactatgatttttggttaaattagggtatggttttgggacatgaacatttattgatgataacttattaacacccctccctctacccctgcctgcagagtaattctgatcattttaagtgccagcacctgtggatatctgtgaacaaggactcaccaatgaaatataaaagactaggccgggtgcggtggctcacgcctgtaatcccagtactttgagaggccaaggcgggcggatcaygaggtcaggagatcgagaccatcctggctaacatggtgaaaccccgtctctactaaaaaatacaaaaaattagctgggtgtggcggcgggcgcctgtagtcccagctactcgggaggctgaggtaggagaatggcgtgaacccgggaggcggagcttgcagtgagctgagatcgcgccactgcactctggcctgggcgacagagcgagactccgtctcaaaaaaaaaaaaagaaatataaaagactagatgtcttcagccctgtggtggttcctcttcatgcatttaggcgcagtacagaaactctccatgtctgtggttacattcgcctctgtattactcagtggttggaggtgaggagttggaagtctaggtcagttgtactttgaatttacctgtaggtccacttctgccagctcagagtccattagctcttccatattcatctgttctcagcaattacaggaaggagaatttcataccacttgtctaatgaggacttgatcccggtggttatcacagatttcccaaaattgaatgaaatgctcctcttgttcccctttctgaaagaattccaaagcttccttcaatgcagtcaaggggatccttccttccgctagaagcattcctctgttttgagtctagaatgcttcacggtgctttttgtcttgtggcagcttcctgggagagatacgaggctcacttataagtgctcagaataaaaatacaaaacacagtaagtgctcaataatgttagctaggatggtggtggtggtgggtgataaatgatttaatctcatttatgctccatcttctcctccactgtccttccaggataattagcagcactaataatctggttagactcagctcaatgctttctattcgatatgaataagtgattattgtttactgctaagacaagtgtggtgttgagatggcattttctttgttgaacacatttttgtttttccttgagaaaatgcctaaccttttcattctcttggttttccttgaacatctaagtcttcccacacacctccaactgctttgtgaaacaaacgcctcttgtataactttccacattgtccaaccttttcagataatctcagcacctcgcacttttgcttcccctgaagacatccctcttggagacctttaatgaccttctgttcccatctgcatggagaggaataaagacattcaaacaagtctcctattttcaagtccttccctacccataacctacccatttccctcgcaaaacaaaacacctggtaccttgtgtctctaaagttaagtgtacagacagcaagtttagctttctctgccaggtttttaccttctgtatttatatgttgtgttgggggggtttctgaaacccccttgtttcatcaaacatggaactctttgcatctgtatcttgttttctcaatgatttgaagcgatttttcagttggggaaaaaatgggaacacctgcattttaccactttaactcagccatctcctaacttctaattccaaattcatgtttatttattattttttaaagagatagggtctcactctgtcacctaggcttagtgcagtaatgcaatcataggatcatggctcattgcagccttgatctcccagatacaagctattctcttgccccagcttcccgaggagctaggaccacaggtgtgtgctgccatgcctggctaattttttaattttttatagagactaggtgatactrtgttgatcaggctggtcttgaactcctgggctcaagagatcctcatgccttggcttcctgaagtgctgggattacaggcatgagccaccacatccaacaccaaattcctaatgattgactggattaaaataaccatgccaggcaaggaactaaatacacctatattttctagacccattctacgatttctttttccttttgtcctattctttattattggatacaaatgatagcatgcttatcttttggagatgaaagggtctttctctagtgagaactcttttctttcaaatgcagattttatgggaaaatccaactggcctgctctgtgttttctgttaaataagcccatctctatgagttaggtggtaaaggtaatttgtttcattttagtgctataacttaagaagacaaggagaatttagagttaagggagaaccactgagataattaaaaggtgaagaaataatacctaaaaagaaaaagtaagaaaggtaggattatttatatcggagtatatgagggagtgagtgtcataatgagagttaaatatataaaggtgcagtgtagagaagatggcacccagttgcccttttaaaatgaaagacttcaagaggaaatagattaaattagcagtagagtctgtaaatagcataacagagtataaaaatagcagtagagtaagtatattttacaaagaagaaacttcaagacagtgaaagttgttaactggaggcgggtggggaagggtcgcaggcaagattactaggcgaggcttgtgcgcccgctcccgccctggccaccagtgcccacccggtcggcctggcacagccatgatcaaggcgatcctaatcttcaacaaccacrggaagcygcggctctccaagttctaccrcccctacagtgaagatacacaacagcaaatcatcagggagactttccatttggtatctaagagagatgaaaatgtttgtaatttcctagaagggggattattaattggaggatctgacaacaaactgatttatagacattacacaacgttatattttgtcttctgtgtagattcttcagaaagtgaacttggyattttagatstcattcaagtatttgtggaaacattagacaaatgttttgaaaatgtctgtgaactggatttgattttccatgtagacaaggttcacagtattcttgcagaaatagtgatggggggaatggtattggagacaaacatgaatgagattgttacacaaattgatgcacaaagtaagctggaaaaatctgagggtggcttagtgggagctccagcctgtgctgtatcagctgtaaagaatatgaatcttcctgagatcccaagaaatattaacattggtgacatcagtataaaagtgccaaacctgtcctcttttaaataaaaatgtaaaaaggccactcccaggtaaaatccagggggaagagtcatctaagtttaccatgcagttgtttaccaaaaatggagraggagagtcttaacttttgctcttggatttaagtcaaggtactatatagaagttgtgtaaaatcagtatgaaagttcaacgttgcttttcttgctcagtgattttaaagaaattgagtagtttctatgtgattttttttttttcttttctaaactgcattcgggtgcccatctacagcatgcctctatgtattggctactacagtgttttaaaaagtgtttcagatatttctttaattatgtgcaacctaaaatgttggtgttttgtatggatcacaagtgcagcattccttaattccttctgctatttgtcacacaattgttatttaaagaaccaagtatgtattgcatgaaaacattatgacttttttctcttagtttaaataaactccaaggtaactggacttctaaagcacctttctgtttgcctgatatctactttagcaataattttttttacaaccctctgactcaacaaagtaaataaaagtatattttatcactaaaaaaaaaaaaagttgttactggaatgagctatcaagggatggtcaccttgaataatttttatttgatagtgtttagcatcacctacaggttctaatttagctaataaatgactaagcaccattactttttttgtgtgtccaaatcagttcattttgtcttgagtgtcttgagagtatccatgcacaggtaatagcaagaagtcttcattcttgcctttttttttttttttggagacagactctcgctctgtcacccaggctggagtgcagtggcgtgatctgggctcgctgcaagctctgcctcctgggttcacgccattctcctgcctcagcctcccaagtagctgggactacaggtgcccgccaccatgcccagctaattttttttgtatttttagtagagatggggtttcactgtgttagccaggatgatcttgatctcctgacctcatgatccacctgcctcggcctcccaaagtgttggaattacaggcgtgagccaccgcgcctagctcattcttgcctattttaatgtctgtattggaatccttgtttaccaatcttacttcagagcagcagtactcttgagaaaactratgacttcataaggctccagtgtctgtgtaaatgagacagttttcaaaaatcatatgtaatagataactagaatattttaatttctattcttttttttttttttttttttgagcgggagtttcgckcttgtttcccaggctggagtgcaatggtgccatcttggctcacagcaaccttggcctcccaggttcgagcaattctcctgcctcagcctcccaagtagctgggactacaggcgcatgccaccacgcccagctaaattttttttgtatttttagtagagatggggtttcaccatgttggccatggtggtctcgaactcctgacctcagatgatctgcccaccttggcctcccaaagtgctggggattataggcgtgagccactgcgcccggcagtttttattcttgtgctgcatttgtttgaccctgcagttgcttctgtttcaaatgttgcatttatgtgaaataaagtgagattggatataatctttacacaaaaaaatcttacttgaagttcttattttctctttgagccattatgtacccttgtcatctccttttctccttttttacttgacacgttttgtagattatcctgagccctagaacagtgtgtggatggttgcaaattttcatctgcttcttgtttctttctcgcccttgcctctgtgtgggctcttctcttcccagccgcccagcatatctgctgctctattcatatccttacctatcacttcatacgacttggtaggcagagagggtgccttttcttgttctttggggaatattgagatcaatattatgtgctgtgggaataatggtttttgagaaaatgatatataaatataagggagtacagtcatttgatgtttgggccaagtaatgtttctgtagttaacacttggtggggggcaacagtattacatttttcaaaagctatccttagatctgcttccgaggttgaggtgctgtgacatggcactgtagctattgagagataggattgttgatatttttgatggttgatcatacccagggccatgcctaagattcacagttcacctatttgttacagactggattttgggaggctttctgcttcttagacttcctgtcacatgaagacattgagactttgaggtatcccttttgggatcaatattctcctttactaaagcttttctgccatcttgaggaatcatgcttaaggtaacccagtaagagaaaaaagctatagcaagaacttggttcttttgactccaagcgtgggtcttttctttttatggaagtggttaagaaaacatattgtttcagtcatcttataagtgaagaaatggaaatcatagtcatttgtgatagcctctgcatttaacagttatttgggaagcaatttaggagtatgcaataagagacttctaaaaatatgtagtttttgactcaataacagtcttgaagaatctattccaatgaaagaatcagaagtatagggaactctttttgaaaaatagcaaaaaattagaaccaacctaagttgtcaacaatagcaaatggttaaataaatggtgatccatacactggaatattatgcaacagtttaaaattgtttttgaaaaaattttaatagcatgagaaaataatacatagtaatcataaataatgaaagatatcaaataagatggtacaatctcagttacacaataaattaaacataattaaaatgatgaaataaaatatgcaaacattttaatattggtcctctgtgggtggtgacgtgggtgatttttttcttttagttttctgtcatttccaatattcttataatgaattataatcagaaaatattaaaggttattaaaatatttaggtaaaatagaaaacgactgagctttctaaccctaataattcaaaagaataaatttcaggacataagctgttttaataagtctttttttgtttgttttttttggataataaagacagggtcgggtacggtggctgacgcctgtaatctcagcaatttgggaggctgaggtggtagatgaactgaggtcaggagtttgagaccagcctggccaacatggtgaaaccctatctccactaaaaatacaaaaattagccgggcttggtggtgggcgcctgtaatcccagctacttgggagactgaggcaggagaatcgtttgaacctgggaggcagaggttgcagtgagccaagatcacgccattgcactccagcctgggcgacagagcgagactccatctcaaaaaaaaaaaaaaaaagacagggttttgctctgttgccccagttggagggyagtgatgcaatagctcactgcagccttgaactcctaggctcaagcaatcctcctgcctcagcctcctgagtagctgagactacatgcatgcaccaccacattcagttaatttttaaattttttgtagagatgtgggtcttgctttgttgaccaggctggtcacaaactcctggactctagtgatcattccacctcgatctcccaaagtgccaagattacaggcatgagccactgtgccagaccaaaaaattctgattttaaaaaggaatgcttgatccttttttttttttaagcaaaatgtactattttgtacattttgtatttagtcaatgtatgattgtatatggtgctgaaagccatgtgataatgggagagtgctctaaatagtatttattaataaataattgactattgttacttattttattatgtaaatgtacatcttatggtataacctaatggtgaaagattgagctttggagccagcctttgccacctgctagctctggaactttggccaggttatgtagcctcagtttccttatctgtaaattggacgtgtgaagataaatgagaaaatacacgtaaaagtctttagcacacttcctggcacatagtaatcatttaaaggctattatagctgaaacgatcaatgaatcatgagtgttctactgaaggaacccttcttccaaattttcttacatatagtatttaggagggacatatgttaggtgattaaggtttttttgttttttgttttttttccaaatacaatggtgataatccaaagattgtgtaagagaaagtagatgtttcttctctgttcctcctcttatatctctgagtatggaaatactccctggttttctccaagctcatataaacctaaacatacacaaggtaactggtttatttgctttggttttgccttatatattactctgcaacttttcctacttagtaacacatcatgagcattgttcagagctaatatagattgaactcatttttaataactgcagaatagcctaaataatgtagatatgccaaaatgtacttgaactatgtattatggatactcaggttgttacaaattgccaccctctactacaaatgacgttgaatgcagcatccttatacagaatttttaagattcattgcttttatttccaatgaaagtttccctagagtgacactgctgagttcagagtcagtgctaattatagtgcaaagggatttggggtgcaaataatatataaaactttgttggtttctgcccttttataatctaattgaagaagaagtacgcatgtatttttctgtggatttctttgcttatgtacaacaattttagtaaatggtgtttattcctagggaggtttgaaatccttagcattctgaaacataaatcagaagagcaaaaggagtctcttgaattaggtttactctgtacagtatttgctgtatttattagatacaaatttgttagaaattgtacatagttaagtcttgcagtttttaagagctaagagtcccacttgaaaactgaagcacctgacttttgccctcttgttccttagtgtgcttacaccctacagggttgcagacaggggaagagccatccccacatgcagtatctcgtctctagaggcccaggcttgctcagcacggatgcaagcagctgaacaaatcttgttttgaggtcaccgatggtaacaggaatgatagtatgctaacaaattatttttacaacagtaaagttactgtgttagcattagacaggttctttttctttgtaatatcactgagagctacttagtacaacataagttgttccaagtgtccacttaagtagtgtggggtatgtgtrtgttgtgtgtctttacaaggcaggggacagagagaagaaagaacaattgtaatgggtttgtggtgcatgtacgtgcatgtgtggccgcagtatacctttaatgagcagcacgaccatgtctgtttagaagctttgtttttccctgttagtaattaacatttggttacatcagttgggattatacaactctttaacagctgatactagttcatacctgttttcattctttctcccctctgattcagcttcttggctctggagaagtgattgcgttatacactagaatccacttggttgtactgattcactggagtggtcacatatctgaaacccactgggcaccctgttgcggtttccagtcagtgggacctgtagttgcatgttttggtttcatattttttctcttagtgatgaacagccttaactttaaaaattctctgctctgtaacaattggcttgttgggaaaacatttttacagctgtggtatttagcagtcattgtgtttccttgggtttcctgcagtattccgtgaagtagcaaggataataatggcggtgatagcaaacacataaccaatgcttaccatgtgccaggaatttatagattattaactcataaccctcccaacaactctaggtggtggggactgttttcatccccatgttagaaatgcagggagcgagccagcttcggacccatggttatgcagtgtgtaagtggcttaggcatggaaatgactgcttctgggtgaggcttgctggtggggctggagaaactggtgaatgaggcgacattcccagggaagctcagtgctggatgctcagacccagatggagagagctggcagagtggcttagctgctgctcactgtttggataggaagtgacaccctggacatgggagagaagttgagggaactcactcaggcatgggaggaaggaaacgggggaaaggaaggtgtggaaagctttgctgagggaggtcacaagcaacaactgtctctccaggagagcccttctttcttggctacttctgtccctgcagggcgcacctctccggaaaagagcgaagcaagctcaaggtatgtttatcctcagtgagtttcttttgatttgatgagtgagtcatctgccctggctggaaaacctttccatttgcttttgtgattgtgtttttcaaattggtttttgaagaggttctatgcgacatgctcaggttctctcattccacaacacagtggtacagtagaataggccatctaggtaagaggctctggcagggtgctatggctgggatgggaccctgattctgccaccatgccttctggatagagcttccttgggctgaaattgggtcccagcctcagggccccctccaccatgtctgagtaatgtccgctgtgggtgagcaaagataaactgctgatggtatgtcatagttgttttttgtagaatgtgggtgcttgctattgtcattgttacttttatatcataaggtcatagctgataaccstctttctgcgtcatatcagcatggttcattgggtaagaacatgggttcagatggagctctgggtttgaacttgattgtctttagtcactgagtgatcgtggggggaagttatttcctctctttagcctcagtccttagtgtgtaaaatggggtgatatagtaagagaagccctgttgtcgtaggggtgttgagattgtgctcagcagagtgcccccatcaatgtgtctgcttcacaaatggcggtgctgattatggggaatttcccattctgatttttaggtgtaataagctctgacattccaggacatacatcattgtggatatagatactgacagcaaaaagaagtggaattgaagagttgcagaatgcacatctcccaaagaagggtggggtgtcttacaacaaagcattcctggcgtgactagacaaagctcatttgagagtaaaccagagtcaggtattcttctgatggaattgattatgcaagctggaccaggaagagtcctttattttatgcccaattgatggttctttatattttaaagaacttgtcattttacttacagaaagaatttttcctactgccttttaataaggaagggaaaaactattgcttttggttttatctagtgaaatccaagttctgttttggaaggacaaaggagttagtttggagggaaaattctgaccctttttagtgagcactgttatctgttttaccaggttactttaaaaagtatcatttagtaaatttttttgttttacaagctccagcttattattatggaaattttaggcacatacaaagctgtagagaatggtgagacccctgacatacctgtctcccaccttcaagaactgtcaactcatagtggtgcctcatctgcagccctactcagttcccaaaccctcgtgattttttaagcaaatcccagacaacattattttatccataagtattcaagatgtacttagaatgccttcagaggaaagtttcgctaaggtcaaaaatgaaaacctgcatgttctaagttgcttcctgtgggaaaatcatgtctctctggaaatctcaagacagtaatccttaaagcagggggtggagaaatgatctttttaaacaataaccaggggagctttttcagactaacttgtcctcctagaagattgcctgctgaagccacccccttattccaagagttcacagaaagtgttagagatgtacaagatagagaaccacctctttggggaaagtgcttccgggttatggaggctttttaaccaccatggatgggacttacttaaaaatgtatttattttcttccttcttaaacagattatgctgggtactatttaattgttcctatttactacagggagttttggacaccgatttgtatgctgtggagtgtgtatgttaatcatttacgtgtcacctcccttgttgccattttttatcctatgtcaatgtgcttgtctgtaatgacagccccttgtctctttgaaatctgttaagggctgagaagtcaggtcaaggaacttgtaaagaactgtacttaaagtcagagtaaatgaactgagggtgttcttttgtttcctgagcaaagtgtatgatgttggaattaaggatttggtgatactcaactgctcaaaggatgttttggctccatttcttggtttttggctgtgttctacatagatcaggttgctgtgtagccatgtttcatataggtgaggtattactgtaatgaattataacacagtaggaatctttgttttccaatttcacatacagctttagaaaggcttgaaaggtcatttacgtggttagtgcgtaagagagatggaaaatgtgttttaggacaagtttccatctcaccactgactaaaagtgagttaggagggaaataatggaatcttaaaatgtgctttttacagtttttgttgttgatgttattttcattagcaactaaagtcaggggcttgtgttttaaactttgcagaaaaagctttacttggctaaaaataatttgatgtatggatatgatttgggtactgtacagctctaaaactgattgatagaagaaactaataatctcatttgcactgcacaaaactaatttcctttctgccttcctttaaaggaaaataagagtagacatttttagtattcttttatttcccatcccctcccacctcatcccttcttttagcctttccttaggaaaatgacctagtactatcaaaactgagctgtgccctatgcaggtttatacacagcacagactagttgcatcagtttttcctttcttacaccctcaccaagattacatagctctgtgagatgtccttgggagttgtaatagtatggaatgctggagaaattccaaagactgttggtaaatataggatgcaattgaatagcagttagcttcttttggtgatttcagaacttatctttaagaaaaaaaataaagagttaagtatacatagcatagcatgggaactaaaaagaaagtgcggtgaccatgtttaggatttggatttgaacttctgtctttcatttgcctgtgcaggtaattcaataaaagactaaacacagactgtgctggtaattcagtaaagaggaatacgctgcatttggttgatatttgtgaaagatctctcctctgcttatccatcatatttaaagatttacttgctctgccaaatgaccttttctaaattgtgagaaagctgtctttctttgctttgtgtttttaactttgaaattttttttaattaaaaatgagagaacaaaatactggaaatccacagttaataggtaaagatcgaaacttacactttagagcttaggaagctgattgactactcagaagtgaattttagaagtgcctgaaggttttctgtatgttctcttgcaatgtagcctattctatataaaagacctttaagatgtgatgtttacagagcaaatatctcaacgaattgctttcagcaagcatgggcacactacaacactttttatcatctcagtagttccattgtatttgttgcaaggaacgtgtctggatctgcaatctctgtctgtgagaatacccccagtataagacagatcaggggctagaaaaggaaaacttgggtggtgggaatgttcttttggaaacccaagttcaattttttcccctgaaaaagcatgagtcagtggaataacttaactctcatcccttttctctgtagcttaaccctctcttaagaagccagaattcagacccatctaaggttccagattccttaaatgatttgaagagtcactgaggtcatgctggagactcctgccctgccttaatgtcaaaaagctagtgatctcaggattcattctttcttcataatgactgtgttagtctgttcttgcatggctatgaagaaatacctgagactgggtaacttacaagaaaagggattgaattggctcatgcttctgcaggctgtacaggaagcatggcaccagcatctgctctgcttctggtgagggcctcagggagctttcaatcatggtggaaggtgaaggaggggagcaggcatcgcatatggcaggagaggagggggcaagagagcgagcggggtcaggggaggtgctagactttacaacaactagatctcgggagaactcagtatcctgaggatagcaccaagccagaagggatccacccctatgacctgaacacctctgawatcggggattacaattcaacatgtgatttggtgaggacatatattcaaaccatatcaatgagaaacatttatttcacttcctgccatgtataaagctccatgttatgattatagaaggttacaaagctgacgcccacacaggtctttcccttcaggactctgactggggaggtgagacamacctgagagtgattgtaggatgagagactctgtgatacaccaggarctgtagagacayggcctcatggattttataagaccaagggaatgtcatatcaatttcccctggggaaaaaaagaacaatgggcaacactggatgatatacacatgctgttggctagaataagaaatcttcttcccacccaggatgggctcttcagaggacatttagtctaagattctctcctttatgcttcaggtgtctgagtttgtgggataaccaggtagccgtggttggactaagagaatgcatgattcagcattctactcggtcagtttttccatgggattgtcatagcttcatgttaaactctatgctttgccacctcaccccccaccttcatttttaaccttttaaaagactttctctacagtaggtcaagtactcaatttcctctttgcacaactgcttggccatgctttgagcaaacctagcatactctgaaactatgagaagagtaggaagggaacttgtccacactttctgagtgctcactagcactgttttctcatttacttctcacaaataggtagggtatgtrttaacttcataagtgagtagactgaggctaaaagaggataagtactttgccattcattctgcccctctctggttaaagccagtacttgcatgaaagtttgtgcatgttcctatccctaatagtaaaccttggttcttagaacccctcagctcaacttcagtcgagtgagtatttttccctttctttagtctttagttttcggtttccagttgctttactgagacaaagaccctagaagttgaagagtccagggtttactgcactttccctgtcattccccctgtactttgtattccaaattactttcatcacggaaaggtgaaagtctaagtctttaaaaaaaaaaaaaagatttagggggttcaagtgtagttgtttttttgttttgtttttttttttttgagatggaattttgctcttgtcacccaggctggagtgccgtggtgtgatcttggttcactgaaacctctgcctcccaggttcaagtgattctcctgtgtcagcctcccgagtagctgggattacaggcacctgccaccatgcccggctaatttttatatatatatatwttttttagtagagatggggtttcgccatgttggcccggttgggcactcaagtgcagttttttttttttttttttgagatggaatttcactcttattgcccaggctggagtgcagtggcacgatctcggctcactgcaacctctgcttcctgagttcaagtgactctcctgcctcagcctcccgagtagctgggattacgggcatctgccaccacacccggctaattttttgtatttttagtagcgatggggttttaccatattggccaggctggtcctgaactcctgatctcaagtgatccactcgccccggcctccaaaagtgttgggattacaggcctgagtcaccgtgcctggccaagtgcagtgtttttacgtggctatattgcataatggtgaagtctgggcttttagtgtaaccattaccccaatagtgtcccaggctacttttctttataagatgcgcctaggaaaaagagggttagaagattgttttgaaattagaaaaaaatcacagtattgaaaaaaattaggagtcagcattgttagctttatgatctatattttacttagaaatagagtcttgctgtattgcctagctggagtgcagtggcatgattatagctcactgcagtctcaaattcctgggctcaagtgatcctcctgcctcagcctcccaagtagctgagactacaggtgcacaaaaccatgtccagctatttttatttttattttgtagggtcaaagtctcgctattttgcccaggctgttcttgaattcgtggactcaagtgaccctcccactttggcctcccagatatgtatagtttctttaatttctataaatgggtctcagcaagagttgcagctttgtagtatttattagatatgttcttaaagaatagatcaataaaactatatattaagtaacttatttctgtttattttttaaaaatagactcgatttttgggagcacttttaggttcacagaaaaattgaaaggaagtcttaaagatttcccacatacccccgcctttccccatgcgcccccactatcaccatccccctactagagtggttccttggttacaattattgaacctaaattgacccatctctagcacccaaagtccatagtttccattagggctcactctgactttttatttttaatggacctttctcttaaaaaaaaaaattacagtaaatataatgagggctctatacttttatctcttttgaaaaacagtttttattaggaaaatctaaagtgtctaaacctgtgacctttctatgagcatgtggcatttagttccagattttataatgtatgtgtgataaaatgaatatgatggggccccagagagccacatggggaaagttggaaaggttccaggagccagactatttaacagaaaggagatgcttagagtggatttcacatcaagtccattttatagtggatattttgctccctgctctaatgacaaagcagaggtattcctattggacataaaatataggagggagctgagtttgaggtggaactctacgcctgtgtgaatggctaaaagatggaattttaacatatgtgcaatggcttttttgagagcttaaaagtagtggataaattcatagaatataaaaatgttgaaatgaaagggactaagagatcttcttctctaatcctattgttatagattagtgtcaagcagattgtttacctggaataatttaggtgtagcctttcctaaaggtaagagatgccttaaatgagtgcctgaaagttctttccagaagcatggctctgtggctgtgcaaattctgggtgaaaatgtcatgagcttttaatgtaggtaaatgatgtgtgtgttagaggtgaaaaaaatgtgtttctagctctgaggaagtttagtgtcaaagtgtgctgatatttttaacataagctagattagtatattaaaataagcaccaatggctgtgggaattcagacagaaaagattacctgtgatattaaggatcagagaagtccatagaaagaggcagcatcatttaaattcagcagtgactaggtatgagcatgtttactatcggcattgaggattgccttctttttaacttttgattatgaaaacttttaggtatatagaaaacctaaaagaacagtagagtgagtatctgtatactcacagattcaacaactgttaacattttgtatatttattttaactttgaatttatagatgtgcttatgtgtgtatggtgtatgtgttggtttttcttttcttttcttttttttgtttttgagagtttttgctctgttgctcaggctggagtgcaatagtgccatctcagctcactgcaacctctgcctcctgggttcaggtgattctcctgcctcagcctcccgagtagctgggattacaggcacacaccaccatgcctggctaatttttgtatttttggtagagactaggtttcaccatgttggccaggctggtctcaaactcttgacctcaggtgatccactggccttggcctcccaaagtgctaggattacgggcgtgagccaccgcacccagccgtatgtgttggttttgcaaaaaaaccattggaaagcaagttacaggcatcatgacttctttacccctgatatatccactggcatctcttaacacaattccatctattctcctacataaccacaattctatcaaaatctgaagaaaattaataaaaatacattaatatcatctaatttctgtttttcaaacttccctaattatctgtatcttttacagctattttttttttcacaactggatttagtcagggttcacacactacattttgttttcataattcctaaatctcttttattctacagcagcctgtacggcctccccctcctcatgcccaatttttgtttcatgacattgacttttaaaaggaccagaccagttttcttacattttgttgataccgtatcttgcaagtatttttgtcaactggagattttaaaagtcttttagaaatcaaaatgtgtattttctaggagatatattaccagattatctgctagccatgaatataaagccatcgctcctgatacaccattttcagtagataatgtactttaaaataatctttatttacaaaaataatataaggcagctgtaagatgctagaacaatgtagaaatatctaaggttagaattctatttaatatcaagtagctctgagataataattttgccaaacttacattctttcctstttgtgtgtttttgtatatcataaaaattccaatcatctatacatgttgtttaaagtttactttttatttcactagttaygcattgcaaatgatrtcccatagaatatgtagtagagattgtttttgctgggataaatgcgtaccaagccagccacattctttcctaggtgtttacagtgagacacacccaaatgtaargtgcctggctcagggttagaaatgtggcttgtgcccacagagcaaatatttttctctgtttgaggctctctggttaatgcaggaattgaatcttggcctcttgtgttctgtgctttaataagttgaggggaattcatgagtagtaaacatctaagggctgtctatttgaattttggcttccccccactgtttttcttkgggttgggggtgggtgggtcatttcatattcttttctgtacctatcaagaaatcagattggcttaccttagaggtaaacatgatactctgycaacataaagtgatttagaaatgttaatatattttaccaagccagagtttctagcatatgtattttaagccgtcataaaacatatacctgtcatgttaaggaatgtgcccacggcaagtatcaaagacctgctgtgggaggctgaggagtgtgttttgctatgttgcagggttataacctgacaacctccatgaggcatgagtactggcagggagtggtttataaatattgaagctattttatttattactttaagaattcctacaagtagtagctattcctatttgtacatccaagtgtcttggggctcagggggtaatcctgtgtcggcagatggatgaagagtgtaaatcctagtggatctgcctgagttagggaatcaagttaacaaaacaatcagatgagcaagagatagtctgttgggcttaatggagaacagaacatttggacagaaaagttttctggacatttctggcttctttgaaagacaagtttaatgagcctcccagcaagattgctggctcacggtggagcaataaggccacttttgttgttattttattcttgtgttgtccatggcaataatgtcatcattttcatttggtgggacatcagggtgtcagtaagtcttgttactataatagtaaattaaattatctgtgatttggttacaggacttttgcatcaagattttgtaaaggaacaagatgatggtagggtggttccccacatctgtctaaatatttgttaaaaaaaggacaaagagttgtgatttttaagtgctttgaataattcatrtctttccattaaagaaaaaaaaaaaaggaagtaactggccgggtgcgttggctcacgcttgtaaccccagtactttgggaggccaaggcgggtggatcacatgagttcaggagttcaagaccagcctggccaatatggtgaaaccccggctctattaaaaataaaattaaaaaaatagccaggtgtggtggcgggtgcctgtaatcccagctacttgggaagctgaggcaggagaatctcttggacctgggaggcggaggttgcactgagccaagattgcaccactgcactccagcctgggcaacaaggtgagactccgtcttcacaaaaaaaaaaaaaaaaaaaaaaaaaaaaaaaggaagtaactgattatattaaatgcatattcccaccactttgtcattcattctaagtaaataataaagttaaaacataagacatgaaaataaaagtaaataatgttaataagagtaaagaggcagtgttacaaagagtgaggaggaacaagatcaaattttaaattcagtgaggcacttaagtcattaaaccttacttttttcatctgtaaaatagacaccatagggttgttcatgaagttggaatgagacaatatatttagaaatttaaaaaacaaaacaccagtgttcaagttccactcctagtgggctttttaatttaatttaattttttttatttgagacagaatcttactctgttgcccaggctggagtgcaggcatgatcatgggtcactgcagccttggcctcccaggctcaagagatcctcccgtctcagcctcccaagtagctgggactacaggcacacaccatcatgcctggctaatttttatttatttatttatttatttgtagagacagggtctcattgtgttgtccaggctggttttggactcctgggcttaagtaacccttcygcctcaacctcccaaaatgctgggattacaggcatgagccaccacacccagcctcctagcactttcttgagtggacagtattgcatagtgaaaaacgcatgtgaactgaagttacgtagacattggtttaaattctggctttgccatttacactgtgcacctgtgaatgaatgctttaatctctttgaaccttcctttcttcaactgtaaagtagcttttatcgtatcacccttgtaagataaggcatagggcatgggctctgccaagacacttaggaactccagaacttgcagcttatcaaacatgagtgttgatctgtttggcggsggggggcttctgtgtgtgtggaatatggtaccattgacaggtcccttctggagcatgaccatggcgtttcttttgcatttacagctatcttccagagggccacactgggcatggacacccttttccctgcctggaggagcacaggtgatagtgtaattttccagtcacgaaactgctaaggccatctcaggggcgtgtgcgccaggataggcaggcggcgtccgaggaccacatagccatgccttttggtctgaagctccgccggacacggcgctacaacgtcctgagcaagaactgctttgtcacacggattcgcctgctggacagcaatgttatcgagtgcacgctgtcggtggaaagcacagggcaagaatgcctggaggctgtggcccagaggctggagctgcgagaggtaagaggggtgtgtctgtgtgcgcatgtgcgcgtgcatgcgtgttgggtatgtgaaggagaactcaccgaagggaccagccatctgtttcttggcatctgttgtgttttttggcctaagcgacgatgtgtttataagaatcctgttattcttagcacggctgtgatcttatccatcattggatggggagacttgaacaccgcctagagctgcatggcgtggcaggtttccttttatttcagctggggaagaggttttgggggagttgaaaatgagagactctccccaccaaagtcatcttctctctttaaaacaattgagtgggtagctggtattttggcattctggctgcacattaaggagaaaaaacgcccacatacggatgcatgcagctgccttttttttttttttttggttgtttctatattttcctctaaaaaaaaaaaccccaccgaataaagagaaaaagcatttagagtgagcatgaccagtgaggctttttgtgggagcctgtaaaacagaggttttcttctttttaagattcctcacagccctcgttgccttcacgccgtctgtgagatggcttttaagcaaaagcagggctgaccacttagaaagtcatgctatcactctttagaagggactttcagagcagtatgttgtttttgacagccaagcccttcttttttcagtcatacagacgtttaggacaagagacttttgtgagcaatccacacttcagcatctgtgtcttgagagctgtctgacatattgagcagtggggaaggtggtatggttgagtggttgccaatactgaatgactgcaagcccctgaggctgagacattcctgagggcaaggaaaagctgtgkgtaattgtcctaggtccctgggctcttggagagtccaagtgacagcattgcccaggacctcgatgacagaagaggggtggcaatcactgttggaagtgattgcatgtggcctctctccacctgcttacaaaggaatgggggcccaggagggtcttcctctcccctttcctgctctgaaagtcccttctaaagacgtcttccacaggctggctgtttttctcagggaaactgtttcacctgaaatgcatctgtctcctgctgttcttggtgtttatactttggtttcagtgatcaggtattccttttaggtatatttttctgtgcaggagactgtcttggacaatggatatatgtattagtagcttggtaactgccacagtagaataaatatgtgaaatgttctcatcttgttgacgggtagctggctctttttctcgttggtatcacgttaggatacacacatttaaacacacatttgcatgtatgcatgggcataaaggaaaaacaaatactgattggggaagagacttgtctaagttcttatagaaaactagtatttttacttttaagtacttccagtcactcaaattagagcaactaattattcctcatatgcatcgggggacagtgtagcatgtggttacaagtataggcaytggactcttggtcttgggttcagcttactcttctgtcatttattagctgggtgacaatggaaaagttactgartcttttgaggcgtaagtttcctacctataaaatggcaataataatgcttacttcacagggctgttgtaaatattaaaagagttcctgtatggaaaatgtatagtgctgtgtttaataatttataattgttcaaatttgagagtcttaataaacaacttaaaaaaaamccattttttgttaaagaaaatattgaacaaccatcttgtgccaggcacttttttagaacttggtgaaatgaagataaataaggtacaattttaccttcaagacatgcacagaacaataggggagtccagcctttaaataaacagttaatatcraatgtggtccaagctaaaatagaatgcaggggtaggcccaaaaggcgatggctgtccttagtgttgtgcagtgtgcaatccagcccactgaacactgcagtcttgctggtgagagtgaaagagttgatggaagatgaacatagccttcactctgaaccaaaacttgaaggacatgtatcagtccagcaggtagaaaagaaggccatgtcatctttagtgtgggggactggattatcaaagatccaaggatgtgaaagagcagccaacattttgggggctgagaaggcatccctctgaatcaccrggtcaagctagagtttataacaaatggtgggaggtgtgtggagatgtgtatggtaataatggctttcaacagactattggttttctcagtgagaaggcraaagtcaaccctggatcatcccacaactaccttatcacaaagaataaarcagtgcattgccaagtgtgtgccgtagtgtgattgacattccattgctgaggtggggtttgtgtttaatactgactttattttgacacgtcctaatgggtgcatccgcattcgaccaaatcactttctttttgaattttatgctttccttccatgacagataacattgaagttgtgcccttttgggaatcartcctctagatactcctgaattaaaggatcagatagagtaatctgatactttgttcttcttttgcacacacacaccttaaagaagaatgcatcctctatccaaaagcagaagtaagaggaggtgaactcagggtctgctcctcataccttgaatttrtatttgggtcatttttcaaatagagctgatgctgctttagaggagaaggtgacaaccaatctaagatataacaaaaagtttagtcttttttgggaggggtgttggggcctaactctattgcacaagatggagtgcagtggcatgatcatggctcattcagtctccacctcctggctcacgtgatcttcctgccttggtctcccaaagtgctgggattacaggtgtgagccacacacccagccaaaatatatttaatctttttttttttcyagttgagacaggatcttgctctattgcccagactggagtgcactggtacgatcatgactcactacagcctcaacctcctgagctcaagtgatcccacctcagcctcccaagtagctgagactacaggcacatgccamcatgcccagcaaatttttaaattttttgtacggatgggatctcactrtattgcccaggctggtctcaaactcctgggctcgagtgatcctcccgcctcagcctcccaaagtgctgggattatagatgtgagacactgtgcycagggtaatatgtttagcctttatgaagtcttggaaactagattatggtggatatttggctttgccattagaagtagtttaggtatatcataaattttgtaatagctttatattaggaaaggatgtatggtggattaaaatttttttattaaattttttatttacattaattgttttgccactaaattttattagataatttttaatagactttatttttacttttaagactttgatttcttagagcaattttagattcacagtaaaattgagaggaaggtacagagaatttccatatacccctggccccgtgcatgtacaccctcccccactgtcaacatcaccccccgagtggtacatttgttatgattattgaacctacattgacacatcattatcatscagagtccggagtttacattagggcttacttttggtgttgtacattctgtaggtttggacaaatatgatatgctgctatttaacatggctttcagaaggatccaggcctggttcctattgtcagcaaacagtcatgctctgggaaagctgaatgtgmtagggtccctgctcccagaaaccagatagggtctttgctcctagagtttagagaacaggacaaacaagaaacaaagcaaggggaacggcttgtgctgcggtacagaaacaggaaagaacatggaattttcagggaaaggcrgaattcagtttgcactgatgtgtgtgtgtatgtgtgtgtgtgtgttagaattttcagggaaaggcagagttcagtttgcactgatctgtgtgtgtgtgtgtgtgtgtgtgtgtgtgtgtgttggaattttcagggaaaggcagagttyggcttgcattgatctgtgtgtgtgtggaggggaattttcagggaaaggcagagttcagtttgtttgcactgatgtgtgtgtgtgtgtgttgtgtatgtgtgtgtatgaaagggtcgtggaagggaaggagggtaaaggaggaaggggcaggatggagtctgcttttgaagggtttgctgtgtctgcctagggagttttaactagatctataggatagtatttctaaaataagttacaaaggataattaccaccttttgattgtatatactctgctgagcagtttccatatatcagctcatgtagttctcataacaagtctgtgatgtgtccctactcttgctgttcctatgttacagatggggaggctgcagcatagggtgacctgcccacagtcactgggctggtaagttgtgaggccggttcaaaccctggcagctgacgccactgttccagttcccagagacttgtagtgggggagcagggagtatggtaaaatgctttgggaaacattctttcctcaattctgtagtaaaagaaagaaaacggtgttccagtaagtgtttcacagttatcttagccttccagaaaatactcttttgaactatgtggggaataaaacattgctgtgaagtgtaaggtcatcagaggactccaaggaggagcatgacatggttaccttgcatgttaggtaaagaactcagtagmactcagtagtagaaaagagtggggatcggccaggcgtggtggcttgcgcctgtaatctcagcactttgggaggccgaggcaggcggatcacgaggtcaggagatcgagtccatcctggccaacatggtgaaaccccgtccctactaaaatacaaaaattagctgggcgtggtggcacatgcctgtaatcccagctatttgggaggctgagggaggagaatcacttgaaccagggagttggaggttgcagtgaaccaagatcgcgccactgcactccagcttggtgacagagtgagatactgtctcaaaaaaaaaaaaaaraagaaagaaaagagtggggatcagctgggcacagtggctcatgcctgtaatcccagcactttgggaggctgaggcgggcagatcgcctgaagtcaggagttcgagaccagcctggccaacatagtgaaaccccatctctactaaaaatacagaaattacccgggcaaggtggtgcatgcctgtaatcccagccactcaggaggctgaggcaggagaatcgcttgaatctgggaggtggaggttgcagtgaggcgagattgagattgtgccactgcactgcagcctgggtgacagagtgagactctgtctcaaaaaaaaaaaaaaaagaagaaaagagtggggattggaggggaggaacagagatgccagtgggcacaactgtaaacctggcaagaggtcatgagatgaactgcttaggaaaagtgtgttttcattgttttaaagatgagggaaaaatcagggataagttgctgcttgggagctctattaacaaagaaattccagagatataggaagctcagaaaatcagaattccgataatgtcattataatatgtctggatcagtgggtttaacccttttctgcaaatctttggtggaacatggatgtgtaaatggagctgggccttttacagaggagataggatatctggagccctatctcagtttgaaaatatctagcctaggttaagggaaaaagagctaaaacaatggtgccttatgactaattctcacggtttaaaaaagaagtacatgaaaacacagcagagtttagtggctaggaatgtcagcttggaccaaactgcctgagtttgaatcctggttctgccatttactagctatgtaaccttaaatagctactgaagtaccctgtgcctcagttttcttatctgtaaaatggagatggtaatagtagccacctctacaaattgttgggaggattcagagagttagtttttcatagttgccacagtctcacagtgcctggcataggaagcactcgatgtggctgccttctttgcaaaacaccacccaagccatccagcctctgccatgacacttccagagactgggctgtcacccttttgtaagtctgcttgttccatttttagatgactttaattattagaaactggggccaggcctggtagctcacaactatagtcctaacactgggaggccaagatggaaggtcacatgagctcaggggttcaagaccagcctgagaacatagtgagatccatctctacaaaaaaaataaaaaattagccaggcatggtgatgcatgcctgtagtcccagctacttgggagtctgaggcaggaggatcccttgagctcgggagaatgaggctgcagtgagctattaacatactactgcactccagcctgggtgacagagtgaatctctctgtctctctctctctatctctctctctctctctaggtatagatatagatatagatatagatatagatgaaactgtgatcttatattgagttaaaatagcaaagtctttcagttcctcgaacagctaggattaatttaaggttgtgctgtccaatatggtagccacatgtggttatggaacacgtgaaatgtggctattttgaactgaaatgtgtggtaagtgtaaaaacacatcagattttgaagacatagtatgagaaaactaaaatactcattaattatatgtatgtttgagtacaggttgcaatgatattttgaacgtgttttaartaatatttattaaaagtaatttcacttttggtacttttaaatcaatgtggcttctagaagatttaaaattaaatatgtaactcacatttgatttctgctgaacagtgctattctaagaaacgcaargggggcatttaatggtaatagtgagtataagcatcctaataaaatgtaaaaatatgctagaataaccttggctctacttttaacttaacaagtggaagaaggataaatgatataacaaaggcacctgagatacccttcagttcattggtaaaccctatttgaggyagagaactgctgtgaggaaatccagcgctctggagaatggtgactttcataactctcggctctctcctaaggctaagcctaagagccttggtttttaaaagagtgtaaaaaagcttttaaaaaccaaactataatcatttcaaagagtaagtccttatcctctaatttatcccctttttcttttgcaaatttatattttgatctttactaaaagctgttttacccaaagctatcactacagtagaaattttccacattttgctattttcataatgactagagattataaagataagaaacttaacatgcatttcctattatcacataaaagttaacttacatgaagaatatttctgtggtttgatttcatgctaatcttttggcaattaataatttatgtgggatttggggggtactcaattaaatgcaacacctcatgccctggcagataatagtggaattctgctgtattttatagcttgtttaatcacgtcagtatatatgtgtatttgcaaaggattaaaataatcaatgctgattaagaatcgactgaagagtagactgctgggggagatttctcatctttaagttttgtgttgctttttgtctttgtaaaaatgacagtgtgaaacattattagcttaatgtcaatcctagaatgtaatggcaccggcatctccattttctaggtatagagattgtgggtgaactattcgccagtcttaacttgtacgtcttcatctttctgtgtattctaggtgagtcgtacagtctcagaagagtggtttttcttggctatgggacttgcttcttgggtctgtgttactctgcattttcttttcatgtacttttataaagagattggctaggaaaatgaagagggtgcagttgttaattatagatgtgtcagttatagaaatctcagacctacccagagtagaggttgattacacacaagttcttttctaccgttatccaactgatgtacagtggcttattttccaaagccattggaatgtaattgcatgaagtgctatttcagagtctgcttatagtcatcttttgaagtattttccatgcctcagtgaaactgttcgtgcttgtataatatgtaattcatatattttatgtggaagcacaccatttcttaatttacagctgaaatattgggtaagataggcaacctattacaacttaatgcaagatattttaaacttttgcttctggatgagtaactcttcaaaatgcttgagataagatcatggctttaatccttggtaattgccaagactgcatctaaacctcttacaaatagcattaaagtctgtgccattgtcacaaaactggaaaaacaaaaccctcaaaaaatatttcccttttaatagctaaggtgggggattataccatctctttacaaataaatgaacaaacaaataaaaaccaccccaaactactttttaatagattttatttctttagagcagttttagtttcacagcaagattgarcaaaaggtacggagagttcccatatgtcccctgccctcaaaactacttttaagggcccttattctctagaatctttccataataccaaaagatggacattttgacgctgtagtatccacacaccaayctgccactgaagaaactagccgattttttagtatatgcttaaatgtatgtttcctgtgttaaaatgcagtacaccaaaccaaataaatgaggaagctgctcacataaaaatgacattttagtgtggctttccctacttggtttcatcgtagtgcattttttgtaagtggttcagggatgtggttcttgtsyctgaggactggctcttctgtcttcttttctcatcattgcagtaaacttattgcagaactcatggcaccagagctgtgtgttctagttttcttaagaaaactggagcaataaaatgggattcatacctcacccagaggaggtatcatgaggattaaatgagtctggcttacttttggtgcctgagatataaacagaacagatatttcaggcatttactcaggtaatatgatgggatcctcttggtgtcatggagaaggtggtttctatttgcaatcatccaccatgctttcttcaaccatgtggcaatgtttagcagctaagckcagctttcaaaattgagctagagtttaaaytggcaagttaaccacaaaccagcctggtggggtctcagctgggcttgacaggattagtagttccttggataatacacaggaagttgattggtgcacatgctagttgaaatgagagcctaggctctgattccatttcctgtgaggcactgtgtagacgtgggagaataaacatgtgctgtattggactttcaaggcagggtctttctactccagagtaggaaaatagctagaggaagaacgggaggagtagggtgggaatggaaaaggttactttgggcatagcttcaaaaatcagggtggggatggacttttcttcctgctagagaactgaatttgacagttctaaagttaggatgttctggctgtgagtagatacaaactctgtcctccagattacctgcctcycccarttctgccctgcactggacaccccgtttcttccatagttatgtaattatttcactggataattacctggtgagtcaccctgaaatattctgtgtcctctggaaggtgctgtacaacagcagtgataaatttatgccatgaattaggtttttctattagaagtggtttactttgttatttagagctctggctcaagattattgccttactatcatttctcttgtacctcatcatcctcctcaacatatccatatgtgtgtatgcacaggagtgtgtgtatgtgcagctgtagtgtgcattttgtgtgtgttgtatgtgtgcacatacatgttcgtgtgtatatattccatggaatattctttctctgagggatttctggggtggaggtcaggtctggtttaatgatctggatggatgggaatgagaaaaggaaatttaaaatagctttcaagacacagaagcaataaaaattttaaccgttttttaaaatcgattgtagaacatttatgcagttactgtggccctctataatttgaatattactaatttgaatgaagtgtggaccataaaaatatctcccaaatgtcaaaactacttttagtgaaagatgataaatcatggttagcctgttaagcaattgtgaagttgccctctgtttctccactaatgcttataaaagggctcttttccaactttaataattgctgcatagcatgttaattacatatattacataatttattatatggagactcactcctaggcatccaaaataccrtggaataccctcatacagccctgtgttccmtacaggaattcagtataatgcagagctactttggacccttttcagataagtttcttgaattgaatacccaaatgacttcatgttaaggttagcttaagcctacatcatagatctcagaggatagcatcagagtgatgttccagtgtcccaatatcatctctcatgagatcctcaaaatcttagtggaggtatagctttgtgatttttttccttacatcttttaaatatttatgttatttgtagatgttctagcttctacctttgcctgctttttctcattgactcccagataacctctgtttcctgattctctggttcacagagatgtcagtagtgctgatgaaaaagatttatgaggtttacctgctttgatttactgatgatgatgatggtggtggcgatggtggtggtggtggtggtaacaggagtagtagtcgtgcagccgcagcagcaatagaaggtaccacttatgatgtagttacttaccatgtgccatgcaggtgattgacaggcattatctcatttacacctctcagagcctgtgggcaaaagttgtaaccatcatccccattttgcagaggagaaaactctgagagtctagaaggctcaatgacttgtgtaaagttactgagacagtgagtgcaaaagatgggagatggactgacctccaagtctgttttctttctattcagccacatttcatttcctctatgtcatcactcaggttggaacaactaatggactcagtggagctaggaaatgaataatagggtcagaattcatccaagtaagtttgtctaagttgatagaaatataaccttggctctggttggcattttgttgctcaagaaatgcatagatttctgatgtgaacttgtcctttggaacatcatgggagaaagctaatcaaatcattacccccatctcaaagtaaatccatttaaaatatctttaaagcatctgggtctgcagctttatataggcaagggcacgtctggttttctagtaaagtcagagtcatagcttcatgagagattttggtggggttgtggcagggattgatctgtataatgttgagggggcagccagctggagtgggaacatcagcataagaatgcctttggaaattgaacattgtaatgaaaacattcttttgaaggcagatttccaggtgtgctgtaaaccattctaggctataattgagatataaaagaatcttcaaaagcagtgatctattttttggtgattgttgtgctaatcctgaaatcctagcatgaattaatataaaagatgggattgggtgcataaaagtacctgttttaatcatttagcatgttgttcaaaactaaactggtttaggcttcaagtctaagggcgaaaatctcactttcatctaacaaatcccaccataatctgccaagaacagccaccaggggctcctgcagcagctgtgargaggcgatccttcctctctcaaagcttgatatggggagagatttgctgcagttcgtgtataataaagtggaagaggatgatactttttaaagcacacgaaaagagtgaataaattctccgttaaaatctggtactgtatgaaaatattctacagtgcagaagctttcagttggcaggcggttttgtcttaggaattgagtaataagttacattgcagcaggtgcaggagcggtgttggtctttgccagtgtgctccatgtgagatcatgaagcatgcagaaggcacacagaaaaggcagtcttcagatatcaggggaaaagtcagcactatcccttccctgcgcgactccccttacctcacatgggcgctttggtatctgcaagcacaaacagtagtaatgagtagggatactgcatctggatactccatgtatgttacagtagtgtgtggttgtggtttcttttgattagtcccaaagttatatgtcaaagctggatcttatatatgggctggggaacccagggtgggatgcagcatgctggagtctcgtttcttgtgtggccttgggatgcttgtggtgagcatgaactgatgctattttacccttttatctagacgcactactttggcctttggtttctcagcaagagccagcaagcacgatgggtggagctggagaaacctctgaagaaacatctggacaaattcgctaatgagcctttgcttttctttggagtcatgttctatgtgccaaatgtgtcatggcttcagcaagaggccacaaggtaggtgcattttccccctgtgtgccatataagggtgttgactaactgtgaagcttccaatgaagtagatgagctggtagatttaggggtgtgtgggtgtgggtgcgggtgtgtggtgggggagagggtaaaatagttgggggttgtttactcattgctttgcagctttagagttttggttgaatccatgtagctaaccccagcagttttctgtaatgctggtaaggtagtagggatcctgagccaggcagaatttcatctctagcagcgtggaaatattcatcggagactgtgggtaaaataggcatgcaagaatttaataaaaaattaatgacctggccaggcgtggtgtctcatacctgtaatatcaacactttgggaagctgaggtgggaggagagcttgaggccaagagtttgagaccagcctgggcagcatagcaagaccctgtctctacaaaaagaaaaaaatataaaaactagctagacatggtgttttgtgcttttagttccagctcctcgggacactgaggttggaagatcacttgagcccagaagttcaaggctgcagtgagccgtgatcatgccactgtactccagcctgggcaacagactgagaccctgtctcaaaaacaaaaacaaaaacaacaaaaacaaaaacaaaaacctaattctgttttgtccacccttttcctaaaaatatccccaaacaaaatgtggtatcagacttcgaatttgaagattggaaaggtaactaaaagtgggagtaaagttaaggaggaaaatgttgcgagagcaggagttttgatgattgtccctactaaataagaggagacaagaagccatcagtagaagaggagaacmaggtattgcagctactcagtgtctgctttagcttggagaaaccgtgtgctgcctttgaaatgatgttttcccctctcatctgtaaagtgagggatttgtgtaagttcataaagcatattcagtgaatggaataagtgcatttttttgatgttggtatagttcatttattggtaagagttttccattaaaatacctgggaagtctcctcatcaaatggatatttctggtaggaaaaggaatcacataaaccctttactttttgccttttacccggaccttgtcattctgaatgcttgggaagcaatgcgggaacatgctttgaagaaggaagagtattctacctgacttttgtgtagtttttagattttaaatttctgatataaggatgctcttgaaatttttaagtgtattttaaggcaatattctgcttgcttgctttttctttttctttttcttttttttttttaatttgagacggagtcttgctctgtcacccaggctggagtgcagtggcacgatcttggcttactgcagcctccacctcccaggttcaagcgattctcgtgcctcagcctcccgagtggctgggattataggcgcctgccaccacggctggctaatttttgtatttatggtagagacggggtttcaccatgttggccaggctggtctcgaactcctgacctcaaatgatctgcccgccttggccttccaaagtgctaggatgacaggggtgagccactgcgcccggcctctgcttgctttctttaatttggcttttatttatttatttatttatttatttattttgagatagagtcttgctctgtcacttacactggagtgcagtggcacaatcatagttcactgcagccacaaactcctgggctcccgcaatcctcctgcgtcagcctcctgagtagctgggactacaggcatgtgccaccaagcctggctaaattttcttctaattttgtagagatgaagtctcgctgtatttcccaggctgtcttgaactcctggcctcaggtgatccttctaccttggcctmccaaagtgcttatttttttcactttcgttctttccttttttttttatttttatttttaaatcaaaaggtattgtaagtagatggcataattgcaaacagaggccgtgagttagcttacagcttgatccaaaaaacctagtgttcagtttttcatgtgatagacatttaaagcactctgttgcataccattgctccctgttttcaagttgattcacatatccaagttcttcctgtacaaaaaattattaactcctcaaaatgtgatgatttccgttggcttttgaatcctccttgagtactttacacggtgctaggaacacagcattaagttaataaatacttgctgattcttggctctcggccattaagtgcaaggtaatgagtgatgagggtgaaacrtggactagaaattagtgyatattgaaaaaagttctgtctgtaagaaaaatgaagtattgttactctagacagacctatcctgtaaggcctattggtgagaaagagcagttgaaataaagagggactcagaagttatgctttatgaagttaaaagaaaaaggttgtttaagcttagaaaaattaagtcggccgggcgcggtggctcacgcctgtaatcccagcactttgggaggccgaggcgggcggatcacgaggtcaggagatcgagaccatcctggctaacaccgtgaaaccccgtctctactaaaaatacaaaaaattagccgggcgtggtggtgggcgcctgtagtcccagctactcgggaggctgaggcaggagaatggcatgaacccaagaggcggagcttgcagtgagccgggatagcgccactgcagtccagcttgggcgaaagagtgagactccgtctcaaaaaaaaaaaaaaaaaaaaaaagaaaaattaagtcttacaagggcacagtagtagctgcctttagatatttacagactgttgtaggagggggaattctttgtcagttctggagcacaaaattaaggtctaagtaagtgaagtccaaggagccaaagaactttgactatttggctcaatgtaggaatacagtttctagtaactaagccatctaaaaatggaacaagacttacaaaagggtgagagcactggtctctgtgaatgttgtcacgtggaccaggtagcccatgtggtatcctgtagagggagccaccatattgggtaggatgttggaatagatcagtggttctcaaaagaccagggcctgctgtatcatagttacctggagcacttataaatatgattctagagctgtaccagaagtctggttgtaatgtctagagctgagaatcaagaggatgttattgtttaaaatgaataggccgggcagtgtctgacacacggtggctcacgcctgtaatcccagcactttgggagaccgaggcgggcggatcacgaggtcaggagatcgagaccatcctggctaacatggtgaaacccgatctctactaaaaaaatacaaaaaaaaaaaaaaaaaaagtttatctttagagtcacctgcatttagcaagtagtccnnnnnnnnnnnnnnnnnnnnaaaaaaaaaatacttggaagaagttttacaggactacttcctccctgccttaggatatttacagactgttgtaggagggggaattctttgtcagttctggagcacaaaattattttttaagtaagtgaagtccaaggagccaaagaacagtttattttttttttttaagaagacagattttttttactaacccatctaaaaatggaacaagacttacaaaatggtgagagcatttttttttgtgaatgtgcacgtggaccaggtagcccatgtggtatcctgtagagggagccaccatattgggtaggatgttggaatagatcagtggttctcaaaagaccagggcctgctgtatcatagttacctggagcacttataaatatgattctagagctgtaccagaagtctggttgtaatgtctagagctgagaatcaagaggatgttattgtttaaaatgaataggccgggcagtgtctgacacacggtggctcacgcctgtaatcccagcactttgggagaccgaggcgggcggatcacgaggtcaggagatcgagaccatcctggctaacatggtgaaacccgatctctactaaaaaaatacaaaaaaaaaaaaaaaaaattagcccggcttggttgggggcacctgtagtcccagctacgcgggagtctgaggcaggagaatggcgtgaacctgggaggcggagcttgcagtgagccgagatcgcgccactgcactccagcctgggcgatagagcgagattccatctcaaaaaagagaaaatgaatagtactcctctggtgtttctgacactcacccagcctcaggaatcaatgaatcagttaacctctaaaactctttacaattttagattttccaaggaagtaaacttaatgctgcattgtttgactgtcaatgtttgcattcatagactaaaacaaaaggtatttaaatttcaaagagggaggtatagagtaaaaagttttggtagtggtggttattaactgtgggatttaggaaggacttttcttttttctttagaatttctttttgcttaattagcctggtttatttcagatgaaggttgataaggagggaaagaagtgttttccaacacaggattttgaagcaaactgtgttgctgacatttgatcagaaaaactaacaaaaaattttaaactttgaaagatatttttagatttaagcgctggaactaaattatgtagatttcaggtctaaccaactctttatggcaaagaatgttgaaagttaggagttggattagcatgcaacattttgtctgtgcgtgagtatgtgtgtatgtttgcagcattgcagaaatttttgttgcctccaaggggccctaaaactggaatgtgccaaggggtgtcagagtgagtaaaagatttaagctgggaatatggaggaacatgagaaaaaaaaaatgtaagaaatcaaagaaaagttgttaggaagaaaagaataaaggaattacatttatttgggaaggttgagggccaccaacaacgatcaggtgtgattcagcaagacatgccgtaggttgtaggcttatggactagagaataaaggagatctggtttggacagaataacatttttaaatgcttgagttttctcggtgtggtgttggagatggacagatgtgctcaacacaaggtgaaaaatgctacagtccttaagagcctttgggaatctcagccttcttgggaggttttagcagcatctgaggtccgaactgaatattgaaactgccttccaggcagctcagccaaggggaagcagtggtggtggggcaggattccagaggaatgtttcacagaaggccccaacaacattcattaggagcgggttaatgactaactctccagtcatccgctgttatcccagttaccaggcatctcaggtggagatgggctttggcatctctgagagcacctgggatctgcagtgtctgacacaaaacagttagtctttgtgatgccctgcagagtaagatatttgcatagattagaaatagaaatctgtctttcatttgcgggcaacccgttggaggaggcaaccattcagccatctgtgctgaaaaaaataagcctttgtctggagccaaccaaacttgttttcatccaacacatgtttgcaatggtttggctacttctgtttgagaacaggttctatagcattagtcatgaccagccatttcttctctctgaacaaggacaaagagtctagattaatactctggttgggttttccttttttttttgctgtgtatatgaacccatatatatatcaagacacataggagtcaaaggaaaatacatttaaaagctgtttatttaatttgttgtccccagagaatcacacccatggaaatttttaggtcagtagtgtattcagaacaacacaacaaaaatttgagagtgacattgattgcaaattgtttaataaagtgattggctttattaaaattatcaagtccaaattggtttaaattagaaaattaggaggcactgctttttttgacattaatttgacatactgtgtctcatctgctagatatggcttttgaggggcaagtcccttcataagtgagggaaacctgccaagacactatgattgtgttggataagaaatggataactcaggccctactttaaggtgttaattgaatgagaaaacaaaatatattaaaaggaaaatacacacagggctacaaataaaaggaaaaaagaagaaatcccttgatattgttatagaaatgttaaaagaaaatagtgaaaagaaggacacactctggtagacagatgggggatgagtcatgaaaccataggatttaaagagattaagaaccaccgagtttgttaaccccaaactgtaagatttattaccttggggctttgaaaatgttagttttcccctgttggttaaaatgactcaagggatgggaccactgtaattttttccattttgctttgcttctcagattcctttttgccagcttttctgtccagcaaagggactcttgagcagttcatcttccccagcrtgttctcctgactcaaaggaaagatttttgtaatgtgttttaatgatttgcatagcaacaggctcattataaacacatggttttcacatttttctggacacggaaagaaaaaagatggcttctgagaggtggataaattcttactcaaacagaaggatacttaataatagcaaggggaagccagaaaattgctkkccaagatcactgcttttagtttaggtctggggtttttccaagtcttcctcaagcatggaagtccctctttaatttcttcaatactaaagagaaaacttttaaaagaaaacttaatttttgaagagtgaatttaggctacaaacttctaagttgctgagtgcatgcatggtttctaaaatttttaattttgtgtktttttttttttttaaccaaaacatgtttgtctttgcattactcactgttgaatgttatggttgcacagtgcacaggagcttctaattgtcctaatgaggtcagataacatttcctacttttccaggacatcttagtarcctgcctgtttgggtggggctgtccaccctattaatggtgagcactctacagaattgacagagtgcaactactgctgtagccagcacggtcattccatttgccaaggatgattttagtacactgtcgtacatctggcagacacatcaggcccacaggacctgttccaagtaccctctatctggtggatgctatgtctgttttcggtgcttctcagcagctatgggtatcccctactcttaggatcagtgatctattgtacatctcccagttcttccaaagtcctgggtattctagtcagccaggtaaaactgcctagcagttatcaccaggaggatttttaaaatacttaatctctgtatgggcttgcatggagcattcttaaatgttaaagatagttcctgtctgggaagaaccaagtggacaggttgtctttcaaccaactgagaataaatacccacatttaaagctgtgctgtttaggtaccagaaagagggtaagtgcatttcagcgtgtgaagtgagtgacaagggagttaggttaatgcatttttaaactatgatgggggtcccctttttccagttacrtatttgggcccatggcatgttgatgggaaagccagactaagtgaagctgtatatcttcataagggttaaaatggtgttttggtgtgtgcatgtgtgtgtctctctgtgtgtgtgcatgtgtgtgcttaaactaggtttcaggaagtgaccttacagtagctttcttcacattttctttcttataaataccaatacttttcccccttagactcctgcaatctgccttgtgtgctgttgtaaacaagttagtgttcaaccagtgtttaaagtgtctgttttaaaagctctaattatggtagtatttccatttccttttacaacaccctttattttgttcctccagttcttttagttcttttattattttgaaatgtcattttactggatatttaaagtctacccgtgggctgggatacagggactcccttcaagtcttaagattaagcatgaattccctgtggataatataatttgctgagaatagcaaattctcctcctggccagctccagctagtgaatgggaaattgttctctttatgttggttattgagaatggaattatttctgccagatattttagatattttaagatgcagttgacattgggatctaatctcaaacattctgtgtggttaatgtaatgtacaatgtgatgagagaagatggctgtctgtaataaacagtgcaaccttggagggaagaagaattaccttcccaaaatgagataagttgattgtcatttgcattgttttttatttcaacctttattaagtacctattctgtgttagacactttgctagttagtgggaatgtaataacaaataggtctcaactccccacctccctcccactctcactcccaccacagagctgtatctccaagcagcttttatttcatttccgtgtatttgatttactagaagtttatttgaatttgtctttaacgtctacattgctgaccctatttacttccaggagaaggcaatgccactgctttggtgaaacccaagggcaaatgtctcctgggaccaggaccagcttcatgggtctgtgacctgtgyagttagttgcacagtaccccatgctcagaagtgccctgtagttggtttagtgctctgctgttgccatcctgaagttttttggtttttcaacagtggattctgcattttcactttgcgctagactctgcaaattaagtaaccagcccttcccaggacaaggacagcctcctgttcctcatacatgcatctctgttcgttcacctctgcttgttttgttgttatcttgcgatttattcttaagtatcggtggatttactgatttgaatctactgttatgggtgtgatcaaagagaaaaagtaaatttaataaaccctcaagggaacaaaactaaaattttcactgtctttgcaaataagaaaatagaaatgtagcgctggtaaccatttctgcttctggatctgactcactgggaaatccttgcaggaattggggaggtggtgtaaagtcaatttgatttcttttaggaaagctgattggattagcttgtcttgatcctcaactaggattttcttatgttttactgtgaagaagactataaatcaagactatacagtagatgcctacttcatagtacaagttgtccaaatacatgaagttgcttcttgtttctttctttgctcttaagaaaaagatatggtgtgaaagatatgcagttaggctgggcgcggtggttcacgcctgtaatcccagcactttgggaggctgaggcgggtggatcacttgaggtcgggagttcgagaccagtctgaccaatgtggagaaaccctgtctctactaaaagtacaaaattagcctggcatggtggcacatacctgtaatcccagctactcaggaggctgaggcgggagaatcgcttgaacccaggagcaagaggttgtggtgagcggagatcgcaccatagcactccagtctgggcaacaagagtgaaactccgtctcaaagagaaaaaaaaaaaaaagaaagctatgcagttaggtagttagctattgaggcaacctactgctactagaacaatgaagtatagacaaataagatgaagttaacttagccgaagttaacttagccgtaaacataatctagctgtttctctgatattctttccctttagggaaaacaaatagtaaaataaatcagtgttcttttgtaatatcacttggcataacttattatttattgtaggtgtcctataatgaagaggaaactcagaatttcaaaaggaaataaatcagaggcattattcgtatttcaaaaggagtcttcatgtaatgtttgtgttctttaatgcatctgagatgtttgattgagatgctttataaagcaagatatgcttatacgtatgttttagccattagaaaaacaaagtttaccaaaaaaataggttgagcatccctaattcaaaaattcaaaatctataatgtaccaaaattgaaaactttttgagcaccaacatgatgctcaaaggaaatgctcgttgaagcattcaggatttctgatttttggatgagagatgctctactgggtaagtatagcaaatatttcaaaatctgaaatcccaaacacttctcgtccctaacattttgcataaggggtactaacctgtttagtatacttcaaagaagtgataattttattattacatctttaaatcacatggttaatgtgttagtatttggtctatttggaacttttctcaaaagcaaacaaaaataatgtgctattgagctattttgaaaataagttcttaagcagaggtattgatttttatcctttgtgaattccttgattttcaaagatacattcattcatttgttcattcattcattgattccaaattgttctttattagtgttacattgcaggactgagaaagattaaacaattgaacccatgaaataataaagatttgtaatagagcatgagtyaaaatgttaaaatagtctactttttctaaagcttgagtagaatacgatgatgccacattgtagtgtttacctttaacaaaggtgtgaaaagaagggggaaaaacaacagaagctatatgaagaggtgttttgtcatgttgaagcatgcaggctgtgccttatgaatttttaagagacatccgcttcccataaaggattctcaagattgtaggggtatcattacaatgggtgggattgagaatggtgtgtcaatttcaaaaatggattttaaaaaaaatcttgacgttggaagaggtgcaaagaatagatgttttataattgtttgctctaccttttttcctgaatatcagcattgggacattcagttggagtggagtgggtggagaggaaggaagtgacagatgtgctacatccacacgttaaagaaacttacagtgtctgagcagcagcagaatctagaaagcacaagaatccaaaacctcaaaacttccccagcctgaggatattatagttctgtgtggttctgtggaaaaatgtagttgcgttccatcaccggatataatgtaacagtagtagtcatggtagcagctaacatttatgtgcaagatgctatgctaagtatctcagattattatctttttcagtcttcactagaactctataaagtgggcaccctgaaaaagaactgtttgttttttaaataacagaagttttttctctaacaagtggagtagatttaggtcatcacataaatggagtcttttatattactttgccagagaaatacatccgttcatgcctttcttcactggctttatcagagtaacagggagtttagttccataaaaagtcaacaaagaaatccagagggctgacctaccagtaagatcagagattattaactagtactatgagggctgattctggtcttcaggtgggttttgtttcaccaggatcatttttgaaagaactgaattgggacgccttgcagagaggcatgtgctgtctaactgggcctagttctccactccctagggagttaatagtcagcagcatttacacattcttgtgacctgtctggccttgtaggtatttaggtcctgactgccgatacttgcactttctgtataacttgaagtgcatctcagtacttgggtcagcccatatctcttcattgacccagttgattttatgtcattcagtgtccagctgtattaacactttagctgcctataagagactgtaggtggttgagctgagtgtgagagtataacttccctaagtgctcatttgaaaactttatttctgtgtaaagatcactccggagggctagattatatgtccctgtcaactttctactgcagagccatggctcaaattattcagatttcctctctttattgctcacaatatctgtctcatctctgattacccataaaaggttcatgcatagaaagagtaccaagcgtcttataggccaataaagacatcattcaaatcttaaacaaacacagcctatttgagaaagagccctttgccttatatcaagacagaccagaatgatagagttttatatctaaatatgagaccccacatatcaataaatcacagagaccagttgctttgttttacagatgaagaaactgagaaacagacagataaagggactctgcccatagtcacacagctgtttagtgacaagcctggctcttaagctggttctggaatggttttaggtgaaccaagcatgctgacatgggagagcccatagataggatttatttaaacgttcaaaaagtctttgccaatcctcccctcccctccccttagctgtaacagctaagacacactgtggaattggaagggatgagttttgtcaaagagaaggaagtagttcagacagaagaaacaaagggtagagggaaacaggcacttctttgagtgagtcctttaaatagcgagcattatgtagagagtggaactaaaatgggttttatttaacgtctttatcagtgatctccagccctgggcacatagtgaaagtgccaagctttcagatgacactgagtcctttagaagggtggaaaattgagacattgcaagtaaacagtagaaaggtgtcagcaggtgtcaagttaccaggtgtgactcaaataatgatactgctttctggtgtactttgtaaaagcagaggaggcgtaatcatagcgggacatgttgcaacatgtttcggtttacagcctcctaactctcaaggtcagctcgtcaatcttgtgcttgcagctggggagagtgagtagacatttcgcctgacgtttgctgccagcataaaaatgagttaccgttattcagagcaaatcccagcaactttgacgtaagtttaactgaaatgygagttagacacatggtcctttagtagaaaatcacagagatgaagcaatgttggaagcaaatgcttttgaccagcataaatgttttgaagaaggtagaaaagatagatgtttatgacagtgactaatgtgagaaacccataggtctaactaaggaaaacatgaaaaaggtcggtaatttggatccttgaaataaaatggccaactgtgaaaagatagctactgatgaggatactgatggaaaatttgaagcaagttatgtatctgctagagctctgtatgttttgaatgattgttggaatcagcaaataactagtattttttggtttaatcttcaaggaaaataatagctggaaataaaacaataaaaaaaacactacaaaggagaacatacattaatgtgggaagtagggggaaaaaaaggaaaaagaaggagaacagacttgaagacctcactctctggtgtttgtttcttggtcaggctctgtaaactccccaaaattaagttcttgtgtttagaatcaggagatgatgctagcatagctattgtaaggatgagttcagaaagcatttgccattgtgcttagcatatagtaggtcttcaaataatatttgttttttttaaatgaaaagatatactagaaggtagcaggaaactgctgcatccctcagagagctgtgctggtatcagtcacctggcagaagattctctgtgacccacactaaccagaaacataggggaagaacattctgggaaatggagtgcagcctagtcaggttgagacattacaatgccactgtgaggcttcgtacattattaatgattagtaaaacccaaatcactgtaaaccataccctactagaaactctactgagtacaaattttgtactgactggcgatttccaaaattcagaattactccctcaaaacaaatgatttgatattattgaagataacttcaaatttgtccctaattccctcaggcaattcccaaaagtggaattgcaaacaataatttaagcaaacattttgtgttattatcatagacatgtattcccagggaggttccccaccctcattccagtcccatatgagggagcagatctgctgcagaggacgcggcctggtgctttgtcctgtgccgagtgtaggaaggctaaggttatcaggcccgagcaaggagacaggataaagcgggccttgcctcacagcttcccagatggtcagagcagctgttcagaacagggaagccaggttggctgccacaggacgggccaggctgacccaatggtaatctcacagtacttgtaacttgaagagactgtagtctgaaaagataaacagattccagtgaaagattatttaaagagatgatagactcctgatgagtgacagttatttaaaaaataaaaataagacattgggagcctgttggttctttgagtgtggtcttcacactacgtgcatcagtattgcctatggcattttaaaaaatatgtaggttattgtaccccagtcctgactccctgaatcaaaatctgtttttgatcattgccatgggtgattcttatcatttaagtttggttaaatggaagacaactgtatcctgatgtcttttcagctgtagctggtcttttctgttagtagatggatgttggagaatctcaggggggattttggggaactgggaaggaattaaagagttgcaaagcttaaaacatttggttcaggctgaggaatttagagaatagatggcgtggtcttatttagtagaaaaattgtgggcgtcttcctggggatcctagaaggaacagaatggagaatccaaggttcttctgtagcaattttgtacagtttgattgtatttcctctctttcagaatattttagccttctaggtagttcaacttctgtaatgcacaatagattatgcataatataatgagtaatacatctcmtaaataggtttaggggatatatyaaatactatttattgcataagaatttagccttttgtgcatcctttatttattattaaatttattattcctataagaataataaaaactggcctgaattatactactctaggaccctaaaaccttaaacacaacttcccactgtttctgcaggctttgaagttacagattgaattttaatttttaaagtgagaattttgcaaaactgagaattctacatatggatttcagtaattcttttgccactgtctgatttattgatatttactgcatttaggtaagtgtaagatgaaataataggtaaattaagaaaaaaataaaataatttcagccaaataaaattcaaggttgtgaaaacattatttctttccattatcagttatttgaaaaaatattatttctggcactggttcatgaaatacttgatttcaactaccaactagaagtacactatatttaagtaaaaaaaaaaaaatacagagaggcttggttctagatagcagttatcttaattttccagacatctgtgactacttccttactatatacattgagagattttgtgtgttgcatttgcatgcatacaagcacacccatgattttgtgatgtgctgactcttgttaagagtacttgaaaagcattttttttttttttttgagacggagtctttctctgttgcccaggctggagtgcaatggtgcgatctcggctcactgcaacctccgcctcccgggttcaagtgattctcctgcctcagcctccccagtagctgggattacaggcgcccaccaccatgcccagctaatttttttagagaaggggtttcaccatgttggccagctggtcttgaactcctgacctcaggtgatctgcccgcctcagcctcccaaagtgctgggattacaggcatgagccactgtacccagccctaactgtctttaaccaaaaatctcacacttactttaaaaaatatggtttcaaaatattttatccaccacaagttggcaaatggcaggtaaaagaaaactgtattttttttttaactttattttagatacaggggtatacgtgtgggtttgttatataggtaaattgtgtgtcacgggagtttagtgtacagattatttcatcacccgggcaataagcatagcacctgataagtagtttttcaatccttaccctcctctcaccctccatcctcaagtaggccctggtgtttgttattcccttctttgtgcccatgtgttctagatgtttagctcccacttaaaagtgagaacatgcggtatttggttttctgttcctatgttagctcacttaggataatgacctccacctgcatccatgttgctgcagaggacatgatcttgtcattttttgtggctgcatagtattccatggtgtatatgtaacatattttctttatccagtctaccaccgatggatatttaggttgattccatgtctttgctattgtgaatggtgctgcagtgaacgtacatgtgcatgtgtctttataatggaatgatttatattgctttgggtatataccccataatgagattgctgggtcgaatggaaattctgccttaagttctttgagaaatcgccaaactgctttctaccatggctgatttaccatgactaatttacattcccmccagcagtgtataagcattcccttttctcagttattttttgactttttaataatagccattctgactgatgtaaggtggtgtatacctcatggtggttttgatttgcatttctgtaatgattagtggtgatgagcattttttcttatgcttgttggccacatatatgtcttcttctgaaaagtattcatgtcctttgcccactttttaatgggattgtttgttttttccttgttaatttgaaaatctgtattgtttacacccagttcactgaatacttttttttttaaagggtttcatgaactatttaaccattatactctaaagcaggcatttttcctttctggtttaaaatgattattttctaatttaggacattgtataattataacataattataactagaatatgattagaacttcacttaaagctttgaacatctaaagaagaatggtgggttgaattacggatattgttgcctgttgctctgtgatacttgcattttatctcaacacacacacacacacacgcacacacacacacagcagacacactaccggactgaaccattttacttcttttcatcctggcccaatatataaataattgattagagagcattaaagtaggtgagggggaatcaatttcacttttgataacgggaatgaagtactcctatatttttaattgtctagatcaagtttgtgcaacccgcagcctgcgggccacatgcagcctaggatggctttgaatgcagcccaatacaaattcacatgggcattgtacagattctcctcttgtggctttcacttaagaaacagaattttgtaaggataagggcgttacaaatcatcaaattgaatccctctttcaagaaaccagtctcatagtcacatgattattgaccagggcaaagaagtccaggcatgtgcttttggaatggcatcctgtgccacatcctccactaaacatgtttcgccgtgggtccctctcccaccctgtgtgcagcccaaagaccgactccctattctgctctcggttcttccaccttttctctgggtcctcaacacttcatccagggcgactccaatttcatgtaattttcaaatatctttaatatctgcttctcatagattccttgcttttgatttccaaccacactttgctttttctatattaaaaattaaccacaaaatatttcacacttttatacttcctaattactatttaatatctctactaccattggatgccttttcttttttttttcttttgatttactttctgttaacttactcattgctttcatcagtttttatctgttccttcttgagtccttgaaaaagcatgtccatcgttgattttgcttatatttgcctcttgaaggttaccagaggacactgccagccctgggccaggggccttttctcacttttagacaacgttagacatggagagcccactcctcaaaatcctctctttccttggcttttggtgaccttcaccttatctcatctctgacctgcctattttcatcttgcaatctccaatttactggaaccctgtccttctaattttttccctctttatatttgctgtgcaatacagctcaattgtctttagcctttagaagtacttttttgggtttttcttgagacagggtcttactctgttgcccaggctggagtacagtggcacaatcacagctcactgcagccctaaactcctgggctcaagtgaacctcccacctcagcctcccaagtaactgggagcacaggcatgcaccaccatgcctggctaaattttttgagttttttttttttttttgtgtgtgtgtgtgtgtgtgtgtgtgtggaaataatgtctcactatgttgcccaggctggtctagaacccctcggctcaagcagtcgtcctgcctcagcctctcaaagtgctagagctacaggcatgagctaccacgcccagctctagaagtaatttttgacagatgtggcctaactttgtaccatttacccacattttattcttgatttcttgctgacagaagacagtcattcattcgtttatatattgaatatctgctgtgtgctgggaactggacgtataagcagaatacaacctttttcttaagcgtatatttatggcccctctgcttgttgttacattcttgcttcagtgtcctcagagtggtgatgacgactatttgtcaatcatctctacccacaatactctggctcaatcaatccttgtaggaatcagaaaggtagacagtgatgaactgttagttacttgctgccttctcttgattttaaatcctcccttaaatatcccatttttctataagtagctctaagattctttcactgtcacaaattgcaaatctgtcaccagagccccccacttcctcatgtcatttgttacactagaccctgccagtttcttcaagctccacctctgcttggtagacattttccatacttggagtcaaattgttgtctttgtgctagtagtcattttttaagataggctttttggtgaaatataacatatgcacagacaagtgcaaaaatgaaaagtgaggccgggctcacacctgtaatcccagcactttgggaggctgaggtggatggatcatgaggtcaggagatgaagaccatcctggcaaacactgggaaaccctgtctctactaaaaatacaaaaaaatagccgggcgtggtggtgggcgcctgtagtcctagctactcaggaggctgaggcaggagaatggtgtgaacctgggaggcagagcttgcagtgaaccgagatcgtgccactgcactccagcctgggcgacagatgagactgtaagaaaagtgtacagctcaatgaatctttgtaaagtgaacacacccatgcagtcagtcactagttcaagaatcagagcatcaccagccactcagaatccttcattgtgctccctctcagtgtttatggatcaggataaccatgatcctgaattctaatatcatatattagttttgcttttcttttaaaaaaaactttttaggtagagtaatacagtatatgctctttgatgtcttacttcattgatcaacattttgtgagtcatctatattgttgtgtatagagatcattcattttcattgctgcttaatattctatcaaaggaagacatacattacaatttacccattctacaaaggacatttgaattgtttacatttgggagctattacaaatggaactgtgttgctgtgaacatttctagtacatgtcttatggacagtctcacacaggctctcatgaatgtacttatttctgctgaatatgcatatgctagttagtagttttccaaaaattgtattactgccagcgaaatgaaaagcaaattgtaaggctgagaaatcttaaatacttggtcttatgtttcttttttctttctttctgtattgaatttgttattcattaaacaaatgttaagtaccttttatgtttgaggctctcaagggatatcagtaatcataaaagcaagtattgtggcatttatttagttgcaaatcctactgatttttttttttcttgagacagggtcttgttctttcatccaggctgtagtgcagtgttgcaatcatagctcactgaagcctcctggcccatagttcctggcccaggagatcctcctacctcagcctgggtgtagctgggactacaggcatgtgccaccatgcctggctaattttttaaaaacttttttgtagatacaagatctcactgtattgctcaggttggtcttgaactcctgggctcaagcaatccttctgccttggcctcccaaagtgctaggattataggcgtgagccactgcgcttggctgatctttcttaatattaacaatgatgactcctgacatttcatgagtgtttatggccaagcacaattctaagctcttcatccatattaacccatttagcccttgtaacaactttttgagttagtactattattctgatttcacagaataggaaactaaggcacagagaggttgagtaacttgcccgcacagtttgagtacatgacagagctgtgatccaagcctacacagtgtagctccagaatccacacatttaccactatgtgccgtacctttccagttaaatccattctagtccgctgtgcccccaatttatgtcttcttacctccagccttaaatataacgaaatggtaaagagcacaggctttacagtcagacagacttggatttgaattctgctctgccattcactctttgtatgttcaggtgagttatttatccttcttaagactcagtttctccatgaacagaagctcttgtgaagattatactggttaataaacagaaaagcacactttgtagtacctaacactatcatcattattatttgacctcccaatttgtatctgtaccacccatttatataatgtggtgtacataccaactctaaagcatccttctaaaggattgctttcatcattttccttcctttgtcaaaaatacataatgtcttaccattgcttagaagataaagacagacatccagaggcatttgaagcatggcaagcctctgtcttcctttttgtcttctgcttccttacatagccctattttacttgtctgtgccgttcaatgtctctggacaccctgggtttctcacttcttcctctgctctttgcagtacttgaagtatctcccttttcctctttccttcttgccttagaagcctcctttgccttccagactcacctctgggcattcattcaacacattaattattttcaaagtataaggtattctgcaagatatagagtggcacaagatgtcagtcctgtcctgaatggggytttcaatctatttgggtagattagatggtcacataaaaatatttgagcaacatattagtatgtgttggatgccagctgaaggtacctttcatgggtggaatgataaggaggagctttggagacgggcattattcagtgatctccagagaaacagaactaatgagatgtrtatgtaaatagggagagaaacttattttaaggaattggctcacataaatggagagacttgacaaatgcaaaatctgcagggcaggccagcaggctggagacccagggaagattgmagttcaagtccaaacacaaattcttccttctgcgtggtccatcttttctctgtaagaccttcaactgattggacgagacccattcatattgtgacaagcattctgctttactcaaagtctactgatttaaatgtgttaatctcatcaaaaaataccttcacagaagcatctagaaaaatgaccaaatatatggatatcgtggcctagccaaattgacacataaaattaaccatgacaagagatgtccctggaattggggctttgaagaagacattggattttggtgagtcagcattgttaggcaggaaaacagcctggaccaggggctataagcctgttatctctcccaaatacctaaagcggtagctcccatcagtatcaagggctcactgatggatgagcggaaagtgtgaagggagaacattccgagccaaggaaattatgtaagaggggaggaaaattgcaatgcaaartcctcaaggatacctagaatgtggtaggaagcaaataatcgtagcacagttagccctggatttatatttcagctaaagaatttcttaaagttcaaggtttccctattactgttgggtcacacgttcacaggatgaaatctccttctgtatcttgaaactaagtcatgcaatttcttctttagaattttaatctgatgaggtcattaaggaaraatattttcttaatctagaattcccagtatgttcattataaaataaattccttttctttcttctcataaaaccctgttttgaaaaaatgtatctacctttagtacttcctaaaattattttgtcaaataccctatattgatccttagcatgaagtaagtagtgtaacttaacacaattttacataattaatattctagttggcttggacagcccattttgggcaaaatatcaaggatttttcattcattgttcatgcatgcattcaataagtttacttgaagaccatttgggggataaaaaaataaatatttactgagcatctgttatatacaaggaaacttctggttactggtaatacagcactgaacaaaacagatgaagtccttgatctcctgaaagtcaccttttttcaaatatttgtagtagtttatgactgtcaatgtttttacagagttcaaattaagaattataaaagcatgtagtactctagctatctgaatcatcaaaatcagctaccaaattgtattctctcaaacaattgtgaaacaatgcattttaaatactaaataatagcttgttttcatgtaatattattacagatctccttcactgagaagataataaacatatagaagatggtcatgtgaacatatctatttctgggtggtaaactataaaggagtccattatgtttattcttatttgcatatacttatgatcatattcttctttagacttaaatctgtgatcatgacttttatgaggaaatcatcctgtctataagcatggtcatgcctttaagaattcatgaaaattatacggaacgggctaacatgaaaaagtgaggcaatatttgggatttcattctgtgaggaaaatgtactggacttagtttactaatgtaaagtcggtggtggctctaggtgagttttcatagaaacaagaaacttcagatggcagaaatgcatggcttagtaactatattattaattgcacaaacttgttttttctccccartctttttagtgcatgccttttgatcaagttatactgcaaagaccatttttaaagttacaaaaaatgatgatgtttttaaagtgtagtggtttgataatagggctcaagtgggaagaaaggaaataccctttatttgggccttccagagattttgccaaaccctgggtgagagcagtgtttcatttcctgattcctaccacctgtccacttattcactgcacatttactacatggtctctttgccattcttaatctggactcaaaagtcaaataatagaaatcagagggaaatatgtgtggacttcgttctataaagatagttcttttacaaaaataggcagaggatttgagggacaaggaagaggaagaagatgataaaaaggaaaagggagaatccattactatatcaaagatacttcctcttttaaaatgattagataaaatgtttgactgacgtggtttgatgactattttgaatatgtaggttttaatgaaagattatgtggttataatttttagaagacagtcaaatccgttttccccaaatctgttttgtctgtcagttttcaaaaagtgagaagtctttatctgaaaggtytagtttagttgctcaggccaaaaatcttgcagtcatccttgaattctttctcccatacaccacatccagccttcagaatatgtctggattctgactacttccttctgcgtycactgtaacctctctaatccagtctgctgtcattttttctgactggcatttccgcttccacccttgcccctcccagtccagtgtctacaaagcagccagtaccatcttgttaaatgggtgcctgtttatgcagctcctttgctcagtaccttccactggtttcccatcttactgtcgtcagaacccttaccgtgccctgcgaggccttttgtggtttgtaccacttcctgccttttctgtcagcccaacgattcatcctcttgctcactctttgctacattgacctcttgaacattcatgaatgcacgacactagctctcctgaaagcctytctacttgccattccctttgtttgaagtgaaaacctccatcccccaaatatccacatggctagctcctcatttttttttcagatctttgctcagagttcgcttttattagagaaacctttcttgaccacctcctaccttgctactctctgtgtctcttgcctgcttttttctcattggacctattgtttatttacttgatttttgcttgtcttccccactagactgtgagctccatgagcaagagcagagaatgggtttgttttgttcactgtgatatccctagtgcctagaataactcctggcatgtagtaggtgctcattaagcttttgtcaaatatgaatgaataaataatggaatatatgtatgtatatacttctgatattttaccagtaaactaagttsgtttactttttaaatgaaagtrctataaaaggataagaaatcattatactaatttaatagaatctgacagcttttataatgatttctattcaatacattttrtgctggtttcatgaacattaacaaattataggaggccttatattttctgcaatcataatttttttttttttttttttttttttgagatggagactcactctgtcgccaagctggagtgcagtggcacgatctcggctcactgcaaactccaactccctggttcaagtgattctcctgccttagcctcccgagcagctgggactataggcatgcacaccatgcctggctaatttttgtatttttagtagagatggggttttaccaggttggccaggatggtctcgatctcctgaccttgtgatccgcccgcctcggccccacaaagtgctgggattacaggcgtgagccaccacgctggcctgtaatcataattttttttaggagaagcctgctgagatttttttattttatttttgtttttaaagagagaatttgaatacctacttagtacttctyttctggagagtgctctcctttgaatatggcctgatgcccgcagggtgtgccccgtacagccactgactgccccacactggcatcttccctgggcttcacgcccctgaatttttggttcctaaagagacatttaatgcgctcctattctggtttctaatgagagagttttaagttcttaagtctaggatgaaaaggaggagtgtgtttgtagcagccttctttcatgaaatgaaagaattgaagaatttctctgatttgggaattatagttctctgcttggcaatcctccatccctctacccatgtcctaaacaaaaggtttcctatatttatgtgtagttacttgtcactttggccatcatttttttttttctctaggaagttacagtttctaacttaaagtttactatgtgtcaagagttataaaagatggtcttgtagaaactaaggcaattagaaaactaaaactctaaaagaagaaaggatgttcaaaatgatttttaaattgcatttaacaaatgaagtatctcctcctttaatcctagagcctcaagaagggtttgaaaggaagaattgtagagagacatttccatgcttgaaaatatcaagcatgattttggcagaaatcacagcataggaagatactagattcttgggcagtgagatgtttgctggtttggtattttatctctggcagttgttgccacatttgatgtcttcagctgctttgaagattctgcaaaagaaaattattcatttctaacattaaaaattcattatgttgtcaatggattcatgttgtgatctgtttatagccttctgtagtttttttctcttcttccttcctttttttttttttttttttttttttgcgatttatgctccagattgtagaaactatagactaacctactacacaggcacaatgttgtaataaaagagcacttgactgtaaaatcagaagacttggcaagtcacctaccccctgggagcctccgtttccccgtggataaatgggatagtggctatcttgcagggttgttgcgaatattaaatgacaggaaatattatacatgacaattcttggaaaacaactgcgcaaatgcaaagggctatcattgttaataactatttgaaggctctgatttcttaatatctagagaaattgataaaaattccaattgtggagaattcagttcttccaaagcttttgatagacatgtggtgtgtttttattatttttttcatagtacactaggaacaacgtaaagtttctttcagccagtatgtaattgactgtcttttaaatatgtggccataataatatcctgctttaatgtgaatgcatagtaaggcggtctgttgggggaaatacagacatgaacaaggcagtcttataaaacagcaaaggaggcaaaatagatgcacataattaagttgtttgatcagtaccatgttagagttacaaaatcaatgggaacacagagggcggaatgagttattccaatttgttgactggggaaaggctttatattatgtaatacctagagtgtaggtgattttgtttttttctttctgctgagtccagtgttgttttatgccacctatttgggtggctaacttccagaaaagcattcttttttacccactgggtgtctctgagtcagtaaatgatcataatgctttttgtgcaactaccaagtctaggatcatctactgagtctgtgaattgtagaatagagagaggtggttccygccttcaaggtacttctgggctagtagggtgctaaatagagattgatgggctggatggacctggtggcccatggctgtaatcccagcgctttgggaggccgaggcaggtggatcacttgaggccaggaattcgagaccagcctggccaacgtggcataacctctgcctctactaaaaaaaaaacagagatggataggcatgttatcattacaaatgcataaaatctttaatattaaattgctgtkattggggagaggctgaacatggatcatagtggccacatggaatgtagggtgggcgggccgggcacggtgtctcacacctgcaatcccagcactttggaaggccaaggcatggagatcgtctgaggtcaggagttcaagaccagccttgccaacatggcaaaactgcatctgtactaaaaataccaaaaataaaaaataataaaacaaagttagccaggtgtggtggcacacacctttagtcccagctactcgggaggctgaggcaggagaatcacttgaacccgggagatggaggttgcaatgagccaagattgcatcactgcactccagcctgggcaacagagcaagactctgtctaaaaaaaaaaaaaagaaagaaagtggggtgtcccactcaattgtctcaccacaggtccatgctatggaaattaaagtcatccagcaggatctccgaattatctctcatattgctgacttctgagcagatagcccctattttgctatttctgataaacattccatccagcttttgtgtttgtttgttatgtctgtgttttcaaacgttcttttaatatgggttacttgtgtggtactctgattttttttttttttaatagagtctcactctgttgcccaggctggagtgcagtggtgcaatctcggctcactgcaacctccacctcccaagttcaggcaattctctgcctcagcctcctgagtagctgggattacaggcgcccgccaccacacccagctactttttgtatttttcatagagatggggtttcaccatcttggccaggctggtcttgaactcctgaccttgtgatccacttgcctcaggctcccaaagtgctgggattacaggcatgagccaccgtgcccggccagtactctgattttttgttgttactgttttgttttgaaactgagtctcactctgtcacccaggctggagtgcagtgrcgygaactctgcttactacaacctccgcctcccaggttcaagcgatttttctgccttagcctccctagtagctggaattacaggcgtgagccaccatgcctggctaatttttgtatttttagtagagacgtggtttcaccatgttggccaagctggtcttgaactcctgacctcaaatgatccacccacctcggtctcccaaagtgctgggtttacaggcatgagccacaacgccctgcaggtactcagatatttttaagctgtgaatatgagaaaatgcgccttcagtgattaagagagcatggggtgagtaggggcacctgcagtgatgaagcacgaaagcctagaagccagcaattagaaattttcaaaatttagactggccagtaaacaaagcatcaaccaaagtttaaagttaggcttggctggctcttagggacaaaacttggaaagtgggctcatggttacagtgacagagatgctggagtaaggaatgtagatggcactcccatccatacagagtctgtggtcaccggaagtgtgcctagccatatgacttaacatgggctgggaatttctttttcttatctttcttttttggggggtgttgcggggagacagtctcattctgttgctcagcttggaatgcagtggtccaatcacaactcaccgcagcctccaaactcctgggctcaattggttctcccacctccacctcctgagtagctgggacaataggtgcatgccatcacgtccagctagtttggctgactttccttcccctccctcccccctttccctcttccctttccttttttgtttcttttgggttttgccatgttgcccasgctggtctgggctgaagcgatctcctcacctcagcccctcaaagtgctgagatgacagacatgagcctctgcttttggcaggaaattctattctttccatttttgtcatagtctcgagggatatagaattaagtatttacttccattgcctcattcgttcatcagacatttattaagcacatagttttcctactcatttctgggacattacttcatcgacagagagttgacatcttttagcagttgcttacctgtgaaaaggtagggactacctttaattagggattctagggaagaacttgtgcccattcacagagatgatcttcttgcctttcatttgttgatttttatgtattttatccttcagaccaggcatatcagtaataacagcactgtatttccgcctggtagctcaccaaagcttcaaggatgttatgcagaatccttagccgggaacgtggccgtttaccaggaagacagatctttgggcaattgactcacccggcttccagatataatttgagttcccttttcccacagtgagttgtaggtaatattatgaacacacgattttcagggcaggcagatatgtattttgagctgatgagtcaagacatatttattgctagtgtaagagggatgaggctccgtagttgacagctgcaatttagaggagtagttttggttggccggttagcatggagcattggtgttccctgatctgtgctccttttgcccacctggtttaatgctgttggtccctgactgtgattcatccttgagttctttctttgctgcatggtggctcagagatcagtttaagtcatttaaaaataaataaacatttcacactgaatgagtagttttgctctttgcataaagacaagtttcccaagacttcctgcttgatgtgtgatgagttccatttctagaatttttaggcgctctttcatattatagaaatarcatctaatagctttgctaggaggtgattaatcttcctccctttctccctcctttcttctgtctttgtctctctgtcagtatttcatctactcagaaatgtttattgagcttctacttagtgccaggtactgatcacgacagagttggggaggcgctggtgcyagtgcaggagaggcctgggggaagtatagtggcggatgtgaaagggttcactaacttgttgagagggtttgggaagcttttggagaggagatacatttcctctgagccttggagcatggacagatgattgggcaaatggaggataggcaagggtggttagaccaaggaaatggcgaggaggcaggaaagaacatggcaactattggggagcaccgcacacttacgacagctcaggtatggggtgtgtggtgagatatgaagttggaaaaaaaaatagttttgactggatcgtgaagagcctggtgtattgtgtcaagagtttggattttttcctgattaggatcattgggtgttttgttctgatttttttgagctaaaatccacataatgtaaattcaccattaaattttttttttctcctcaccctttcttatggtgctgagtaaatccatcattttaaccactttaaagtatacaattcagtgacttttagtgttttaacaaagttgtgcagccactgtcactgtctaatttcaaaatgttagcaggcattcctcagcctcttcttccctcaacctctggcaaccattcgtctattttctgtctctatgaatttgcctattctggacatttcttatgaatggaatcacacagatgtgactctttgtgtctggcatcttttacttagcataatgcctcagagttcatccatgttacagcatgtatcaatatatcattctttttatggctgaataatattccattgtttgaagagaccgcattttgtttatccatccatcaggtgttagacttttgggttgtttcctctttttggctgttgtgaataacattgccattcatgtatcagttttggtgtgaacatgtgttctcagtttgtgtggctatatactgaggagcataattgctgaatcatgtgataattgtatgtttaacttctgaaggaactgaaaaactttcccaagtcattggagatttttaagacagatcaaaacagactcatttcattttaacatcaaacactttagcacagtattttctttckatgctaactatttctacttctgttggcatgttttcctaattcagggcatcayagccctcagcagggaaccatgtcgggcccttttaaatgctatggattgattgctataaagaaatctgtacccaatagcataggataggacagaaagaagtggtgtcaggacattctctctccctgtatggtgtatttcagaaatgagtttttcttttctaaacagaacccctgattagatgataggctactattagggaatttattatacttataaacagtacttggattccctgtaatttgttataattaatgcaagagttcaagagcagaaagcaaggatcaggtcgtggcatgtctttctcttttgcaacaccttgctatcattggctttttytcactagttaaggcctgtgtgtgtctttgtatgcatttaaacaaatattatcctttttaggaaataattgcaatcctttggctcattgaaactgaaggaatcttattaagaagttgggtgtctctggcaaaatagggtatttattgatcaatgaatgttgaaaacttctagacttgaacgtttgccaagaaaatcttgtctgtgtttgggtatatgcacatgcttttcttctcatgcatgtacatgtattagcttatagtatgaaaaagcctagaagaaaaactttcccttttaagggtatctttgctagagttttagttgtagcttttccttttgtttgtttgtgttttccscctccctatggggttatttcagttttgcatagttgcaggagtattcgctttgtagtttgttagacagtgcagacttttaattgactgtcaacttgaacagtcattaaatgtaaaagcttttagatagtgcatgggtcaggtaccaaacgcattattagactttaatagtcataaactgaaattcttctcaagagttttgaggatagagggatggagggagggaggcattcaggtttatctggttgcatgcctgcatacatagtatttatctggtcctggcagacmgagaacagcatgggccaccctgtcctttatctggatttacagctgtgaacacccgctggaatggatggaatgtgttggttccttcctatgggtatctctgtcaatctaagattttaaattattcccctttgctctcctgtaccccaggactctaggactacttgtctcttttccctcttttttttgtcttttatagtagagaaacgtttccatttgcagaatataacatcagccagaaaccaatgctgtctggcactttggtacatgctgcacttgggagaactgggttccagtacattctagcaagattcctctgatattgctagttatgaagaaagttttctagtgaggaaagcacattttaagtcttaccctgctcttcataacagtgacaggacaatttgtctttccgggtcctggtctggtcctccactccagtagttttatggaaaggcttcaaaaagtgaggaatttaaggatggcccctctctccaaattgtcacatccctactgaccgtgcctatggggagagataagttggtttaactaaatttgaactctagaggagggaagagcagaccaggagccgtgtgtgatgataatgattctgcaggttggtagttacagcttacagagtgctttcactaacctgtttttcaaattaggaaagaaagttttctttcttactcagacctccttgagagtagggggagaaggagtaatgaatagttgatatgtgctattaaatttggataacattttttatgatcgataatatagaagctgctcagtgcaaacaagtaaacgcctgtgtgtgatactgacgatgaattgcattttactttttaaaaatctgcatttagaaatatatacacataagggcccagtttgtacctgctgttggacatagccactccttccagatgggagcctacaatcagaaactctggtctgtagattttacttctatccctccatccttcttcgaaaattaacatgtagttaaaatgtataactcagtcttctttcccttccttctatctctggggcagaaaagtgaaatatctcagaggctgctgccaggagaaaaaacagatctgaataaccattggccacaatatgaaacatgtcctgtaataggatttttatggaaaagtttctcatttcaacatttgcctcatatgctgtagctcagactgtctaagtaggggtggagaaaagcttggtgattgaagcccttctttagaagcatcataaaaatcaccgggtagtggtgttttattttcacttttatttttagacttcagtgaaattggtggtttgcccagaatgggcagggatcagatcctgccttcatccctgtggttgttcatgcccagatctggttgtggccatgtctttaaggaagcagtattaccttggacaagtcattctcctccctcaacacagttgccttctctaagaaatgaaaggattggactgggaatttaaaaatccttcccttattaaatagcttaggctccatcatgctgcagtgatgtatggcccccaagcttctgtggctttcacaaacaaaggtttatttgctgcccacctgacagatccactgtgggtcgtctgaggctctgttcccagctgtctttgcccagggctcaggctcactgagcagcctgccctccctgctcactgcaggcctcagagcaaagggaagcagaggtggagaaccggtcactggctctggacacttttgcttgggagcaacaatcacttccygcttccattcccatttcactggccccaaagctagtcccaggagtaatgaggtaggcaggcatgaccctgttgggaaggcagcagacatttggaaccgtggcaagggccctgctcctcctgtcttcaccatcctgtgacttacgctgagcatgttgcatcctagggtggtagtatgaccaaaatcagatgccaaggctttaaccgttttacatggctctctcctgttttgggcacgtctgctgaactggacttggaatgaagatttcacttgtggggaggggtgggtgaaatattttaaaagcaacrcgtacccggcctctgagttcctggtgccttatttgtagttctgtggtaatacagcccatgctttcagaacaccacacggacctgctcactctgagaagcatgaacagaattgcaagtaaaacacagttgcagacgtgctgagataaattcctcatacatgaatttaaaagagagcatgaagatcttagcaattcatctctaaatgttgaagatattgttatgggctataattttgaagggatcctttgatactctgtcaaaagtactgaaggctctgttgatttgacccaacagggcattttttcaaacttgatttttcaaactcctatgggaggaagtgacttggataagtcacttattttcttaccatcggatgaggagattctagatagatgaggcccccagagactaggtcatagcatgttagttcccaatagataacactgattattaggacgccttttttatttcaccccgacaaatctgtatttaataaaaagttaatctttaaaaacaaaatttaaaaatttgaaaatacaaaattttaccttcattcgagaagcaaaattatgttcaccaattcttagaggcagagcagaatcctaacctaaaaccattcattgggcctcaagagtcagatggactatttccaggtctttgaatatgaaaaatattaaaaagttttccttgtgagcttggattttcaaagaggatctctttggaaagttggcaaatgcttactttcctggcatgaaaattgttgtttttttttttccttttcccctccacccaaagctrtgacagggtggagtatacttccatgaaattgcatgcttccaaaatagaattcactgttatattttactactgttataattgaatcgctaatgagaaataagcaaagagcaggcattctagaaatagaatttcaactcctgttgtcaaatttagtcatcatattcgatagaattataatattttataaaactgccttttgtgcaaaattgtaccagccaaacaattttcaaagtggtttgaatttcattctcgtttctgcagtcttacacagtagtacccacaatctcgtggtaatagcaccctatcattgctgctgtttagattctctcctagtttggatggcttccaggagagagccctgcttgcttcagctccttatttttatattccagcaaaatcctacacccaacctacatgattaggaaygttcctggtgttccttgctagtggattgtgagtcactgtttcctaggatagaatggatctgtaatagaacttgctgacacattatacaaatggtagctgtagatgaaagttggaagcagcagatttttaagaactagagctgttgttttggtggcagattaattggttactggtcaactcccaaaggtattctctaataaataatcttagctgatcattttcatctccaaggtaacaggtaacaaagctctacctctggcagatgatgccaggttaacaccttttcagatgttttactccttggttcttaatcactgaatccttagatagtacactagacaaaaacatgatcacagcgatcaaaaagatatgtgcatccttgtaaggtggagactgttttagcactctccaagatactactcagcatctagcagacttacacccatagaaagtgcatgaatgatagctatgggttaaaatatctgtttgtctttctggcttggagagcagcaaataagtcaaaaccactccagaaagatgagaaggaatgaatggcatgtagatgagattcaaacattttataattagtaggaatcagtgaaatttaccattcttttctaccttgagattttgctttttgttttgcttcgtgattttttctagcccatattaggtttgactaaaaaggatttttaagtaactcccagtgtttgcccttctgatttgagtataggtttttcccaccaaagagtggtatggctgtctttatcctgtttagtacacccaagaggagagaagaaggactctactggagcatgcacggagcccagttccttccctcaaacaggcattggattgactgatgtgtaatgatgcctgtgacatcaacatggtagagccagcagtaattagctctcagcgccgattgcctctctccaggaaagttgggctttggttcacttatgggttcccttgattgagatgccaaagtgaagttaaaatacagagttacagttaccaggagcaaaaggattgttagcatttaccaggaattaatgctagagaaatgtgattgttgtcgttgtgactatgtgttgagagtatgggcaaaggaagtggagtcctgggaaataaacgtcttgagtgagaagttttctaaatgttttaggtaattctaagagggctattttattggtagggmaacagtacactgtattagytcctgagggcacttgtctagtctgagacttgatgtgtttgggcacgattctgtccatctgtactttgctggtttgagaatttacttcagtttygaaagttgcatcagattagatttttctgattcacagatgtgtaaggtgaaaactgtatttgattttttagtgraattacaaattatttggcctgtttgtgatctgccttaccgaacttttgagtttgaaaggtgatgtgtttctagaatgcattcaggaacgcacactgttgartgtagctttggcagtcgtgytgtcgtgggtctccaggtgtgcaaawgtattttcattctcggattctgttatgaggacctggtccttatcagtggtttatcccgctggcctacaaataagtgatrtgatgagaatcctctcaagctcagaatgaacaggatgtggcacctgctacatcaaacaaagataaacacaggcagaggtcactttccatcttttatagaaatgacctttatcagcatcacaggcatgtcctgctgtgtacacarggttttacatctagaggcatctgtgttgtgggaatatattccaagtatgtgtttttaaggttgtttgttcctctattcccatgaacagatatcagtattacctgcaagtcaaaaaagatgtgcttgaagggcgattacgatgtacrttggaccaggtgattcggctagccggcctagctgtgcaaggtaagacatagttatgagcagcatgtgaaattccattttctgtttgatcatggtgttgcyggcctctcagagtgagaagttagatttacttaaatgatcccttagtaatgctccctttttatttcaagttatcttacgtgaaaaatgcaaagttagtgatttttggtggctgggtggtagatttctcaaagctgtttgcaaactgctcatgcttgtataattacagttttatatgaggaaatagcagcttttattctgcctttaattaaggmtacatttcagggtttgtggaacattttctcagaattattccaaggcacaatgtggtcatattctgtagcttgatgctgcaaaggtgttactatcacaacttctttgagtgtgatagctttaaacattatagtataatgcattctaatgcaattaaagaggtagatttaaaatccatgattgtaacatgaaacaacaaatgtgtattggactgaatttatctttcaatccatcctataaaggtttatattacatagctgttttttgccttctctaaattgttatgtgtgggactttatatgtatattttatacattatggtttattgagtggtggcttaactgccttcagttatactgaaagcaagataggccatattgaaagcaagataggccagcgcggtggctcatgcctgtaatcccagcactttgggaggtcgaggcaggtgaatcactggaagtcaggagttcgagaccagcctggccaacatggtaaaaccttgtctctaataaaaatacaagaattagccaagcatggtggcacacgcctgtaattccagctactcaggaggctggagcacgagaatcgcttgaacgtgggaggtggaggttacagtgagctgaggtcacaccaccacactccagcctgggtgacaaagctagactctgtctcaaaaagtaaaaattaaaaacatttttttaaaaaagcaagaagatggtaatatagtttttgaaaagaaacttttccttttagtcattttcttgaaaaccagcttatctgcaagtgtgagccagccagcagctgggttcttcctgcatggactgttgttttagaaggtgtgaactgacttcccatcccaaacactgggctgaattgaatcatctcagatttaagtgtctgaagaggcagcccttctcctgacctctttcattctgaagtattaacaacttaacaatttctgttagaagtgtaatttctatacagttagcttctgttgtaattctgtggatggaaacaggcaaaatctgatgtatcacctctgtctgcttaaagactggaggggaagaaacaatggccagttatgatagagaaatcagaggtagcattgttgaaataatggagaagatcaatatgtccctcattgtcaaattgggtctttcttcttttaaaaagctttcgttgggctgggtgtggtggcttatgcctataatcccagcactttgggaggccaaggcaagaggattacttgaaaccaggagtttgagaccaccctgggcaacaaaacgagactctgtctctacgaaaaaagtaaaaataaaaaattagcccagtatggtgttgtgcacctatagtcccagctactcaggagactgaggtgggaggatcgcctgagtccaggagtttgaggctgcagtgggctatgatcaattcactacaccccagcccagatgacaaagcaagaccctgtctctaaaaaagtaaataaataaataaaaagctttgtttactgcatgtactctttcctctcactactcaatcattaggcttattgtgggcatcctggatattggaggatcctcgaggaatttggtgaacttactctggattccctttttgttgggtccttgaagctagctgttcagtctgatgaaaccttctctaactaatccttttcaaataacttttttttgagaacgcttattgcatttttagaaagatacatcaacagaaatataagttgtggtggaatgtgataaccaattattgaacttggaaataggcagagtgagtgatgtttgctattcttgaatgctgcacctaattggtaatttgttacatgctgagtttgtaggttgacgtttattttttaccttctagcaacttctcaacattggtgcatggtgtgtgtatcctctcatcctatatctcttgttaccttaaagatacctggatccatttctatctgatgctaaatattttacatgaaattaaaatttcattcaagtttagtttttaggagagcaagcaagataagaagcaagactttatatatttcattttgcatgtgctcaaactgtaccacggtgacatgaaaacagggaaaacagaatttttggcatcttgtaacatgtgaagttatttagaaggtgtaaagatatttgaggttgcttgccaagggtgatttacagtgggaatttccagctgcatatatatgaaaagatgcagatgggtttggctcttcagttctccagattaaccttgagttaaaaagtcctcttggcagatattcttaagatatgaattgatgcatatttaacaaacagatagatataggtttgtttaaaattttttaaatggcctttaggaattgttttcaaatttcttcattatttctaaaaattcatgtagtggtgcttacatgctgatatttaccatattgttagataaaagtaactatgtcaaacatatcttggcactatttttatttaataatagtgagaaataggatgaaatgtgaagaataatgtagtgatgagtttgccctattttattccatctttaatttcatataataaatactgcccttccatcttcttttcttctcagctgattttggagactataatcagtttgattctcaagatttcctcagagagtatgtgctatttcctatggtaagtgtaatttcatttttcttaattaattttctaccttctttggacatttagttctttcctttgaaaatttcaggattttacatatgcatattccctggggaaaaagtcgatgggtttataaagtaggggcaagttttataaaacacactgagaaggtaaaaatgccttcttctgcctcaagacacttccctaatttctttttcagatagtttcttattagtatataaaaatgctactgatttttctatgctgattttgtaacctgaaactttactaaatttgtttctcagttctatcagtttttttgtggaatctttagggttttctacatataagatcatgtcatcatcaagcacagttttacttcttcctttcccatttggctgctttttatttctcttgcctaattgctctggctaggacttccagtactatgtttaatagaagtagtgagagttggcagaaaacaatcccatttacaatagcattaaaaaaaaatacctaggagtaaatttaactgaggaggtgaaaattctgtatgctggaaactataaaacattgatgraagaaatttaagatgacacaaatggaaagataccccatcttcgtggattggaagaatcaatattgttaaaatgtctgccaaaagtaatctacaaattaatgcaatccctatcaaaattccaacatcattcttcatggaaatagaaaacaatcctaaaattcatttggagtcaccaaagaccccaaatagcccaagtaattttgagcaaaagaactaagcaggagataccacactaccttatttcaaactatatatcaaagctatagtaattaaaacaatatgggactagcaaaaaaataggcacaatgaccaatggaaaagaatagaacgcccagaagtaaatcacacacatctaaaaccaatagatttttcaacagaggggccaagaacacactggtgaaagggcagtatattcagcaattggtgctgggaaaactggccatctacatgcagaggactgaatttggatccttatctcaccctttgtacaaaagtaaattcaaaatgtattaaagacttaaatgtggccaggcgcggtggctcacgcccataatctcagcactttgggaggcctaggcggccggatcacaaggtcaaaagrtggagaccatcctggacaatatggtgaaaccccatctctactaaaactacaaaaattatctgggcttggtggcacacacytctagtcccagctactcaggaggctgaggcaggagaatygcttgaacccctggtggaggttgcagtgagccgagattgtgccactgcactccagcctggccacaaagcaagactttgtctcaaaaaaaaaaaaagaaaaaaaaaagacttaaatgtaagacctgaaagtataaaacactagaagaaaacatgggggaaaagctacatgacattggtctgggcagcgatttcttgcatatgaccccaaaaacataggcaacaaaagtaaaaataaataaatgagattgyatcaaactaaaaagcttctgtgcaacaaaggaaacaacagatataaagagacaacccacacattgaaagaaaatatttgcaaattatacatcagataaggggctcaaaatatrtaaggaactcaaactactcaacaagaaaacaaatagccctattaaaaaaatggtcaagggacctgaatagacatttctcaaaagaaatatacagaaggccmgacatatgaaaaatgcccarcatcactaatcatcagggaaatgcaaattgaaaccacgatgaaacaccacctcatacctgttggattggctgttatcaaaaagatgaacaataacaagtgttattgagtatgaggagtaaagtcttactgagcatgaggagtattgagcatgaggagtaaagtcttactgagcatgaggagtattgagcatgaggagtaaaagataacaagtgttactgagcatgaggagtaaaggaggtataacttccagccattttggaaaacagtktagaggttccttgaaaaattaaaaatagaactaccatataatccagcagtctcacttctgggtatatatctaaagaaaatgaaatggtatgtcaaagagatgtctacactcccatgatcattgccacattattcataattgccaagatatggaaacaacctaagttctcactagcagatcaatgggtaaaaatggtgtatactcacaatggaatactatttggccttagaacagaattttgtcatttgccataagatggatgaatgtagagtacattatgctaagtgaaaaatccaggcacagaaagacaaatactgcccaatctcacttgtatgtggaatcaaaagaagttgaacttatagatgtagagagtggaatggtggttaccaaagctgagtgctgggtggaaggaggaaatgttgatcaaagggtacaaagttaggaataagttctggtgatttgctgcacagcaaggtgactatcgttgataataatgtgtatttcaaaattgctaaaagagtagattttaaatgttctcaccacaaagaaatgataattataagagatgatggatatgttaattagactaacttgccaattccacaatatatacatgtgtcacaacatcacattgtactataaatagatgcaattattatttgtcaatagaattaaagttttgttttgttttaacaaaaaagacatttccctgctttgcttccctctctctcatttactctctaccctctggcacgctggctctttttttttctgaacgtactgagcttctcctcaccccagagcctttgtaggtgggtttcctctgcctggaatgtcctgctccagatctttatgacattcaggtctcaattcaaatattacttcccagagagctcttcctttccttaaccacctgtctcatacaccctcaccatccttcctgttaaatcagttttcgtatgtgtagttctgtatctggcgttattcattcttatgtatgtacatatgtatgtatttattattgtcagctagatggtcagttctatggtctttaaacagggaccctgtcttcttcactgtcatctggcacacagcctgtgctcacaaacattttagaatgaatcaatagagtaaaatgcccattcctgggttgaagtaaagataagactaggttttaacccctggggaatttttgttggttggtttgttggttggttggtgggtagcttcagagtaaaagagaagagtgttaatgaggagggattaaaaaattttgaaagccattttagggaacagctctaaccaatcaacattctggctctggtttcagaaatcatgatcattcactacttattttttccgtcaactctttcaccccaagcactgacctgggggactaacacccaggggatgaaattatataagaaatggtgcttgttttcaaggagactacagtgtggttggttaaataggaagtttgcaaaatcagaataaaaagcyaagtgtgataaagtgtgatcaaaattttatatggggagaggtcacatgcccttgggggattagggaaggctgaaagactaatggcatgtgtgctgttaggcaaaaagatagggagcaaggaatgatttagacagagagagaaggagcagaggcagtgtggcctgggtgttcagaaagcatccactggctggtttgactgtagctacgggtggagagttgtggcagatgagactggaaacttctgaggagttagaatgcatgggctcctttgagttctgcagaccccacactttgagaactgctggattcaagctggtcagctgggaatcttgttgtgttctgggcaaaggatataatttaggtgttagtgaaagaaaaacaagaaagcaaagcaagggatattttgaagtaaaataggcaaaatctggcaacttatcagtgatggcatakgggagaaagtagagtgtctggtgacaaaggttttaggttttgagagactgggataggtaagtctggaattatccatattagtgcatgaggtcagtctaaattggtccaaagctaatcttggtcttaatggttagggaatattgcacatctctaacttttcatgaataactccattcattctttttttttttttttgagacagagtttcactcttgttgccaggctggagtgcaatggcaccatctcagctcactacaacctcagcctcctgagtagctgggattacagatgcccaccaccatgcccagctaattttttgtatttttagtagagacggggggtttcaccatgttggccagactggtcttgaactcctaacctcaggtgatccacccgcctcagcctcccaaagtgctgggattacaggcgtgagccactgtgtccagcctccattcttattttatttccctccaagtaaacagtggtattatctgctgtgcctgctgttttcataccttattaattctactcattaaatgaaactccagagattaacatattacttaacagagcagttcttcttagggcttaatgtcaatatgcttgagtcaacatttctaatgtctcagaagctcatcccaaaagtcagggtgtttcccagcgtgcttggtgggagggaagtgaggctcaaaccttagaattttagagtgtgtacatgtttgtgtcaaatggggtagttggtattggagggttgataatttcctatttcttattcgccttactctcattaaaggcctttattacgttgcctttaggaagagatcaggtttgggtgcttctcagagttttcaaaggtgattaccagcatgatatttatgagtttgtaaatggtaaaatgctctgacaggttaaagtgctatgaagtagtaaaggagttatttcgtgcatcatacctctttcagaatgagactgtgtttccactaaactctaggcaaatcagatatgtaaacagcataaacttcataaatctcatcattggacagacagatattgacattgttattcttggatctaaaatggctctcttcagggtggtagctgctagccatgtgtggatatttatattcaaatttaaattaatgcaagttaaataaaattaaaaatttagttgctagattgcattggctacttttttttttcttttttttttttcagacaatctcgctctgtcacccaggctggagtgcggtggcgcaatctcagctcactgcaacctccgcctcctgggttcaagcgattctcctgcctcagcttcctaagtccctcctgtgacaacaggcatgtgccaccatgcctggctaatttttgtatttttagtagagatggagtttcaccatgttggctaggctggtctcaaactcttggcctcaagtgatcttccctccttggcctcccaaagtgccggtattacaggctgagccactgcaacggccttggctacatttttagtgcaccatagccgcatgtgtctagaggctactgtattggaaagctcagatatggaacactttcgtcatcccaaaaagtcctgtgggatgctgaagatgatgtggcagaagccttatccgagttgtgaatattcctaggctttagttatcagctgtccactttcagcccctgcccctgccccattgtatcctgggtgcactgtgacctgtggttggcaatctcgtggcacctttgctaggcagtgctgtgaccctatcccagctgtgcctcttattggctatatgactttgggcaagttttttaacctttccaaccctcagttttctcatctaaaaatgagaataacaagcctaatttcgttgtaagcattaaaagacataatacattgtgaaatacctagtatgaaatacataatacaagttgccacatggtaaattctcaataactgtttatttagttgtcatmttattattgttattagcactattattctgtctctatgtcttgcaaatataagaccgttgaagagtgtgttttccaggtaacatcactctatgcttttttttttttttggattttgttatgtgagcagacagagtgcaggcagaaggtacaagtgattgttaatcagctctgtgtaattaaacttttgtttgacaatatgaaatttacatgtcgcatagtgagttcagttcaagaagcatgtattgatcacttactatatatttagcccttataagctgtcattgcacaaaagccctatgataggccccttaagtgatatgaagaagaattgctgccctcgaggagcctgtactctgatagagggtgggagacaaggatcaaggataagacgagtatacacataactgtgtaagaaatgcagtaggcagaatacgagaagagacacgcacaaggggaagaggtagttcaaaaggcgaaaatgcttacgtccagctggggagagaggagagccctattgagggaagtggtagctgagacaggacgtaaggatgatgtggcatttcacactgcatgacgttatgggatggttctcccagaggggatgggcatgtaaaggcccatcctttccgaatggaaatgtaaaagcagtgtgtgttagaagaggtgtcggcctggggcttgacctcttgggcaaggaggtctggaaggggaagctgagtcacattgaagaatggtctgcatgccaggcccaggtgttgaccttgctgagtaggccgggggtagtcttagaagggtgtaaactttttccttggttccactggagctttcaaagagaatgcattcctttggtgggggagggaagataggatgaatggctgtgtttgatcttatgaagtaattgaatttgttaaatggcatttcttcagcagagaaaagaacaaagtcaagtacacaaggcgctccacaggtgtgtggctgtgtacaggcatgcattctgccatttttcattcccacagggccatgctcgcactctccctggcagggcacatacctcagggaggccccaggtgcagatggaggcggttaagttgagaacaatagcagagggggtacctttgggcttctttttaaaagtaggaaacggagatttaatggaacactttttgatcttcactttattttatattctgttgccacatgcccttcattagcttttcaaaattaatggggtttttactcaatacctggatgcacatacatagctaactttctaagccttgtgatatctttgttactccacaacatgaaactaaaaatgttgagcttatttcctatcacggacttgagtcatttcaatggatggctaaacaggaaaccgcaaattaatcagttatgtgaaaagtaagagctgccataattccccgtctgctctaaagtctctcgtgaactctagaattagcaggatgtgcagagctatagaatttttagcatacatttatgtctgtgctttccagttttaaaatatattgatttttcagattttaatgatttgagatgggatgtttttcacagttttgaggtgtrcatttttaggggtagtgttttcatccatgtaaagttaagttggagatgaatctttatataagtggtattttagaatcaaaggaatggggcgtttggtatgatttctgccaaaacatcagtccctacctcccatcctagtaggatgagcttcaggtacccatcagggtgtagctcagagttccttctgacatcygctctggaggtcacaggaaaatggtgcccatctgtgaccctcttggtgcttactagcctggaatatgtgggacctgctgcccaggaaagctagaggcagctggcttggggcttgagccccaggccaccacaggcatgagacaaactctagaatctctacctctatcaatttctcaagaatgcattgcttcggtctgcttattttggattattcctcttgattccatctcaccatcctaagcagtgcttccctggccagtgtttagcaagcctatttctgtgatgtaaatcctcccactgtggtgttacggaagggtagttgggaaaagatgtgtgtaatcagttcttctgagcccatagtagtcagcacatcacaggttccaggggcctggggttcagctggtagagatgctgactagtcagctacrcaactgttgccttacagagctctctggagatgttttagccgtcatggcttcctctgcccccgtgaccatcaagtaacatcagaatgagcctactctgccttcagtggttttgaattcgtttcctggtatacagaaaggcctggcacagtcccttcctaggctcaacttttgaagggatgatggcctggaaactcattggcctataccccaatcattagaaatatgtaagcacacgcaaagcrttttttataaacgtacatctgagaggcaggcggatagggaagaatgaatgaaaagagctattccctggcaccacagaacttacgcggcaacccaaaatatrcctggaaataacctgttataatggagagccrtgttataacagtagaaatcataactcakttctaaaaattacaacctttaattctacagcagtaaaggagatattgaggaaatgtgactaatcaggaacatctgaggaagggagctttaagatttgcargcaaaatagcaaatgcccacaccctcatgtgaccttaagcactttctattcttataggatttggccctggaagaggctgttctggaggagctgacccagaaggtagcccaagaacacaaagcccacaggtaaggcaggcagagggtaaggggctgcctgcacaacagatgtttacagcccatggggcaggaggcatccatctccctatcagcaactctgggcttgagccaacacacttgtatttattccaccacgtgactcagctctgtacttccgttctgcaaaagtgaatgtccacttgaaaactgctccgttccttccttccctccctcccttccttccttccttccttccttccttccttccttccttccttccttagagaatctgggaagcctgagacagcctgtgctgagagagtgaagacctaaagtgctgtgttgggtggtaggcaggtgaaggaaagaaaaagagagaaactttaattcaaggaagcaccaggagtttgatatcgaggcctatgcagtgatcctaagttctctcatcatggcttttttttttttttttttttttgacagagtctcgctctgtcacccaggctggagtgcagtggtgcgatctcggtccactgcaacctccacctccggggttcaagcaattctcatgcctcagacyctcgagtagctgggattacaggcacatgcaccaccacacccagctaatttttgtatttttagtggagatggggtttcaccatgtgggccaggctgatctcaaatgcctgacctcaagtgatctgcctgcctcggcctcccaaagtgctgggattataggcatgagccacggccatttgactcccaaaatattatcctcatgataaactttttcctttttttttttaatagtgaagatttctcccagatgggagaaaaataacttctttttaaagtaggcaacatattcgaagggatgtctggaataatgatttcatgtttacagggctgkggctcttaattaaatactttaccttcctcttattattcgctgttaagtaaaaggctactgggaaagatgtcaatgaattacttagtaatgcaccctaccctcacagttgggtaatgattgctcttcccagaaactagagctaaaccacagctctggaatttgccatcaggagagtgggatcttccactggctgcccttaaccatttcttcctttgatgctattttgrttttagtggaatcctgccagcagaagctgaactgatgtacatcaatgaagttgaacgtttggatggatttggacaggaaatcttccctgtaaaggtaatatgctgtgccctgtgctggctttaaccttctcagaccggtactggcatttggaaaaccattgttgatagcagtgggccagaatggcttggccttctttttgctatgcagccttagttggcaagtccaatttattatagataaacaaatgctttttcttaaccaagacgttttgaagtttgccatggtcctcagcagaatagttcaataagacagtccatctaagtgagtaccaagcatcagccaatccggcaccttggaggtatcaaggctgatatccagccttataacaggacaagtagccaatgtcatgtgtaacattaatgaagactctagtcagtagttttcttattctctttttctcttcattgagccaatacagggataatcgtttgtgaggtagaatgaaacgtttcttgtatacaatcatgctttatttctccagctttatagggccctcccctgtgggttcctagcccctttggtgttttatggaagctatgcctcggaaactgctatagcacatcacatcctttgcagcacatccacctcctgaagtgggtgtggttgggggggtcatggatcatagtcatttatagagctgagcccatcatccaaactcattttccactctctgttgaccaactttacaaaaaatggagatttatcagaaacctaaagcaactggcacatttcagcaatttgggagatgcctgcaatttcagcacaaacatttcactccagactagctccactggctgttttataagtgttcagttccccctctgttgcacgtttgcaatttgccttaatgagaactgcccatgtgcatcaagtagaatcgagcagggtggccgcagctttcagaaagggctaaatggctcttttttagatttgtttaattttcttttgcttctctaatagctgcccttcatagggttgtaatccattttccttgcmataatgccttatgaagccatctgcatcccrcttacatttctgcagcccatatatagtcatattttgggtcattgaaaaatcagagtaaacttttctctgcttctagaaaactgacttctcaatctctggaagttggaggttttgttgtggcaatttgcttgtgttgttttttaatgtggactgcgagaaacaggggcagttgaggtcatgttgaaatctgctgtggttggttctgatgtgctttctagtatgttctttctttagtgggaccaacagggttataataccttcctctgagttggaagataggcgcttctgacttattgccaagctcgggtaactgagctggactgcctctttttcttctctttccccccacatatgtgtgcatatctaaggtgaccacctatagaccgcatgattcctggtgactcaaggatgagggtgggagcaacagtaccagtggggggtggtaatgtggtcagctctgcaataagtgaaaaagcagacaagaaaatatgcagggaaagactgtgagtaggactggagtctcttttgattggtacaggttcttattgacaaaaagcatgtcatgatatatcctaggaaaaatacttgaatttagcatgaacttttccgtgagtggttcctcaaaaattttcaagagtagaagaacagcagtggactggcagatgcagatgttgtacaggaagaagaaccccctgctcaaaatactatccagtgagcctcaggatatatttttttttaaattttgcttccttgaaggagtaagatacttacaaaaagatgcatctagaaaacaaaaataaactctgaaatttaaaatgtgatatcagaagtgtacaacctaatagacaggttagaagataaaactgagaaagtctcaccaaaaaacaaagtaatggtaagtcggggacaggagataaaagaattagaggacctgtccaggatgtccaatatttgaataatgggagttctaaaaagagtgaacaagggaaacaaaaggtaattattcgagaaaatatccctgcactgaagaatgggagtttctgcactgaaagggccagagatggtagctgcaaagagacacatcgagagctttaagaggtgaaagttttggcctctgtgcagaggaagtggtagggacaggtctcctcttggcttcctttaaacaagccctgaagaatattcaactcttcaaattattgcatgtataacgatttaaaaaacaaaaactttggtaaggttgaaaaataaaagacatcaatagatgttcatgaaagagaaaatccaaatgccaatgaatctgagaaaatccagagattgtctcttaaactggacatgtgttgtgacaaattgagaaaaaaggaaaaaaatatctatctctctatctatatagtccactaggatgtgtggtgggtgagttcctgtaggacctgaccccgcygrcacagctggtcaccttattgctgtgatgttgtctatgatttattctactcatgggtgagaaatgggatgtgatgcctgtgggttttgaaataacgtgtatattgtggagtggctaaatcaaaccagttaacatatgcgttacttcacatatttctttgtggttagaacacttaaaatttactcctttaggccgggcacggtggctcacgcctgtaatcccagcactttgggagtccgaggcgggtggatcacgaggtcaagagatcgagaccatcctggccaacatggtgaaaccctgtctctactaaaaatataaaaattagccaggtgtggtggcatgcacctgtagtcccagccactcaggaggctgaggcaggagaatcgcttgaacctgctgggaggtggaggttgcagttagccgggatcacgccactgcaccccagcctggcaacagagtgagactacgtctcaaaaaaaaaaaaaatttactcttttagtgatttcaagaatacagtacattgttgccgggcacagtggctcacacctgtaatcccaacactttgggaggccgaggatggaggatcactagcctgggcagcatagcaagaccctgtctgtaaaaaaaaaaaaaaaaaaaaaaattagcagggcatggtggtgcatgcttgtagtcccagctacttgggagactaaggtaggaggattgtctgagcccaggaggtcaaggctgcagtgagccaaaattgtgccactgctctccaccctgggcaacagtgagaccttgtttcaaaacaaacaaacaacaacaaacaccaatatattgttactaactatgctatggtcacaatgataccttgaacttagtcctcctgtctaacaaggcttgatttcctttgaccatcatctccccattcctcccattctccagcctctggtaaccaccattatactctatccttctatgagttcagttttttagattccatgtgtaagtgagaacacgtgttatttgctttctgtacctggcttatttcatttagcattgtgttctccaattccatctgtattgtggcaaatgccaattttattctgttttaaggctgaatggtactcccttgtacacacatgtaccacgttttctttatccattcatctgtggatggacactcaggtcgattccatatcttagctattgtgaataatgttgcagtgaacatgggtcatcacaagtatcttttgttggtcttacccaggacaatcatggaaactgtgtacaccttggcattttctttatggggattttcgtgaggaacagaattggaagacaagcggtaatatacaggtagkcttatttgtttgtttttcttttttcttttttaccttgaggaactgtaatgttaatgttacattaacatccaaatgagttaagagccaaactgtggataagatttgacttctctcagctcatataaggtgagccctctgcaggatttaagcagttaaattcatctcacttttcgtagaaacccatcccacctgattccaggaactacattgttgaactctattgagttagaaggatgaaactaaacttcgtgagtctggttgaaaactggctctccagtcaatcattaactctaaacacttctttccattgttctgaaccacctgtgccacaagagtgccaactgatttttatgtgaacaaaaggtgattagttttaaaaatgtgttttgaaaaagcaatctatttattatgatgaattagggggctttggtacttttcattattttgacacttcagtcctcttttccatttatcaggaatggcaccagtgtagagatgcagccatctcccccctgcatttcatgtcagtatgcttgctttgtattggtgcccatagattttatcataatgccaatgatctgaaaaactgtgttctagctttcatttacaagggcaacatggcccatgattggaagaacagctttcttgtatgtgtgtctgaggcggatctgtgtatccagggcacactatcaaagatagctcttggaggcaagcatagcccaccttctggaagtgactcttaactggccatgtactctctggatcagtaaccacagcaggtcattttgagacagttttctaaccaaaagcttcctggtaggcttttattttcctagatccccagtctgtcattgtttttatgatattctcttgctctctgaatagagacattattgaagcaggagtgacaagagagatctttcaggctatagaataaattttttgacttttggacttactgtcagctccatatatctgccacaaagtataaattaattgaggaaaatatgtaaatatgtgcagagttgtaactataaatttttatacccattcaaagctatccaggcattgagtcctaccagttcttcatagttaaatcaatgtttcagtttctgtttgaacctacagcacagcagagaagtaaacaagtcttgcacaccagctattgaagtgaaatagaagaaaattgcaatttggaaatttcatgagcataagccactcacaggttttgcttagtttccttagaaactgcttccagaccttttcatttatcttgaaaccactacaagatgagaattcacatctactgtagtgtcatgttaattataccactagatgaagtcatgtggcggggctccgagtatatctaggatttcagcagttgatttgaaggaatgaggccagaggaaaccaaatatctcttatctctagagaccttcactaaggagcatgtagctatgagtccacgtagatgtaatctgatagaactgtaggttgtgaagcaagctgggtgcagcactattagagagtattgccccagcagaggtacctaaaaacatttagtactggtataagggaatgatgactggaggaaaggctggaaaccccaggtaaagaactcatccatccttgacatagagagtaaacatgctaagtcaggtacttwtttgtgtctatattgcctcatttttaaagtaggagcaaaaatagctgccataaagagttggtgtaagaatcggactctatacagctaagagacaatattattgctttttattcttctagcagacatttattgagtgctctgggccaggtactcgattcagtgcttggaacacagaaacgaagaaggcagaatccctgcaccgggtatggggcctgtggtctgcttggtctcatcagagatctcatcacagaagtaaaaattataatgcaatgtggtgaccggtaggggactgcagcaggctcttctcctcacgtgtgggtagggggatatgatgaagggattcctagagaaggtgactcccagagctgagtctcaaaattattatccaaacagaggatggtagaagtattaatgagcagacgcatcatatgagtgaaaaagcggtggcagggaattacaggttggggcaccaggtgargggtaaaagatggttagaaattggttccaagtaggatgggaagcagtagcttatctttcctcatctggtgcttattttggtgtatctccttttagataaggtctccatgaagacagggaaggaaactctgtgtgtgtgtgtgtgtgtgtgtgtgtgtgtgtgtgtgtgtgtgtgttgttgggtcccaaagtgtaggcacattagagagtcaattaatttatacttagtggcaggcatatggagctgacactaagtccaaagtcaaaaagtttattctatagcctgaaagatctttcttgtcattcctgcttcaacaggcgttttttcttagtggcatcatgaatctgtagtgcatattgcaatacagaatatgtggattcttctatttaggttcctggaaacacatgatttttaataatatgtgctcctccatcattaaaaagtggtggtcatgggaaatgttttgtcactttggaaatgtgaaaaaatgggagagggagaagtaaaagtcccttgcagattttcctcattgctagtcacaaagaaaactatagtttataaatagcgatgtctagacgtattttatgtagaatttttagcaatttgaatggatatgtgttgcattttcttttctcktttgaaagaacatttcacttaaaaaatagttaaatcatagtttgttaaatgagacttgatagcagcaaacagccctcctctgctgtatcataaatgcctggaacattrttgagtaaacacagtgacatttcttctaaccaggtggaatgacatggggaatatcactcataacaagtcgaccattctagtggagctcatcaacaaagaagagactgccctctttcacacrgtaagcacaacagacaaacagtcagggtctgacaagacactggcttttggacttttcaactcctaatgtcctttccttkctctccctatcttgagataataaatactcccttgaagagatgctttctaatacttggtcagtgctgtcattactcattccaggatagtggtgatgaaatacccatgtttaaaataccaagtttctggctcatgcctgtaatcccaacactttgggaggccgaggccggtggatcacttgaggtcaggagtttgagaccagcctggccaatatggcgaaaccccatctctactaaaaatacaaaaattacccaagcatggtggcgggcacctgtagtcccagctactcgggaggctgaggcaggagaattgcttgaacccaggaggcagaggttgcaatgagccaagatcgtgccactgcactccggcctggacaacagagctagactccatctcacaaaataaaataataaaataaaataaaataccaggtttccaagctgacttttgactctaggactctggtccctccaactgccttatgtgtgatggatcacattgtctggtgtgccgccttcctcagcactctagttacagccctcatctagtgacccctgattctattgcattccatttgcttttgctggaggacctaagttttctttcccatcatagccttagcttaatctgaagtagctgagggactgacctcctgttgagtgcctcctcgagagccaaggcatctcactgcctccaatttaagaagtctggtgtttattctatgctgtgccttgattcagttatttattttgaaagcacttggtcggaaattacataaagacatgccggttcatcagtgtaaccccagcactttgggcatagggattccttagcagacagcaggttctgccactctttggcaggctttgtaggcatagctgctgctgaaattcagcaggctggtttaccttgctggcccatgtattattttgtgcttgagatgaaggttggaagggatgtgtgtccctcctcagaagaatcttaatgaaatgtataactaattcaacaaatgtttatttttttctctgtctcttcttttccaaggatgatatcgaaaatgccaagtatatttctcggttgtttgccacacgacacaagttttacaaacaaaacaaaatctgcactgagtaagtaaacatttaatccccccgacttgatggctttgtcagattaaattaatgtccttttggggtgctgtagatctcttttccyattcactctttttccttgttccttgtagaagctaatgaagtaagctaaagccagggcaggaatgaaaactttaatgatgaagactgtctagtgtcgtgcatatgcccagagagagaataattcacaaattgactgtgaatgcttggctgcctggatgggttggcccacattagcgcctttccaaccctctgctagaagtttggagaagcggtgcagttcccaatttgccagggtgccccttcgtgtcagacgtggagtgtgttcagaagtgggtaacagagtgacgagctagcttgaaagagaagacgctcctgtcatcctcagccccgtgtcgcttacacagttggctaaccctgcgtgtgctcctgggtcatgtcatctgactgtaaatgagaggccagggtaattagaggaagatgtggaagacactcataggtgtcacaaatccgtgtgtatttttttaatttaatttggaaataaagatgataaagaggcgtgtgatgagggcacttaaatgcggcctgacctcagatggagcgtgctggggctcactctatcgttgtctttttcttggttaccttcaaaagacgttcctcagctgaatacattcagcggtttgggcgcccaatgtgtttaattttgtttcaaagagcgtcagggttataaatgcaagagaagaactgcttttccactcccacagtggacacatccgagagtatgtagagtattgtcctagagcagttcctgctgaagaacgcggctgctttatagctggagcgccaggtcatggcagacttttttctccacaccgtggaggctctttcaagccagtcactgcaattggtcactgtcggggtctgaaagtatgtctgacagtattaggcctacctgcttggtttgcaaatgtgaatcagaagaaggcctgatcggggagtggcaagtgaagcggctgtacgtttcttctagacacattctcgcatgtgccgcaccacaccattctcttgagcaggttcctgataggtcacttctgtgtatttctactctgctgttgcctttgacttctgggggtgtctttgacatgaacaagaatgctatccttgacttctgtaggatgaatttaaaaactgagaactggattttactcttgtcttctgatttaaccacagctcagcagatggttttactataaaatttacggagtgtttattttccttttgtggtcgtttccttcagtattagtgaacatcacatattagtctgaaaactaagaagaaattctgtttctcaattctgcttctgtaataaccattcctttcttcttcctaaccaagtataagaggttcctaacctcttacctgattaaaacctggggcacgctctcaaaattatactctctctcgctctctctctctctttctctctctcccccattaaattccatatgcagttcagcgtcccagcacgatgttatggcctggggcatccctctggagttctgtgaactggcataatcttaacagcatccttctccatgcatgcacagcagcatccttctccagagggcgatactctctgacctctaaaagatcgttattgatttttctgctcctgcagagctgctgcttgtcatctggaggtatagctcaattgagtggctcctcaatttcttgttatagggagaaaaattaggcggcggtatatataacataggtctgataatattgtattatttagccagtcatttaaaaatccaccattgctatattacctccatcatttcataaaagatattttatcaccaaaaaattaggaaggatgaaatctcagaataaggagagtcctttaaattgaagaacttaccttaataaaaaactgtacatgtcctgggtttttttttttttttttatggtaacactgagaatgagggaaagtattatagcatttgggacctgttgcttgaaggcgtctttgatttcaactctaaagaatttgctaatacttccaattcattttttaatctctacatttaaaaatatgttgcttcttagtctggaaaatatctgatcaatgtttgtaaaatgtgttatcttaataaaaagtatctttatatggtcacactaaaaatattgtatctattttgtattttcatttgactggaagtattttaaaaatattttttcttgcattttttttaaaaactgtgaaagattttacatatatacaacagtagaaagagtacaattttttaaaatccatgtaataatggtgatatttttcagtctggcttatttccctcagtctttctatagaaataagcctccattggtttaatattactttgtaaaatttattctaaaagtatccttatccgaacattttgaaaataaagaaaaacaaagcaaatcaagattgttcttagtgttaccacccagaaataagccacgtttatgttttgatataacgattaccagtcttgtttattctcttcctctccttcccttgtctatctggtctttttatatcaataataataaccattctcattttttcacctcttcatgtagacagtcaaattctccaccccccatcagacgccagcccacctggagccgatcctctctggtatgtatagaagctgcagtgatcaagtgatctgactgttgagcattctttgttattaatttgaggtggggggatgatgagggcatcatgatgaggtgaaattttgtgagaacacagaggcgtcattctgtcaagcagatgcgatggacacccgttttgtcccccttggacccatccatgcccaccactactctaagtgtggctgaggctgagggtttaccctgagagtaggtcttattccaggcctgtgggaccatgttccatcagcatacagcccatggtgtgttttcattcccttgctcatctgttctggttgttgtgtgaagatacatcttcagttacgagctccacaaattcctttgtgttcactgccgtagagagagcttaataaactagtgagaaaatgccttctaaatgagcaaaaattgaacggatctagttgatggtctcaggcagagtatctgatggggaaaattgattgcatatttcctaattttaggccttttaaaaaaaatcagaattccaaagcacttccataattttaggctttaattagccagcagagtttgaattgacctagctttagctgctgctttgttgtttgtttgtttgtttgaagctgctctcctcatcatgtgaataaggaaacacaattaatttcaatgcatgtgttctgtcttaggctatgttttattttgaggattactcaaggataacagatgttaagaattggttttctttaatgttttccacttgttttaactcacaattcttttattttaggtcatgatttttttacacaaaatcaaaataagcatatgaccttttaacttctctagatcaacaattctttcaagctgatagaatgcaattgaatttttcttcatattcagtgtatacactatagcatgtctttaacttgtcttttgaagggagcgttttgagaaaagtttatttccttgaaaatgcttagatgtggactctgaattcttgagttgagtcattatattatcgcagtaattcctgagtgcctgtgtgaatattatttctctcagtattatgcacaatatctcacatgtggtcctgggccctgaaaatgtaacagatacgttgggctttcccccgagtaccaatagatttgttcatggcactgatttatttattcttctcctttatgaatgttatcttccttttcccttctttagagtatagatgtctttattagcaaaataatttttcatttacacccttgaaaccctatgggaggcaaagtgttttaaagctctcttgtgatcttatcttgtcctcattatccagagaggatgcagaggcttacctattttatttggatgaagacagtttataggaagtctgatccaattcatggcttccccctttcccctgtcctttaggtttaaaccatttcaccaagagtttcttacaatgagtgagtaagaccaaataacactgtctcttggcttccttgctgataaccaggacttctcattgctgtttttcacctgccctcttctgtctatattttggcgtcaagtttgtttctctattagcaggtctgggaagaaatggaataatgtattagaatatataacgagatgaaataaataatataatcctgaaatgatgtttgagggattagctattattgtcctttgacaatgctgtttgtgaactggcataagtctgctcatttatgtcagttcataaaccgtaacttacttattggwtttttttaaataaggcaagaaaacacagtaaaccaattttgccttgctgtgtatttctattcccttgtacaaatccctccccactgtgtttttctttaaagccttaaaatggttgtgctaccatggaaaaatttagttgaattatgtattgccaagaaaaggaaaaatatttttaaattgcaactcaaaaatcagccaaagggagacttgggaatatagcaccttttctttggtaggcccgaactgctttcttagattgatttcagttcttcatttcttctgtcttgattccttttaattcttggatccctttttttttattacccctttgaagatcaagcattgtttgtggcaaagaaaatgataggtgagttattcacccagcttcaagctcttggccagtgcgtttcttccattgagggatgctgagaaagtgtgacccctgctggatttgggtttcttggtttgatctsagattcttctctcaaaatagtaacctttaaaatctataaggctaatagaaatataagagattggctgggcacggtagctcacacctgtaatcccagcactttgggaggccaaggtgggtggatcacttgaggtcaagagttcaagaccagcctggccaacatggtgaaaccccgtctctactaaaaatacaaaaactagaagggcctggtggcacagcgtctgtaatcccagctactagggaggctgaggcatgagaatctcttgaacccgggaggcggaggttgcagtgagccgagattgtgccactgcactccagcctgggcaatagagtgagacaatgtctcagaaaataaaaaaaaaaagaaaaaagaaatatgagagattatcctgttcggtggcttacaaacgtaagcgttttgagggttttttcccccgcaaatcaaaactcttatttcaaacaaattcttacctggaacctcagtacataaataaaatggagaatgcttgaggtaggggaagagaggagcttgatttgactgacgggaaactgagaccgactgaggttaaatggcttgctctagattacattagtgcataaccgtctttcctttgttggttcaccaaatatttaatccattgaagtttttttgttttgttttgttttgtttttttctctgaaaacttgtccctcttccgcagcatgaagttattcaggttcagtctaaatagccatctttaacagactgtggaagattctgcrctgcggtggtgggtagacagggccctttgcacacttggttctgcaatggggaaggtcagcaagtggtcttgacagctacacactcattgttgtgggccacattttagatatttaaatagattcaccctgggctcagcttaacactaaccctgttcctatttaaggttgatgtggagctgtgaactggggtctcaggcacagctatgttgatgtgtaggagcttgtgaatggaattttgagaacaaaacaggtgtcccccttattctcatttctgagatgggttataataatttactttctctttctttctttctttctttttttttttttttttgacggagtcttgctctgtcgccaggctggagtgcggtagcatgatcttggcttactgcaacctcygccgcccaggttcaacgactctcacgcctcagcctcccaagtagctgggactacaggtgcatgtcgccacgcccagataatttttttctttttttcttggagacgaagtctcaatctgttgcccaacctgaagtgcagtggcacgatcatggctcactgcaacctccaagtcccaggttcaagtgattctcctgcctcagctcgcgagtagctcggactacaggcatgcgccaccatgcctggctaatttttgtatttttaatagaaatggcatttcaatgtgttgcccaggctggtcttgaactcctgagctcagtcaatctgcctgccttgaataatttaccttttctaaaagttattcttgtgaaagaaggcatagagaactttgcaaatatattagaacatagatagtaaatggttacatttagtctttgatggtgacctctttctctttctgatcttgaaccaacttcatttctcccttactgtttctccagttccaaacttagtgatgagatgggagtgcagacgggtagaagaaggttgagtcaaaggggtggcagggacagcagctgccacgagcctcccttacaacgtggcgggactgccgtgtgcctgggccggctgtgtgagtcaccagccgtgtctgcccaggcctcmccacctcctctgtgttctctgtttcagcccaggcagcagccgtacatcctgcctcccgttcacgtccagtgtggtgagcactactcggaaacgcacacctcgcaaggtaactctggcttgccgttctcccttcttaagacaaaaagttgaataccagtaagcagtaaagaaggctttaaaaaaaagatgacagggatgctttcttttcaactttgtcatcgtctgaatgacagtagctaacrgcttcagtttgtggaaggcctagactgtcagttacctctgatcaaaaaatttccccagtattggctgctcagggagtcggggccaaggcagcgagcaagtccttttctcctccctttcctaagggagcttagagaagagagtatgacagctcagcccaagcgaatgcacttcaccttcattgccagtatcagaaagctcgtggcagtcactcagcttttcatggtgacgtagaacacgggcatgcagaataattggaagaaataaacaaagtcagccttttcttttagctgtttttctcatctctttctccagcccctttcttggtacacttgcttttttcttctctgagtaaggtaaatctgttttattcctctctttctcccaaaacatctcccatgcaaaatgtgtgaaaaagcttcttctgctagtaatgactccatgataacaactaacattcatagagcaattgtggtattgctgtaagtacttgctatatattgtcttatgtcatccttaaaataaacctataggtactattattatttctattttacagttatagaaattggaatacagagagattaatgatggaacttatatatgaaaatcrgtaacttgtaatcgttatgctaactgcatttcaaaaagagagatggtagaaaaccgtggatgttggaaatgtagtaaatggataatatagtttctacgttatcaactcctggccattttgaatcctctgctgtctgaaagtgtgagcatgaaaaccaagacaatcaagactatttaatttaataaaaatagtactttttataaggagactggcaaagttaccacatttctatgggaaggcgccaaaccccatgggaggtggataaattgcggcacatttgtctctgtgttccccctgttttttgtgcctgtctcatctgatcagatctctttccacattcttcctcttcagacagttgaatgtcttcagtcaccttttctgtttttcaccttctctgattttctgtttctctgttttgctcatgtttaaatctgtagtgtgaaaatgaatatattttggccacagaaaggcaagaggttgccttccttggggtgtgtgtgtgtgtaagagaacaccagacacctgattgtagaaatcaatcaggttgggcctgattgtagaaatcaatcaggttgggcctgattgtagaaatcaatcaggttgggcctgattgtagaaatctgctttttctctctttaggtacctctttaaactataattaatttttacttgaattgacctaagtgatgaaaccagatctagaggggatttggggaattaccaaaaagaactcttgattctaattttgccctttattgctgctcaggatgaactagctgtgyggacaccctggctacatcatttgttttgtgtctttagaatgccctgcagtcccctgggtgaaggggctttttccattgccgtcaggaagagcagctctgagcacttagtaattgaaatctattgccctattaaagttcttgactgtcttgtctaaatattcagtcctattgccgagccctgcacaagaggacaggcctccccaactggagggctgttgttggtgcctgatttcaaagcttatggcaaaattgagaacttcctcaagcgacacttactccaaatgtgtgcatgccttcttccattaggttccctttttcttttcagtatgtcttaaggtgttctttctgtatgttggcatttcatccaagatagtatctgttattctatagaacatgtgggtggagaccatgggatttcactttttatgayttgtttaaattaaaagtcacctcatgagtatgaggatgtactttgttgtggcaggatggcttggaggttcacgtgcctttgtttgacttcttgtagacagcatttttcatgggaatgaagaagccttgtattgcaactctcacaacagcctggacttaaattatttaaatggcactgtcaccaatggcagcgtgtgtagcgttcacagcgtcaactccctcaactgctckcaaagtttcatccaggcctcccctgtatcctccaacctcagtatccctgggagtgacatcatgcgggccgactacatcccgagccaccggcacagcgcgatcatcgtgccctcgtacaggccaacccccgattatgagacagtcatgcgccagatgaagagggggatcctgcatacagacagccagagccagtctctgagaaacctcaacattatcaacacccatgcctacaaccagccagaggatctggtgtacagccaaccggagatgcgggagaggcacccctacactgtcccttatgggccacagggggtctacagcaacaaacttgtcagtccatctgaccagaggaacccaaagaataatgtggtaccaagcaagccgggggcaagcgccatctcgcacacggtgagcaccccagagctggccaacatgcagctgcagggcagccataactacagcacggcccacatgcttaagaactatctcttcaggccaccgcccccctacccacggccacgacctgccaccagcaccccagacctggccagccaccgccacaagtacgtcagcggcagcagcccggacctggtgacccggaaggtgcagctctcggtgaagaccttccaagaggacagctctccggtggttcatcagtctctccaggaggtgagcgagcccctcacggccaccaagcaccacggcactgtgaacaagcgccacagcctggaggtgatgaacagcatggtgcggggcatggaggccatgacgctcaagtcgctccacctccccatggctcgccgcaacacgctccgggagcagggaccgcccgaggaggggtcaggcagccacgaggtcccccagctccctcagtatcaccacaagaagaccttctctgatgccactatgctaatccacagcagcgagagtgaggaggaggaggaggaggctccagaatcggtgccccagatccccatgctccgggagaagatggagtacagtgcccagctgcaggcggccctggcccgcatccccaacaagcccccgcctgagtaccccggtccaaggaagagtgtgagcaatggggctctgaggcaggaccaagccagccttcctcccgccatggccagagccagggtgctgaggcatgggccagccaaggccatcagcatgtctcggactgacccgccggctgtcaacggggcctctctcggcccatccatctcggaacccgacctgactagtgtgaaggagcgggtcaaaaaagagcctgtgaaggagagacctgtgtctgaaatgttttccctggaagacagcattatagagagagagatgatgatcagggtgagtgtcctcctctcccagggcattttccagtgtgaaagcacatgcttcaggcactgagcaaggggcagggcttatgcagggaacgtggtaggtttttaaggaatcattgagcatttaaaaggtagtactttattacacaaaatgttgagtttttgccctttcagataaatcttccattctcatttgtggcttctaacaggtgtacttggtacgttattgaggccagtgcctcagccagcattttgctgtttattcaaagctcagacttccaattgggtaagctggtattggggaagttcaccttgctgtgtcttttagtgttttgttttcttgaaggaaagctgtcccccacatccagttaggtattaaagagcaacatccctataccgccttctgtatagatccgtaagtcaagactcaccagtattgtctggactgtgatatgtctagctttgtattcagattttctttcartagatgtttcacacagattcaagaaaattatagtaattggatatataacttagtaattggataaataattctccattgaacttattctgtcaaamattcacacacatacgtgaatacacacatacatatatacatacatattaccacttgaagatccatcctagtactagacatgaatagctcttcttcataatatgtacagagccaggtatggtgggggacacctgtagtcccagctacttgggaggctgaggtaggaagagcactagaagccaggagtatgaagccagcctgggcagtataatgagatcttatctctaaaataaaataataataaaaaaagaaccagccagacatgatggcaggagcctgtagtcctagctaatcaggaggctgaggtgggaggatcgcttgagcccaggaattcaaggctttagtgacctatgattttgccactgcactccagcctggatgacaggactaaacctcatcgctttaaaaaaatatattgtacaatttggggagacagttaagttgtcagaacaggactatgcaggcacatatagaacaacraagtgaatctgctcttactaatgagaaaatgtttggattatagctactttaaaaawtctcgactgggcactgtggctcacgcctgtaatcccagcactttgggaggccgaggtgggcagatcacaaggtcaggagttcaagaccagcctgaccaacatggtgaaaccccatcagtactaaaaatacaaaaattagccgtgtgtggtggcgtgcacctgtaatcccagttactcaggagggaggcaggagaatcacttgaacccacaaggcggaggttgctgtgagccgagatggcaccactgcactccagcctggatgacagagcaagaccccgtctcagaaaaacaaaaaaaaatctccattgctgcttgccatgaacattttcactcctttaaaaaaaacctattaactagaactaatcaaagccagattgacttctcttcattcaccatggctgcaccataaggtagccaagcctaattttaggaactccgaaacagttgtaacttaaaatttgctttgatgrattccattaggccaccttcatttccaggtcttcctaacccatcactgggattcaacctgaaaagaacaatcaaggcccaaagttttaaggaagccaarttcctggggtcagraattgaatctgtagcaaccttgttacttttggaaaaccttaagaacattctcaacctcacagttctggccagccccactagagtagtgctaagagatttttatacagatatgactttttgcaaacctagaaggaaattgtgcaaggtgtacctttgcctctagcaaagaaaacctttggcttggaatggaagaaatgggtaggtgctgttgggagagagctttcccagcatggaataaagcaatttattggtagaaaatgatttttcaatacttcttccagaccacttaaaagcaacattagcatcaagaacctatcagtctaagcatttaatttagctatttcccctgccaacttgatacttaatgatgtccacatggtcccataacctcattttggttgtattcatcctcttctcttgttactcgtattaaacaaatagcctgtagccaaaatcttggcatgggtctcctccttagagctccttgcattatcacaaaggaacaaggagattttcactattgttttttctccagatgcttttccattccattcatgtgggtaataatgactagcaaattttagccattaacctttagttcaagaaaataattaccccatttctacttcattttccctgttgatttttttttcccccaaatctgctacactcaggagctcaaggacaccggcagaccttagagktggattaggagctgcttcagtgagccaggaggccaggcaaggtggtgacaatgccagtggctttgagcccaagatgagtctccatctgttttgtttttaatgcaaaaactcaccccatagcctaagcaacatccccacaggtcagatacttctctgctctcctcactatgggcagcttttgccagcttgatgggaattcatgagaggtgatggccattctaagggccctcttgatcagaacacaatgagaaacttttagcaaaagaaaactcaggggctggcggggtgtgcaggtatggtgagaatttgccctctgggcagctctcctggagctgcttgtctgtttgatggatggttccgccgcttttatagcttctcattctggctcctactgcttccttgaagatacttccctgcttgtagtcccctagccagaagttgatgcactgagaagaaaaggccctctgatcacagatcagagcttgtgaattattattattttttttatctctggtaacaagctgatagggtgagtgagaaggatcaaagagacatwctttgatttatcactgagtaataatcctttcccaagaaagacaagttaattactttttgtcttagacccagttagggtcaccttacagtgcaggtggaaagaaagcaggactgctgagaggagctcaggacccattttycaggactattgccttctcaaaactttggagagcagtgaaaatagattcccaagtgaaagaggtggcagaaataaaaaaaaagaaagaaaaactctttctccccaaaactagcagcaagcaaacaaagacctaaaaattttaatccagaatcttcccccagggggttcccgagaattgagagaccagggycatttgtaagaatattatatcttttggtggtaagtccttgggtactgtaaacccagaaaatctgagacaggtctcagttaatgtagaaagtttattctgccaaggttgagggtacacacctgtcacacagcctcaggaggtcctgatgacatgtgcccaaggtggtcggggcatggcttggttttatacattttagggagacatgagacatcagtcaatattgtttctgtctggaaaggcaggacaacttgaagcaaaggcaggaagacttgaagtagggaggggscttccacgtcacaggtaggtgagargcaaatggttgcattcttttgtttctgattagcctctccaaaggaggcaatcagatatgcatttatctcagtgagcagaggggtgactttgaatagaatgggaggcaggtttgcccaagcagtgcccagcttgacttttccttttagcttagtgatttggggcccaagatattttcctttcacagtgcttttctcactttctcccagtaacctcctctgagatactcctttggtttgtctgatgagtcggctgccaccaggataggcatcctgttgtcagtgtcactcacacaggcttcattctgattgtaggtgacattgtggagacacatggaagggcgtcatgcagtcctcccacccgcaattagaataattcataaccctgtgggatggctccgtcaagacctcttcctggggagtgaatttatacatcatagaataaggaaaaaagtctctcaaggcttgaaaagaaaccaaggattcaatggctcttcatctgtgtcagtcaaatgaatctgcaaattggttgcccttcattgtgaatcaaaatcctaaaccctgcaaaactcatctgcttctatgaggaatgcctgtgttcttcccttaacttcaaagacacacttaattttaggaaaggcccttygtggcttgcttgaagtgagcataaagagagctttttcatactcggttagtttcaaggacctgaggaagcacagcaggaggctaaaaaccagccctgcccaatccaatttcaatttagaggtgagggcagagaggatggaaatcaaaaagccacaaaccaggaccaggtgtaaacatcaaaacctttccctaagtggtctgctcagttccggagtccatgttcccccatagctcagtggcatgcagtgatgtcccaccatttgtgttgggaggcaccgtctctgttactgtgggccctctgggtgaagcctggagggtgatgcctgcggatcatcttaggtgaccccagccaggctttgctgttagtgagtttgctaaaccacatcagctctcaattctggggatgacacacccttaggtattccaaggatcagagattaattatagaattaacgtcctcagcattagcccctcaggacggaaacttaggaagattttcctctacagtttatgtgtgtggatctctcaatcaacaacaaactgttttacaagttttgctccgttccgtctgtgcagaaggtccgtcactgtgattggattagatggttcatataaccctgtttctcttttccttgtcctgtcatctttacctttctaaagtgtatcgcatgtaccctattttgtttttgttttgttttgttttgccctatggcagggtgtatttgtagggagtcttttttcttatttattggtctatctagctaaggagttaattaagaataaaagctcaggagtcctrtaggaactggcttccaggggcccagtgggaatagtgggaaggctgtgtttgaatttgccctactgatggtgattgtctgcattccttggctggggagttacagatttgaggagattaaaacacattccaacattctactagtattataaacaatgagcacatgccttttcttgccgcaagaatctagagaagcagaagatggcaggcctggaggcacagaagaggccgctgatgttggcagcattgaatgggctctcggtggctcgagtctcagggcgggaagagaatcgagttgatgccacccgggttcccatggacgagagggtaagtggcaggcttgtcaatgtgaytcattctctgtagtcttaggatcccaaaacaccctccttgcccgaatatgccagcattgagatttgtgtgatgcattctttcttcaatctgagattaggaagatcaggtataactgtgttgcattaaatcagtccctttcagcatctcatgtttctccattccggtcttcctgctttgtccggttggcagatcattggttgactaaaaccatcagcccctaacatgctgtatgacttggtcaagtcactcaatttctttgggcccacttcctgttttgtaaaatgcacaagttaaacacttgcagtagctctgaatttctgtgatttttgtgagcaattgccacttcttaggaagtgattattttatccaagcatttatttttatttttaatttttttaaacttttattttagttttgggggcacatgtgaaggtttattacataggtaaacacatgtcacaggggtttgttgtasgtattatttcatcacccaggtattaagcccagtaccccatggttatcctctctgctcctctccctccttccaccctccaccctcaggtaggccccagtgtctgttgtttccttctttgtgttcataaattcttatcatttagctcccacttataagtgacaacatgcagtatttggttttctgtttctgctttagtttgctaaggataatagcctccagctccatccatgtttcccgcaaaagacatgaccttgtatccaagcatttatagagttctttaaaaatgctgtcccctcgtatgaccataaaatgaggctgatttataattgtctggataatgcattgtgacaacatgggttttgaaaagcagaaagcagctgcatggtagtgtttcagaagcgaagaaaggtggatccttagttcccgaaattgctgtcagaaggttaagaaacaggttgtataaatgtaataaagtactaataacaccagggtgttcgatttctgccagtatgtatccagaattagaatgtttttaaagccagaagggacttcagagaaatcatttaacccaattaataccatgttattggaattagtagtttggccaggaaggaggaaaaaagagagtgatttaatcctcagagctatagaactgtggaccagtatcatcttaaaaacagctatataggtggaggaaaggatgtttggataattaagattaacagtctctttatcattaggactttaaacagagttgttaatagcaaaaatattgatttttgaatttcaactcttgctagttcttgcagatttgttctacttataatatgagtaagaaggaaaatggttattagacaagggaaaatatcaatatggttgataatgagacaaaccaagcattgattgtagaacttgaaatctcttttaacacaatcgctaaatatttaaagaaatttggttgtttcattgagtttttggatcagataatttagagagctgaagatcaatttctgttgcagttcagaaccctgaagaagaaactagaagagggaatggtgttcacagaatatgagcaaattccaaagaaaaaggcgaatggcattttcagcacagcagctctgccagaaaacgccgagcgcagccgaatccgtgaagttgtcccctatgaggagaatcgagtagagctgataccaaccaaagaaaataacacaggatacattaatgcctcccacatcaaggtaagaaggcaagcctgttagaaggtttggtaaagatggctgggttaaagggaaaaatgcrgggagaagaaaatgtgtgggctgcagttgtaccttttggcttgtccccagaccctcagggattgtttttgaactcctgtgcttttcttagtcaagtggaagggcatgtctatcactgcagagagaaggaagtctagcagcctcaggaagaacttcaggtcagcgatttctgaagctcgctcattacagaggctttaacttttccttctctctgtgggctgtaactctctctatactcagattatccttttcagtttgtaattagcaggtgctggagactttggaagttacaggtattgcgttactgacataaaagtgtcatgttcaataacaatagaaactattgtttttcccttataatactgcaggttatgcattttataaaagcgcgagtcctattattgcatggtatttagaagagtggagtaattttcacctacactataaaagtgtggttaatattgaatcttgaaagatttgccacattagtcaatgaatttgtgttactaaatttttgttgttatttcaaatacttcaaacctttatatgtcagtattacatagtttagcacttctgcagttaaaactttgacttatggatacatgtgtacctgtagttaaatgtttcttaaatagcttaccttcctcagagtccctgttaacagagggacacttatttagaatgtcaccatttgctctgaactctgaagtgggagatttgttcatctattaatgttaaagccagtgttataggtgttgttaaataacacaaggttcaattgatagtccactgtgatcaatagccttagaaacctgttttyggccttgtctagaattacttactttcctcattggacttttcaactgtagcagaattattaacaggtttttttaagcctgtaaaaggcgagttagatatctagcttgtgtatcaattataactagttttgatacagaatgggaaaagtatagtatggttgggtatatactatttttattaatatacacagataaccatagtttttaataattagaaagtactgtcaaaagaaatataaaagagtaactatcatagatcatattactaattttaacttggatttttgagagtgagaagtaaaaagtgaactctaggaaactcttaaataaactgtcagtggtgggtttcatgggcttagtttacattatgaaacaatgaccaaagtaatgtattccaacaaagatgcagatcacacagctgcttcctgatagagtgtctatgaaaatcttacatagaaatattatattatcttcttcttttggccagatctcttycactattttccatctgctctctgaaaaaagctgtcactttgtataaactgtgcccatcgggcattgttaaccgaggagcattcccttccttggtattctctgtggcccacatttcatcctgtggatccgggttagacatgggtgcatttcatagacccgtggaccttgcaagaacttgtccctgtgttttggaatagaggagtatattttgccagtgttttcccccctgggttccaagcagccgttaacamagaacagagatttwtttgctccagaggtggaatcacatgtgtgaaatctacctcagcagcactgcttgttgtgtttttaatkcagtttttaatacccttctgtcaatacttggaatatactgaaaggccccaggcagcagcagcattctctggaagtatttatgtttcctatacgttgggtgccagagaggctaatgtttaaaatcacaattccacggataaaccaaactcctagccagcaaatatatgaatgttatctcccaccagtatttggaaaatggatttttcttgccagctttgacctaaacatgccttgtgtaatgagacaataacttacattgtttttgtttgaaccaagttagcatacagttttatcaaataaatgaggggaaaaagtttcaaacaatgattacttcattactttttgaactctccagagatctgcattgtatagatgtagaagggacctgactttgcaatatcaaggcacagacctggaagggagaacagaaagaattcctccaaaggccaccatttcaccttgacagcatgacctttaacactttgggtacaacttcttatttatggttctcagcagctagtatttatagctgtagaattatcttcccctgatcaccctgagctgcaggggtaataattttattatccaaagtcatgtcatgactgtagttcagttggatgctgtggtactaccaaggtgaagctattgataaaatatatgctgttgacaagagcattcgtagcatctctgccgtgcatggcaccacagagcagcagtgacagcagaggtttatgatacacttcatctcagatccacaggagaaagatagtgctccaaaagggatgttgtttcatgatcttttttttttttttattgtttaattggatgccatgaagcactgcttttcaaactggattacaacacagtggtagaatgtgaaatcagtttagtggtcatgaccaggtgtgtgtgtgtgtgtgtgtgtgtgtgtgtgtgtgtgtgtgtgtgtttcartgaaatcgactagaaaagagaaaagaatggaaagtgtyagagtacattgcacatagtaagcagtaactattatttctgtaacaagtaaatcctaagttatacatgttcatatatatgcatctatacatgtgtgtatgtgtatggtttttaataggcactagtttgcatatactgtgagttgcaaacaaagatcaggtaaaggccaagcctggtggctcaggcctgtaatcccagcactttgggaggctgagatgggcgkatcacctgaagtcaggagttcaagaccagcctggccaatgtggtgaaacgccatctctacaaaaatacaaaaattagccgggcatgatggcgagtgcctgtaatcccagctccttgggattctgagacgggagaattgcttgaacccaggaggyggaggttgcagtgagccaagatcgtgccactgtactcccgcctaagcagcagagcaagactcagtctcaaaaaccaggattagataaatatttaataggcttgagtggcaaaaagtattttcatgtgagaatgtgtcactacactagcctctgtagtctcagggtttttgttcattgaactaattcattcggccccaaaaatatatccaaggttttaaggtggatacagatggacaggtgatcagcaggtaatgttgtccggacttggggtttatttaccgatacttttcttggtttttaggtggtggttggcggggcagaatggcactacatagccacccaggggcccctgccacacacgtgccacgacttctggcagatggtgtgggagcagggagtgaatgtgattgccatggtcactgcagaggaggtaaggggaatggcctactccacatcctttttccccaggggaaagggtggccagaagatgggctttgtgctgtcaactttgctaccctatccttcttcctgcagtgctgtttctctgcacatgcttttctctttggtatacatctgttttcttacttccagatagatattttttcccctggagataattgattgttgtagcttttcctcctcccattttcatctggcttttaactcttttccttggattgtaatgcactaaactgaaaataaaacaacagaaaaccaaaaatgacagactttagttcaacctgctgactttctgtgccaaacgaaaacagtgatctttccactggaatttgggagtctcaggctgctctgggcaaatcgacatagacgccaactccaggcacccagctccacatgccatcatccttatcagctgaaaagagaccagaagcygttgttcctggagagtcctctgttctttgggggaagaaaaaatatctttttcttcttttgccaagccaaacatagtttttctgctgtaactagagaactctatgtgatgttataaaaaaccagcctacactgccagtcaatccagtcggtgttgagcttgctgtctttgtggggagaagtgttgtatttcttctcttgtcacattctcaaaatttctttaaccaccttcttttatttctttcattaaattccaatttatgttttgaaatcattcaagggactagtttcatgtgtgtttaccaatatccatggtattgcagtggcctttcctagctatgttaaaggggtcaggaacaaagaaaattggggaggaaaaagtcatattttccttcattgactgtgttgagcatttgcttctcagcacagtccrttagaagaaaataatgaaagggacatcaggctctttaaagccagttgtacttccctgggctgacctgtttgaccttcccacaaagagaatgaatcctccttaaagcttctagaatagatttatcaccttatcagctcacaccattgcaaggcattcattcacctaaatacagcataccatctgtgctaacttcaggagtacacggtaaacgagacaggcaccatccctgtccccatagagcttatgtcctagtgggagggacattcaaaagtgaacagataaaatcagtgcagatagcagtaagtgcygtggcagaaatggaaaactatagtccagagtgggtctgggtgagtacaggtcctcctgcctcatccctcctcctctttgtgtgggtttcagctgcaaaactgtcattcacgctaggggactcctactaaagggtggcttcacratgtgcaaccctgagctccaggctctgtatcatgttgcacacttgctggaaggctggaagtaaaaaccttattaatagkagcataaattcaagggagaaaatttttaaaaatggaaaaagggttaagaaagagagtgactggggtctactttagatcaggggggtggccaaggaccctctgagggagtggcattggaggtgagaccggagtgacaaggagccagccttgccaagacaaagtagcatctagtaatctgtgggacagctggggacttatagtcttttaaaatccataactgatktagacactcagcagaaatgtaaattcgaggtaaatctgctttcacaggattggtaaataaaagaggaaggtatgcttccaatttaaggagactcaattaaaccaaatgaagccaggcaaggtaatttacatattccgcaaagatgtgttgctttacaagtgggctttacaagaggaactctaatgttcctgtaaacagccatcagggttcccagagcctgtcaccactgcagctgtatgtgttcagtgctccttctctctcaccacctactccttgccctgaatctcctcagctaccacctcctccacactccgccccttctccagagattttaaaacggtgcaaagctgaaacatagaccttgtgtaaatggttgagaatacatattctcagaaaagtttataaaatcaagggagaaagaatggtgatgtaagcagctgttctcagttctagttgtagattgaactaaaacgcattggtcaggctgaaacaaatgtgaaatcgacactagataaagacagcatcggtagtcagtgtgctgtaacagaaagagctgtgcgctgaacatccgaaaggagtaacgtgacctacagcgattgctggaaccccttcccgccttgtttaaaacctttgaatgacttcccgtgcccatgggatgaaatccaaactttccaccatggactgtgaggcctttccagtctcctctctgatcgcctggcccctcacatgtcacactccagccaccccgaagaccttcgtttcttttttcttttttttttttttttgagatggaatctcccctctgttgcccaggctggggtgcagtggcgtgatcttggctcactgcaagctccgcctcccgggtttatgccattctcctgcctcagcctccccagcagctgggactacaggcacccgccaccgcgcctggctaattgtttgtatttttagtagagatggggtttcaccatgttagccaggatggtctcgatctcctgaccttgtgatccacgcgccttggcctcccaaagtgctgcgattacaggcgtgagccgccacgcccggctgacctttgtttcttgaatgcacgaagcttgttcctgcttctagactgcacttgcacttctctctaacattctactgcacctcggttgtgaatcttttaaattttccattgatgtaactgtcattgtaaattgtgttattggtcttaactagcatgtataggatctaccctgtggtagacactgcagagtgctactgaactagcgatttagaagctatttgcattttcttctgtcttcatatctyaggattaaaaggatgagagcttcccttgacctatttccaattttgcttttatatgtgatttaggagggtggacgaaccaaaagccaccgatactggcccaaactaggttcaaagcacagctcagccacctatggcaagttcaaggtcaccacgaagtttcgaacggattctgtttgctatgcaaccacgggcttgaaggtcaagcaccttttgtctgggcaagaaaggacggtgtggcatttacaatatactgactggccagatcacggctgtccagargatgtccaaggatttttatgtaagtgtttttcttcccagtctgctacctgactgacttttatgatctgtgtcaataattcatctgttggagatgaaatggaaaaagaggatgctttctcttaagtggcaaaagtattataatattgaaatrtatattcctttcttactatgtagaacagagtataataatacatgtcacttattctgtttacctttcatgcacgtaagctaagactgtgatcaacatattggctctaccttgattcagacctttagctactcatttaatcagtaactattctgacacatgttacaacaaggatgaactttgaggaatgatgctgagtggaaataatccagtcacaaaaggacaaaaactatgtgattccacttatatgaggttcctagaataggcaaggtcagagacagaaagtaggtgagaggttaccaggggctggggcaaagggggattgggaaattacaaatttttttctgaggcggagtctcrctctgtcacccaggctggagtgcagtggcacaatctcagctcactgcaacctccgcctctcagattcaagcaattctcctgcctcagcctcccaagtagctgggactataggcacagccaccacatctagctaatttttgtatttttagtggagatgaggtttcaccatgttcgccaggctagtcttgaactcctggtctcaagtgatctgcccgcatcagcctcccaaattgcagggattacaggtgtgagccactgtgcccagccaggaattacatttgatgggtgcaacatttctgtttgggacagggaaaaagtactggacatggatgatggtgatggttgcacaactatgactatgcttaatgccactgaactgtgtacttaaaaatggttaaactggtaagttttatgttgtgtccactttagcacattttaaaaaaaaggagaaataaaacttaaaaataggccgggcatggtggctcacacctataatcccagcactttgggaggccgaggtgggcggatcacccgaggtgaggagtttgagaccagcgtggccaacatggtgaaaccccatctctactaaaaatacaaaattagccaggtgtggtggcgcatgtctgtaatcccagctactggagaggctgaggcaggaaaattgcttgaacctgggaggcggagtgaaccaagattgcatcattgcacttcagtctgggcaacaagagcaaaactccatctcaaaaataaataaataaataaataaataaaaacgaataacattaaaaaaattgttttcatgaaggtttgcatctcacaagacctatatttccctacagttgagcatctcagtactttctcgtactttctcatatttttatgaagacactaagaagtattgaaaccctcttgtagtttttgaaactgaaatttgctcaatggctaattcattaatttctagtttatgtgtacttttagaatgtggttatattagaaactaattcaccagattatgtgcagtatttttagtttgaaagacccaaaattgaggcatgtacccactacgtgccaggcactggaacgggctctgagaatgcagagatgacactgagttcagtcttcacttccgacgtactcagagcctaatgggaaagacaggccagtcatcatcgtccaaagatgagatctgataccctcctctgcttttcagcggtggctgcagctctccctcttgctttccacatgctcatctaactgtcctgtgcttgtcaggagaccccgttctttactcacccacctggaaaggagccccagatgctccctgtagccttgtgcctgctctgttgttgactctccagctagtggaagacctgtgaccaccatggagggaccatgatccagatgttggatcatgtcaaaaccttgattttattttggtattcatttagaatgggagaaaaggggaatgacagagggagagaacaggttctcaagacctaaaaatactgatttacaagttccaataaatattccgatgtgtacttatccagcaatacaagcatttcatttccttgaaagtgacgatggtacttgaggggtttggcactgaaagcagagagtagaaggatgaytggagtcagagaatctagagtaagatccagagaggactcgtgatttgcctgaagtcaaatggcttgttatctgtagcttgaaataagggcagtgacctttacagaacttcttttcctcctaacagtgctcattgtatttctttcacctgatcacgtgctaattgacttattaaaattttctccaagaagcaraaaagggaaataatataaatagatcagtttgttgattggctaacagctctgatgaaagagtgagcttataaggcactttaaagtatagtcttttaaatcagaaccaattaaggaaagcctgtctaaattaccaaaaaagacatagtattttttttttttttttgagatggagtctcactctgtcacccaggctggagtacagtggcaagatctcggctcactgcaaactccgcctcccgagttcacgccattctcctgcctcagcctctccgagtagctgggactacaggcgcccaccaccacgcctggctaattttttgtatttttagtagagacggggtctccatcttctgacctcgtgatccgcctgcctcggcctcccaaagtgctgggattacaagcgtgagccaccgcgcccggccaatacatagtatttttaaagaatgtaaatgtatgtattatgcttttaggaaagtcaatacacgtattctgtgcagggcattagaaatgttgaatctgtttctcctaggttttaaaagatttttgcccatgtttaaattagattacctggatgcagagtacctgagccaaattgtttactgcccgccagaagtctttattgagttacagcgtaaggarctttattagtatgactgatagaggaaacatcctttgaatccaccttctctccattacatgaaaagctctatttgaaagtggcatctaccgtattacccaacattccttttatttttcttcttaaatttagctcaagtaaagctttgtctcttgtatgtaaatattgcctttggtcagatagaatactcagttgcctaatgtcttttccccctcgcagaaaaattgtaaagaagattccacacacaatatctagcttgtattggtacctaatagtaactactccctctatgcatctcacggcatctccttttctttttctttttttaattgarrcggagttttgctcttggtgcccaggctggggtgcagtggcgggatcttggctcactgcaacctccgcctccagtttttaagcaattctcctgtctcagcctcctgagtagctggaattactagctgggattacaggctcgtgccaccacatccgactgatttttgtmtttttagtagagacagggtttcatcatcttggtcaggctggtctcaaactcctgacctcaggtgatccgcccacctcagcctcctaaagtgctgggattataggcatgagccactgagcccagcccttctttcttttttattttgtcctatctcattgtacattactactactagtagtactgctatgactagtactaataactactactagtcatcatcatcgtagtagtagtagtagtgataataatagtttggttttttggtaaagcacttcagattattttgtaattagataagtttataaaggaaagtatggattatttatatatgtctgtaaacaggtgctttgaaattatttgaatggttcaaacctacttttttctcttcaacaatgtaaacatttcccctatagtctggtttacacttttgccttaggatgaggttcactgagtatcaagaacctttaaacctgtttctgtcctgagctactacaaaatctaaattattaattacattttgggggtttttggagtgtctgaggattacatttccatacttttctcttttgtcatggttgtgaaaaagtcattaaggcttggaatcctgtgatttttcttttgtgcctaattggagtcatgaacgcacccctccctgcacagccctgctgagccaagcagatgctagaaggcatggggggtatcatgaccccctccacctcacacacatgttgcctccagaawgggggttcatcttgggctactcacatagccccgtggaatccatgctgaaaagcagactccccaaagtctactttaaaacccaaaaatgaagtcaagcctcagttgacattcactcatcagtgaggggaaggaagaaggggcagatggatgctctctccccaccagaaattggctctgacaggcgggcgtttcaaggggacttagcagttgttctgatcccagtctgttaatagcaggaattgctgtaagtaatgtctagaatcatctgcttgagggacttagggatttgcagaggggaaaacagaatttaatttttaaaaaagwactatttaatttaaagaacaaattctcccacgaactaattgactcccagctggtcctgtctggatccaggactgtacattgggtaccagccaaataattagtgtcttgtaagaactataaattattgtcacttaaaacacacacacacacacacacacacacacacacacacacactcaccatcagttctcttccgctcccccctccccaacttacatgcgaagccatggaggactttggtgacagaatttgcattttgtcctgcagcctacttggaggagatccagtcggtccgtcgccataccaacagcatgctggaaggcaccaagaaccggcacccgcccatcgtggtccactgtagtgctggggtgggaaggaccggcgtgctcattctttctgagctgatgatctactgcttggaacataacgaagtgagtcattctgggcttctctccggatactccaccttggggacaagtmtacaccctggccaaacctttgcctgcacccttgcattttcagtggttaatttcctgtctcccaaccagagttttccaggctcctggttcctagtttgactctgacatttacagccctccttatctttttgccctcccactgctccgtgtagatacccagataaaacaggagaaatgagggtgtgcaatagaaaacacttagaaaatgtgatcttaggcggcatctacttccagaagtctttggcattttgtagatarcctggttttattgtgggtaattttccatggtgagttatttgaccccatatagtttcgatgcatcttgcatttctaggatgtgttctggcctaaatgctaggtgaaaatgtgtctacttggaaaatgtttttcattcttcagagtgaggtttgaggggttgtttgcttgtctagtctggttgttgcgtggtgtagcggagcagagtagatactttgagcacgcaaacatccccgtctttgcatcagcgggtcaccctaccccttctccctgcagaagtggggtgctgctgagcctgtgcacacaaggtgcgtggcattcctttgctgctgtaggattagggagttacactgagagactttcaattttgtgtaggtgagacaaacagcagtcaaaagctaaggaatagttctaccttctagctacgtgggacattagaagttttaaggggcttttgcctgccatatcagccaagtagaggagccatgaacatgtcactcttcctatttcacagaagaggaaactgaggcccagaaataattacatgatttgtctagtgccatgtggctcttacgcagtggtactgaagccagaagcaaggtctgtgtctgggtccagagttatttcctgtcttcactctgcctccaaacgctgagtaagatttggttcttactcagttttcaaattatatggcttgaaaaattaaaggaaacttgtggtttggtagtttttaaattacagaatgatttgttgcaactctgtggaggaatttatatgataatatacctatttattcaatagcatgaatcgtttgaaaatcagattaaatattgctacatgaagtttgtcatattgaatcatccaggaaaacaacgaatgctaagcttagacattaaactctctgcccatgaaaagataattttgagaatcttccagtctgtccatgggaatgaatgtttgtgctgctaaaaattggaaaaggggcaatcccaactgtagcccaatgttagaaaaacataaaacaaagcttgagcgaaatgttcatcatggaatcagttgagactacataacagaaatgtcattgccctctgagtttttaccattttgccccacataggatttttttattgtttgcctctctattcccatcactactagaggtctctagaaatctctagaacaatgagtaacctgccactgagtctcaatccatccattgctaggaagacaaaataagatgaggtagaatcagtgtgtgcatggcttgagggcctcatcatcaccttccccacctaatcgtcctttccttcccttcatatcacttttgtcaccaaattccccccttgttttcttttctttttttcttttttttgagacagggttttgctatgttgcccaggctggcctcaaactcctaggctcaagtagtccttccacctcggtctcctgagttgatgggattacaggcgtaagcctggccactccacttcyttccccattccctgtgctccgctccctacttccccttttcaactcaagaagccattctgtcttgtctgacacgaaagactattctgttctgagctctttggagacccatcaaaggctgagcctcagtgaggcaatgacatgggggctcactgaacaccagatgttactggtctggcagagcacagacaagcatatcaaatccggaacagtttggagtaagggattcggccagtgtggcctcctgtggacttggtgaaggctcagggtggttaaatgctctatggtgtgtccaaacatagcggatttcctcagtgcccaactgcatgccagaacattctttgctgggacgtggtcaacccaaaaagaacttctgttcccattgatattcaaagatagcaagatgactcatatttttcacttctcttcccctagcacaaatatagccastcttatctgtcctatttcccatggttgctattggtagatggttagcggggagaaatgctctccttttgttctggtactgttcaggcctggctagtaagatccaagcccctatttcaggagaagagtagaccatgtttagtttattttgtgtttcaagcaaagattttaacaaatatatattaaattgtgggacccatttttctcctgtccaaactcccctgccttctttccacagcttctggatttagcatactttatattttagtctgtaattcatgcagttttaattctgtcaatgaaatggcctttctttttcctggacttgtccctctcagtctcattctaaacacagaaaagttgagcagaaacaatgaaacacagacacttacaatgaggttggtagctgtgcagtggggagtggggacagctgtcccaggctgctctgggaagcctccctgtggcccagtgcttttggtcactgagtgttagctgagactttttaaggtgcatagagtttttcagaaagcactcrttttatggtctgcaggacactcagtcccttggatgtagctgtctgttccagctacagctaattacaaaaggtcaggatctcagtagccaaagggcagatgtcttgatcttgctgcttttctgagtaagttatacctccttcataaagtgaggaggagaaaatgtcttctagacaagattgagcaattgtcaactgctttgtgcttccttggcttgggggcagttaagagcagagcctgtgggagtgaatgaatctttaagccagctgggaccctttcattgaagaccaggagaactttctttgtcatatccccagacttgaacatatcagacaatatactgtcatttaggctcagtcctacaggtaattgagatggggatgatggtagaggaggaggaggaggatgtggtggtggaggaggtggtgatggtgacaacattgaaaataatatcgtaacagctaacttgtgtctagtgtttaccatgtatacgcactattctaagagcctgatagtattaacacaagtagcctttgcagtgacactgtgagctaagtcctgttagtatctgtgttagtccattctcacactgctataaagaactacctgagactgggtaatttatgaaggaaagaggtttagttgactcataattctgcaggctgtacaggaagcatggctgggaggcctcaggaaacttacaatcatggtggaaggataaaggggaattaagcacgtcttcacatggcagcaggagagagagagagcaaagggggaagtgcaacatacttttaaacaaccggatctcatgagaattcactgtcacaagaacagcaagagggaaatctgcccccatgttccaatcacctcccaccaggtccctcccccaacactggggatttccagtcaacatgagatttgggtggagacacagagccaagaccatatcagtatcctcacataacagaagagaaactgagtcataagtaaatgaagtaatgtgcccacttcccacagtcaagaagtggtagagctgagattcagcagatgaagccttactcagagcctgtgctctgaacaccagtgtgatcctgcctcctggctaaaacctttggtgggtaggggagggaacagccttattctctctattcttttatcttcagtgcccaaccgcagagtaatcctcatcaaacatgaaattaagttcattattaggtggctctaggtcacatcttatactggtcactttgcaatataatttaggcagagacctacttgttactgtcagaagcttataacctaggctctgtattttgattcatagttcgaagattcacatgccttttttttcttttcttattaggcagggacttgactttgtccctttgcaccactgtgattgcaccactgcactctagcccaggcaacgtcgcaagtttgtgatatgcattccttagttggtgttgaacaagagtgactgatggcacgtgtcatgtcatacctatacacggcttggaaatagcttaaattattttttaaggttcaaaggttacaaagtcaggcatacagctgagtttttattattttcttttaaacacttgcttagcccttgaaaacttcctgggtgccatcatttgccctgggttaagagctcccagagcagagtgaatgtgctgaggccaccatggcctccacagctcaggggtgctccagcygtatgtgtcctggctagtccaggaggatggacatggtgaaggtgaggggagaggacactgtgacagcctctgatctgctcaagtacccatgacactgaattaatttcctttcattaatgatagtatatatcatcgtatatattctcaaagaattcacacataggcaatctcatttaatactcaaaatgttctcatttaagactcaaggctaggcacagtggctcatgcccataatgctaagacttttagaggccaaggctggaggattacttgagctcaggagtttgagaccagcctgggcaacagagtaagacctcgtctctacacaaaattttaaaagttagccgggtgtggtggtgtgcatctgtagttccmgctactcaggaggctgaagtgggaggattgcttgagcctaggaggttgatgttgcaatgagttatgatcgcaccactgcactctagcctgggctacagagcaagactctgtctcaaaataggtgttctcggccaggcgcagtggctcacgcttataatcccagcacttttgggaggccgaggcrggcggatcacgaggtcaggagttcgagaccagcctgaccaccatgctgaaaccccgtctctactaaaaatacaaaaaaaaaaaaaaattagccaggcatggtggtgcgtgcctgtaatcccagctactcaggaggctgaggcaggagaattgctagaacctgggaggcggaggttatagtgagcagagattgagccactgcactccagcctgggagacagagtgagactccgtctcaaaaaaaaaaaaaagaaaaaaagtgttctcagttgaaggcttttactccaagtaggactggtgttcagagatggcgctttgacattttaaaggtytacacttaaattatctcacttgatcatgaccacagtcctgtgagattataattgcattaataacatttattaatgttaataaaggaataatgaggtcaggcggggtggctcacgcctgtaatcccagcactttgggaggcctaagtgggcggatcaccagaggtcaggagttcaagaccaccctggccaacaggacgaaaccctgtctctactaaaaatacaaaaaattagccgggcgtggtggtgcgcacctgtaatcccagctactccggaggctgaggcaggagtatttcttgaacctgggaggcagaggttgcagtgagccgagatcacaccactacactccagcctgggcaacaagagtgaaactctgtctcaaaaaaaaaaaaaaggaataatgagtaatatttattaagcactcactgtgcactaaatgcttgatatgtgtttcatcatttgatcccatgaggcaaatgttatttcataccccatgttattgctgaggaaatgtaactaactagggcaaggccacactgctgttagaggaaagcattattatcctgattttacagatgaggaaactaagaccctgagaggtcttaaatcctgtcattgggttgcaggggagttgagagtaccattcaggtctaactccagcctttatgttttaaccagcagactagtctgtattcaaaataatacaccaggacaggtgtggtggcccacgcctgtaaccccagcactttgggagactcaggtaggaggactgcttgagcccaggagttgaaggctgcagtgaactatgactgtgccactgtactccagcctgggtgacacagcaagaccctctcagaaaatttgaaattaaataaaaataaaatatcccaccagtgacacatgatgaccaggttctccagttgctgatataaactgtttgatgcataaaacccagccagggcagagtcccttgccttctcttgtacctggacatgggcagtgggtgagtgcttcctgaatgagggaatgaggaatgctcaaagggaagcctcctgtctcaggaccttgtgctttctctcttttcttgcagaaggtggaagtgcccatgatgctgaggctcctcagggagcagaggatgttcatgatccagactatcgctcagtacaagtttgtctaccaagtcctcatccagttcctccaaaactccagactcatttaatcaccccaatccagctcctggaggarggacccagctccatcgcgctggaggagagtcacctccagacaacatctgctccccccacaggggtgcaggtggctggcagcaaacaggctctctgaagacagtagccaagattattcacacataccatgtattattttatatgagataatttatttttttcccctttggaataacttttgtgaattattataatgcagtttccctagtaatatagtacttttcatttgaaccacatcttgactgatctgtattgtaatatatgtcagcaggtaaggttgcctgctggatcattttgaggacagaggcatgagggagcacatctcttgtgaagttgcagccagatttgtaaccaaccctgaaattcatcagcttaattcatttatcagcttgattcattcatcattcattgcttatatccaaagcaaagacggtaagaaaatgaattcatcctgaaatataaagaaaagggtctgaaggaacaaacacgattctcttatattttggggctcatgagccttgatagacagtttcctctcgtcttcatttccacccctcatcctcagtagtctcctctcccccacgccccaccccaacttcccccccaagcttgagttaaagacagaatagctaaagacagtgctgcctttacaatgcagtaattgccatctttggggccgaaagacaagctctgtgttgtgcttttcttgaccaccccttatcctgggctctggagcttgtgtttccctgctggcgactgtaccttgggtatttgttgctacctctcctgtttgctcagtaggaccctgtctggtggcattgaggctctggaccagaccatctgtgcagttaaggctctaccctgattgagagaggatagcagacctagaaagagaaaggagttgggcagggcctttgaggattgtgtttttcaggcagggccttgatgatcattgttttttatttaaataagatgtgtgtgctggacagagacctaaaagttgaggtcactaagtcattggaaaggccatcaaggaaacagatggggaagctgatttatgggagctgtaaggcatttagctacataacaggggtcctggccaggaaacacatcaaatgtgacccccgctgtgctgatatcatcttcaggctttggtctgcaagatcagaattaatcccactcgggaccccatagtccaaacttggggccacttgatgaacgatggtagaattgtcattggcagagccctgtgcttctttccttttcttcataaaatccactcgctggtcagttatcttcactttgaagcccagttcttagtttcttcctatggcttcattggtcagtgtccttctgaatttccaaggatggtacacaataaatcatgttttgtacttttttcctcttactgcattttgggggatttatcattctatgtctaccttttcttgagtacagctttgatatgcacctgttgttacgtggtgatgggaagtcacaggcgtgctctttctagttaatttgatgccacatcttccttgtcttttcagcttgggaaaaaggcggcagtggaggaaggcatggaatgcccacagtggtcagttcaaagaacaaacgtgcaattaaaaaactgtagtcagccaggcacggtggttcacacctgtaatcccagcactttgaaaggccaaggcgggcagattgcttgagctaaggagttcgagaccagcctgagcaacatgatgaaaccccgtctctacaaaaagtacaaaaattagccaggcgtggtggtatgccctggtagtcccagctgctcgggaggctgaggcaggaggatcacctgattctaagaattcgagactgcagtgagccgtgatcttgccactgtagtccaggctgggctacggagagaccctgcctccaaaaaaaaaaaaaaaaaggaaaaaaggttgtcaagaaaaactagatgttaggagaaaggaaaatttaattgcagttttttttcttagaattgactgctgtgagagttccatatgcctttcttcattgctgcttttgtcccccgtgagctaaaaagatggagtgacatcaaatcaaccagaaaaagtatgcctttgtgacatcccatcaccacatgccaacaggtatatattccccattaagttcttcggaataggaatcctctgtttcaacctggccaggtgttgtggtggctgtactctagttagactcggaatatctggggatggagggcttcccctgtgtcttctacttcaaggtctgaaggctcagtgaaggagtataatctgctgatctttgtagattctggagttttgttgtatgtcctggaaagaaacccattagtattacatgtattttcagtgaacagagcttataacccttattataagaagctcatcaataagcaaaaagatacttgtttcctttccttggaggtttttccatccttgggatattctgctgttagggatgttttagcaagtggtctcagttactggtttattgcgtgatgaacaacatcagtatttatcttttatctctaagccccaaggtgggcactgttagaatatgtctcatgtggacagcatatagatctggtgcgtctttgaggtcgtcagagctcatgggcttccctgaaattcatccactgtccctgccgtatgctacgggaatatacattagtgtacaaaatgcagggaggaagtaggtttaatattcaactttctagccaaagtttatattgaaacccaaaagaaaacatttaagagttgttccacatatttcacttttaaaaacaaatgcctttggttctttagcacattttgcattccttttcacatctccagtaaatgccaacatatctcctgttaaattagcagcagccatttaaagtcctttcggtggcatctgcataataattgcccagagatgctttatatctgggaagcaagccaaggaataaaccttgaagcaaagtgtattaaattagttatctagttagagcttttggaatgatttcctgatgatgtatcaagtctgaagctggagctgtcagtgtctattgctgcagtttggatttgaagggagaaaatgtaaaatggaggaaaaaaaagttaccatctcacaacaaagccatcaaacattttccagccgctgttttcgaggttttccagttgaactgtttggtttctttcatccacactcatttggatacattgacccgaggtattcatccttgtttactgtggtccctgaatcatgggggctgaatttgatgtcttcatccttgagatgagcctgctggcttagctgaggaatgtcctgctgaggtttcttaggtttccttgggttctaaggatatactggatataccatcttttagcaagagtatctggtagcatttacagatagcatagacattggtatgcacttctttccccagataggaagtaaaggaggatttagttgcatgaaaaaaggatgttaaacattgattacataggagtaaagatgaatgagctgcaatattcagtcggagctaaacaataagatcagggaaggtaaaaatacctatgtggaatattttgaatcgtaagcttttgaggagcttaaattgagagaattttacttttaattttgtagattgagaagaggaaccgctttttaaaattatagctaaactgtcattgttttcctaagagtcacttggccatctctggccccctctttcatcagcctgaagagagggtctttgtagactgctgagggtgggccttgtaggacttgaccatggcttacacctacttaacctttatcctgctttctttcagcttgtgcttttcagttataaactccagtgggtacagcaggctggccttttcatccagctgattatttttccagcttaatatagattgacccatatgaaatttccaataatggaccatattttctgcaaatagacagtattcgcatggatcacctatatcttccccctgatacactgtgggtcccaacaccagatgtcatttctccagagcagtgctaatgaacacaaaaggtataccctgggtggcccagctcttttcacgaacgtgctgccctgctcatagtgatccttgcatcacttggtgaatgggccatctcctgggacatggaagttgcagaggtagatagtgcactgcagcttctcttaagccggattggccatcaggcatatcactctggagtttttagctgctgtcctttcccgatgagcagtctgtattagctgacctcagcctacttgttacgtgacgtatgggtcccaaaagtgtcctttgtcaaaaagcagaatgtgccttctagtctccctttccccatctaatggtgtattcgatggtgaagatgagtacagttgaccacccctatctgtgggttccacatccctatattcaaccaagtacagattgaaaaatatttggggaagaggggaaacccacaaagttccaaaaagcaaaagttgaatttgccacatgctgaatactacattgaattcacacaaatgaagtgatgtgtaggcattgagttaggtattgtaaataatctagagatgatttaaagtatgcaagagatgtgcataggttatatgcaaatactgtgctattttatataaaagacttgaacatccatggattctggtattctcagagggtccttgattgccccctttggtaaaggacaactatttcgttactgattttcgtttggggaagatctgtcaatcccttgaggtgcgggggttggggggatggagggtacagggcattctaggatgtgtgccagggagcacagattcaagggatgggattgagtcagtcctgtgttcttactcagtgtcagaaataactctgtggagctcctagagtaagacatttccggaagcaccacataattactgttgggctcttagggtagcccttttagggaattgagcattcccatgttttaccaacaattattctgctgctgtgttttattatattgccaatggttttgagacactcatcatgctcttatttagtgatttcttttcatgagcagagcaacagctcatccagcatggtttccaaatggagaaatttgggtcttctgtagaaaccacacaaattctccaatggcctacagccttatggttggcacactagttggccctatagggtggaaataaagctgtaagatgttaaactgcatttgatacttctcttgaacgctgagcaaggaagcaaaatagttcttgtctttacttaagcttctaagacattttggggcaaaggaccttacagatggcgtctgttgaaagtaacagcaacgtgccagggagaaatgtgggggaaatctcatcaaattctgccacctcaaatgtgttgtccagaagtcagtgttattcagggggccctgtgaaacttgaccaccagcttgcgccatcaacactcagcctttatccagcctgctctcagcttttgtgtttctgttagaaactcagataggtaagtatttttattcagtagactacctttcttatcttttcagcttaatatagctgcatcttctttctcaaagccaaactaagatattccctattaaaatgtccatgagcctagcattgagtgtctggcatccatcaatttcatagactggaaaatgattgttgtttggtacagtaaagaagaggatgtgcatcagttcctaccgtttgcagctttgtttttagccttcccattttaaaaataaattcaaggacattgagttacaaggcaggagggctggagctactgggcagcctgaatatgacaagcatttgtgtggaaagtcattgctccttctgccacactttgggccatcaggatcattctttcccagaagkgccataaacttgctcaaaagtttctataaatgggaagagggagaggaaggatttttgcatcagtcctgaagttgctatccaaaagttctctgtttcacaaataattttctgaactctggaatgcctctcctactccctgcctccctttctgtaatgtcagagtgatggaaaccaccaagtggcatgctagggaaagcctgcagcagtgttggagtctatttcaccctagctcatagttttaaactgtcttcactgttgaggtagagctt

SEQ ID NO: 94363 - DNA, 210775 bp, Homo sapiens
  misc_feature (1)...(210775): n = A,T,C or G
cagggaaacaaacgggggaggcacggatgaccaggatgagggtctccatgacccacctttccccaggggctatctcaagagctttttaaacttttattattttttaatagagatggggtcttgctgtgttgcccaggctgatctccaactcctagcctcaagccatcctcccacctcagcctcccaaactgctgaggttacaggtgtgagccactgcacctggcctctctcaggagtttcaagaaaaaaaatgggaatagatttgtgtgtgtgtgtgtgtgtgtgtgtgtgtgtgtgtgtgtgtgttttgagaaagagtttcgctctgtcacccaggctggagtgcaatggcacgatctcggctcactgcaacctccgcctctcgggctcaagtgcttcttctgcctcagcttcctgagtagctgggattacaaacatgcaggctgattttgtattttcattagagacggggtttcaccatgttggtcaggctgatctcgaactccggacctcagatgatttgcctgccttggcctctcaaagtgctgggattacaggcctgagccaccgtgcccggccaggaatagattcttttctgtagatgacttctgtcattattgaaaatggatgtttatgcacaattgaattgtcataacgcctcatcctaaaaagctcctttttgagaaaatgtgacttttgatagaggagagactgtccaggcctcattcattgtcagcacaaaggcagagcaggggtgtggcggtgtcaccctcctctgagacagccccatccctgctctgcccaggggttcagaagtctggtctattcgagcccacagaggggtttggagtggctgtcttacatcacaggtggggtctgtaaggatctgaaatgacctttgagaaggcgggtgtggtgggtgcatttcaatcattaaagtaacaacaatgatacatcaaatagtgtctgctcagattctgagtgcctgtttaaacatttccatcttgtgacttgccagattctagcataacaacccaggtaaaagaaaaaatagctgggcgtggtggcttgtgcctgtaatcccagcgtgaggccaaggcaggaggattgcttgagaccaggagtttgagaccagcctgggccacctgagaccccacctctgaaaataaacaaaccaataaaagaccttcatgctctatgtctttcttatatctaggttccccaaattatatgcattggggaaagtccattaagagaagcccctggccgggcgtggtggctcacgtctgtaatcccagcactttgggaggccaaggtgggaggatcacaaggtcaggagttcgagaccagcctggccaacatggtgaaaccccatctctactaaaaatacaaaaattagccgggcgtggtagtgcatgcttgtaatcccagctacgcaggaggttgaggcaggagaatcacttgaacctgggaggtagaggttgcagtgagccaagttggtgccactgcactccagcctgggcgacagaaaaagactccatctctaaataaataaataaagggagagaagcctctgggctcctagatacatgggtcagtgtccacccctgcaaagctgctgtgcccaaagaggggctgtacttggtggaattggggcaaaagagcagggagggcactgggcagttgacctggtctccactactggaaaggggctgtgctgctggtgccctgagctggttccacaaggaagacactgcacagggcgccctaagtttgctctttctgcctaggctcaccctttcctctccaggaccagggagccccgctcgtctcctgtcttcggcatctgctctctggcttgtgagcactgcatttctttctgcttggaacgccggcccatggtgggtccccrgactcctgccttctgctgtcttttgccatatctcgtcaaagtgtgttttatttatttattgttattattttttgaaacagagtcttgctctgtcgcccaggctggagtgcaatggtgtgatctcggctcactgcaacctccgtctcctgggttcaagcgattctcctgccttggcctcccgagtagctgggattacaggcgaatgccaccacgcccggctaatttttgtatttttagtagagatggggtttccctatgttggtcaggctggtctcgaactgacctcgggtgactggcccacgtcagcctcccaaattgctgggattacaggcgtgagtcaccatgcctggccaactattataatattgatattataataatatcacagccagataacggtgactaacgcctgtaatccgaacactttgggaggctgaggcaggcagatcacctgaggtcagttcgagaccagcctggccaacgtggtgaaaccctgtctctaccgaatatacaaaaattagccggagcgtgatggcaggtgcctgtaatctcagctacttgggaggcggaggttgcggtgaactgagatcgtgccactgcagtccaacctgggtgacagagcaagactccatctcaaaagtagtaataataataataataataataatatcacttattgagttttaattttgtgccaggcactgtgctagtacttgcgccatgtgacctcattgactcggaataacctatgagtaagcaccatctctgtccccaaggaagctgagactcaggaaatggaagtcatctcccagggcccacagcaagggcctggcgaggtctgcgttcaaattctgatcatctgactccaggctttcctgcctcctttgcctcccaaaaactcaaatactttcatctgggatgactccagacagctagatttcaattgtcttctctccttctgagtatgttttattttaaaatcacataaagataactcacttctcaactggagccacggaatcgttagatgtcttggagacttttctagctacctctttgctggactcagacacaggcctgaataattaggtccaaggagctgaactggagccgctcgtggccagaggtcccttcctgggaacagcagtggcggcagcggctgcgctgagcctggcaatttgttcaagagcaggggatgctcaggctgcgctcgcccccttcttatgaacggtttgctttgcgtcttctctgtgccaagggctgccaggcaccaratgcccattttaggaaatcagaaaaataaacagtgtaaataaaacaaaaactccacccaagaaatctgagacagatgctgttttccccaccgtttctccacccccatgctgggtttggagagagtgggccagcatgtttcctacggataagaggccctggggtatttaacctggatggaacctcttctattttccttttgcctggtgctagggggcagaaggcaggggtggtgtccatctggcccagggaggaggatagggcagcctttgtcgccggcatcccctgcagagatgtctcagccagaagtgactccatcctcaggaacgtgtgtcctgttctttgctgggcggcccctccttaccccccattgtttccacagtggggtgtgctagatttatgggcagagttctggttcactctcagccccggacagcagaatgtcccagtagtgcactgatggtgtgtgcgtggggatgtgtggaacaggggatagtgaccccgtgtgcgttatatgcagtgcggcttccagtcgggtgtgtgaagggggtgctcatggccatcgtggaagtgagctcagctggggctggagggtccaggctcactgtatgccactcagcagccttgggagtggggttcatcctcctccccgctcctctcccctcctggtcctgggcagcccaccggagctgcactctgggccatctctcctggtcttaaggaggctgtcatttctgggaggcagatgctggcccttccatccttgcttcctggagatctgcgccgaggtctgcctttctgtctggagggactggccaggaacccctgggttttcctggtggggtttttgttgcttagcagtgagcagagtgagtgggcaccaagaggaggatgctgggtgaggtcacggacatggctggggcaggctgggggtgctggaggtgaattccgcagctgtgcgaccttgggcagtttgcccagccctgggcctcgcttcctcctctatgaaatggggcgggagcacctgcctgctggggttgtgggttgggtgaatcggagctaaggtacagctcacagcctgccgtcagaccctcgcaagcagaagtgggtgtccctgctcagcgtcctccggtccctccttcaaggctcagctttgtcctcatctcctccatgaagcctccctggttactccaggagtcacgacccacaccctctttggagccttgtgtcacacgcatttctcacggtgttgctttccctggaggatgggttcaactaaaattggggcccatctgggggttccctccagcaccagagaagctcaggcttagtagagatgggtaccctgtcaatactagttccgcgaaggatacactgtgctcattctgctgccagttgctgagtctggtgtcctgtagttatggaacatgtgtacaggcctgggctgctggacacgaaggccagatgggcagttcactctgcctccgctctgagcctttagaaacaagctggctgcacccatttccatctggtcacagtttaggagtggggttgtggaatggatggaaggaaggatgagtgggtgggtgggggggtgggtgggtgggtggatggatggatggatgatgggtggatgggttgatggatgggtggattaggtggacaggtgaatggattggtgggtgggtgggtgggtgaagggctggataggtgggttgggtggatgggtggatggatgtgtggaggggtggtggggtggatggggtccatgggtgaatggatggatggatgggtgaatggagtaaatgagtgggtggatggatggatggatgctgcaagagcctttctggagggttccagggaggaactggcatctttgaccagcagccagcatggtgatcagatacagggaggtgtctgggtctgcctgatcccttatctcactgttggtgggactgggctggttatgtgtccctgaagctctctgaagggtggctgtatggcattgcccaggggacatccccagagtgccgtgctctacagcaatagggtggccgcctgtgctcccagggccgctcctcctggcagcctttcgggtttgcttggcttagcacctcagcaaatctcctcgagttaggacttgcctgccatgagcctctccaacaagcagccccaggccaaggcctgtgtgtgggcagagggagcgcatgccgcgggaggctgcattaatctgaggttctgtttttgttccctcctggggcaaaaggtaaaaatagcctgtcccactccatccccaaatccagcccggctgcacccagccctgggagtgaagggggctgggtcaggactgcccgtgagttgtagaccctggtgtagggaaaccctgattcataagacgggtggacatggaggaaggaggagactccgtccagcagagacacgcttgggtgcagcccagcttggagtctgatggacgtgggctcacctgtgtgcaactctcattcactgtgtggccacagggaagtgacactctgtggagactcagattccttatctgcaaaacaggggtagtagggcttgggggaggatgtgtgtgaaggtttggcccagggcccctccagcagccagacagcagtggctgtcatccctccagcgtccagggttacctgggggagtagggcctctgtccccagatgggccccgtttctggctctggaactcacagcaggagcaaaggcgaggacattcctggtgttaatcatccacccggagggagagcgccagtggccttgtgtgacctttgccctttgtctctgtctttaggaggcacgcggacctccagtggccggctccggaggcttggtgactccagtggcccaggtaggtggctcgctccgcyctggccccacccagctcatgggtgtgtttgtgctggggtcccttcattctggtctgggacctgcctccccacctggcttccctggatgagtggggccacttgcccatttcccagggagacgcagtctttgacggctttggactcaggtggcttccaggcctgtcgacgctgccctgctggagatgatccttgtgggggcaggggcagccacccccaggctcagggagcaagcccgtgtgtgcgggacagaggagagaacaggagatagatagggctggatgatttggtttgagatgctgaggggacagatgtgccatggacaggtggctttggccgtgagcctctcggtgttggttcagtatctgtgggctccctgcaaccttgcaggatggaagatgctccaggatagagcagatacgtccggtgttatctaggaggaaataagtgggcctctggcagtggtcactgtgctactccttgtgctttttccatgtgtttggaaattttccacactaaccagtagggaagggaaacagatgcacccatcagagctctggggctggccgtccaggacasgagttacagcttataggcttgragggactctaccaacactgggtgcagcctgggcaagggagtgggacagagaggtcagggctctgcctccagcccttgccccccagggctgagtctgcgcgtcatcttctccccactgggtgtccctgatctcccctgcctgaccccagtgtggccatgctagtgcctctgtttctgggagcctacgttgttcttggctgtcacttccagcggccaggctgggacaggtgcccatctagtggcttttctatttggagaggatgatgggtcacagcaatgaatggacttacctcccctaggagacgaggagctctgagaagagcagagatggcgtggtcacctgtgcatatgtgctgggggccaactgggtgccagacccctggctgccatcatggtggcagacaggcagggactgtgccttcatgaattagccattctagaggagacaaagttaccaaaggacacggacccggagtcaaatccacacaaatagagcgcctgtggaccagggctgccttcagaacaaggtgagacagccgtcctgccaggacaaggcgcctacgggggcaagggcatgtgcccatctggagccgccacctccatgctctagaccagctccgtctaatagaaccttctgtgatggtgggtctgttctatacatctgcactccgccatcctgtatggtagccgcttagccgcctgggtctattgcacactcaaagtataaatgtttacgtttactttattcactcatttacttgcatagaattatttatttattttaaatggatttccacttatatctacgtgtggctagtggctatgaaactgaacagttccagaccacactggcacctgagacctcagaattctagacccaaagcctgcttctgatcctgagcttgcttctgtggggacagcacagacgcctcctaagtctgccttccagaggtggatgcagtgcccgtggactgtgcaccaccaggcctggacagtggagagggtggctttttacagggagtgggagtggaggggatgccgtgtccacattgagtgcatgtgaggccccttgcagtacaggatgggactgtatgtgggaagagkggggtgatgctctggctggaggcccctgggcagctgcatgattcagcgctgtggttaagaggggctccgcccatcgcagtcaygttgggcactaaccactggacagcccagccgctgctgtgtttctggggagcttttctccggctccgcatctgatctgcctctccatctccttccctctcattggccagcttctggtggaatgggtggggagggtcccccagttcttgtgggggttgcatcttgggaacctggcaccctgggctgcatggacacagcctcccccggcggttgcttccctctgctcagactggctggttctgtgctgtcagcacttggcagccacgatcacagctcagcttggaagcctaaggcataatttgctgaatcccaaagctgcaagctggtgatctgggtttgcgtgggactgcctgctgacacacggggtcctccctctgtgggcctctgtgggctctggcccgagacaccctttcctcatcttcttggcttctttctttctccctgcctcccttttgctaagaccctggtccaggcaggagttcattcctagacgccccagcatctccggcctccccatttgacactccccagacgactgtctgccatcccatcctcccagcccagcttctctgtagatccacatctggccaatctcctatgtctgggactcttgccctccccagaaggacgaaggctcttctcgaggttgtgtttgggactgggccagggatgacatttctggcaaaagcttaaatgacaccatgatcaacgctttggtcagctcacacactttctttccttttaaaaaaaaaatggaattcttagagctacaaaacaaaaatgtaaagaataaggtaataaaacacctgtgtactcaccatcccgcttaagaagtgagacattgcaggtgtagccgcagccctgggtgaccytctccatcctagccccactcctgctgcggtgcccgcccctctggattgggatctggccccgggcaggcacatctgtgctgggcagtggtgtgtctgagaagcctaggtctccttttttttttttttgagatagagtctcrctctatcgcccaggctggagtgcagtggcaccatctcggctcactgcaacctcygcctcctgggttcaagcgattcttctgcctcagcctcctcagtagccaggattacaggcacccgccaccatgtctggctaattttttttgtatttttagtagacacagggtttcaccatgttggtcaggctggtctcatacccctgacctcaggtgatccaccygccttggcctcccaaagtgctgggattataggtgtgagccaccgcatccggcctggtctcctcttgcatacggtcatcagcatcgtgtgactgagcagcctaggtctgtctcctcttgaatgccgtcatcagcatcacatccttggtgcctcactggagtcagtggctgccctgcctgtgcccacaacgtgacggcgtggagacttatccrtgtagatccacgaagccttggttcacttattttggcagctagcgagtgttcctctgtgtggggaggcagagtttgcccgtcccgtggcccactggtgacatcgccgaaggtcttctctgttactagtgctgccgggaacgtgtgtttccccaggtggatttggctgggctgtggagatgcgcttctcagcccttctagatgttaccaccrcgccctcccgagtggccttctggtaggctctcccatgttcgctcattttctgtgcctcaggcagccgcctctctgactgagcgtccagctgacttttgccctgtttcccacggtgcacggagcatttcatctcagtggtgcctgagcttccctccctctggccctcagaccccggctgggatccttggagccaactcctctgcctgacatcccgtgtcgctaggtcctgctcttccatcttccaatacctctggggtgtgtggccttttccccagtgcccccatcatcccttctgtcctaggttgaaccgtgtcccccacaaactcatgtccaccaaaaacctcagaatgtgacctgggagttggagatggggtctttgcagatgtaagtagttaaggatcttgagatgaggtcattctggattagggtgggccctaaatccaacaactggtgtccttaaaagaagcagagaggccacagacacaccggggagagccacgtgaaggcaggagcagatgatggagtgacgcagccccaggccagggagcgtctgggaagaggcaaggaaggaccccccccccaccccaccccagagcctccctagggagtgtggccttgctgacaccttgattttggacctctggcctccagcatgggagagaacccgcttccattttttcaagccccacagctgtggtccattatggcagccacaggacactgatgcacctcccacctggccgctgtggatggacgaccccgcccgcaggaagtctccctcaagcactgcaggtgtctctgccctcacaggggacgcctgcacaagtaggtgtgaaaaaagggccctgtgggggcarggcctgggctggtgctcgctgcctcccttcatcctatgctagttcccatgcctcttccggcaggagtgcctggctccacctggtgaatcagagccaaactctcctgacaattggctgtcacttatttaactgccaccatccccaggagacagaaaatgccagaagggtggggcctgtgcagtgcctcctcgctatttccccagggcaccgtgccacgttgcctcaatgcacagagtagctgctcaaagtgtgtcggasraacaggtgccccatgcccagccatgcagacaaaagtgtgccacgtggagggagctggtcgtggaagagaccaccagcatcttggctgcccgaggaccttgcccctgggctcttgcaggcacccctagttcattacttcctctctcacccatagctacccgctcttcctctatttctctgatatcagccttgccacccacccaggtttgcaagcaggaaatctcagagttgaccttgacctctgcctccccagcacccccaggtctcaacaggctgccaagatctcatcaactcgccctctgcatactgacccttggacaggctgccccggtcacggtcatgtcttggttgggcctccatcatccctccttggaccagcaggtgccatcctccccacccctgccctgctgtggctccttcccctccacggccaacatttagaggacgattaccacttccytccctgtgtgctggggaccgggtgataggatccctccacccgatcatttccattagacctgggccgggtcttcttactcacagagcccttagtttccgcccccaaagcctcgagggtggattcgtgctgccgcccagcctggccctgataccgctttccagcctggagccccctgcttctgcgctcctggctctgagtgctcgggccccccctggatgggttgccacttgtcctctggaaagcagggcttccatgctcctggacctcctagctgactcaggtgactttgggccatcttgtcacaccccttctatcagcttggccttggttatttctgtgtcctccatagcctcggaccagagccayggcgggatgctttcctggtgcgtggcaggcagtcaggaaatattgctggactgaccttgataggagatgcttgggaraattgcccaaaaaactagcttaaaatgcaaatattggccttcttttgcgttggctaaagagtagcatttctccgtttgcctcccgggtaagaaattgatggcgaatgcaatgtctctagggaggagaagaaggtgacaaaaagggtctgtataacggggcacacgctaggcatttgtgactatttaagtttaaattataacataaatgcgaaactctttgccttggtagcccttccacattgcaagcgttcactgccacatgtggctgccatattgactacggcagatacagaacattgacatcattgcggagagttctatgggggggcgctggtttagatcatcttcacgttggatccacaaattcattgtttatccagtgaacggttactgggcacctactgagcaagcaggatgaaagacacccgctctcgggggagtcttccgttggctgcagagaagcttaaactcaggggacctggggcaaactctgcaagggcccttggcctctgcacccccagacctccctcgctctgcaggggcagtcgggggccccctctaggaatggagcgccagctccagctcctgtcaggctacagcccrgatggttggctgagcacgagcatgtgagagtggaattgggcccaaccgggctgcttctccccgttgtcttggtttccttccacgctgacctggaaggactcctaaagcaacaggcctgcccaggcggtttgcaccagtaaaccctgcagcggccccaagggcagagatagctggattgtatttatttaggaacagccaaagtctgaggcacaataaaaagtggagaaagattccagagaggaatgcagctggcctcagcctgggaatccgtcttgcttgggaggctgtaggcgggccaggctggggccagcctggagggtcttggctggctctgctggcaggtacagtagcagggtcagcaggagggagtccaggacggagctccttcatttttaattcagggaagcaarcttcagtggttgagtctgaggatgagcaggaaatgaatggaaaagtcttttttttttcttttttctttctaggcagggtctttctctgtcccccaggctggagtgcagtggcacaattatagctcactgcagcctcaacctgccaggctcaagggatcctcctgccttagcctcctaagtagctgggactacagttgtgcgccaccatgactggctaattcttaaaagaaatgttttcaggctaggcatggtgacccatgcctgtaatcccagtacttttggagccgaggtgggaggatcacttgagctcaggtgctccagaccagcctgggcaacatgacgagaccccgtcttgactaaaaatacaaaaagttagctgggcgtggtggtacagccctgtagttccagctacccgggaagctgaggctgcagtgagttgtgatcacgtcactgtcctccagcctgggcaaagggagtaaggccctgtttcaaaaaaaaaaattttttttttttttgaggtggagtcttgctctgttgcccaggctggagtgcagtggcatgatcttggctcactgcaatctctgcctcccaggttcaagtgattctcctgcctcagcctcccaagtagctgggattacaggcatgagccactgtgcctggacttttttttttttttttttttttgtagagatgggatttctctatgttgcccaggctggtcttgaactcttggcctcaagtgatcctcccactttggcctcccaaagtgttggaattacaggtgtgagccaccacacccagcaggaaaagtcactttttaaagcgagaggttgtgcgtcctctatagcttggcgctcatcagcatggaggatttactggaacgtgtgttaggtgaggggacatggaagatggcagcaaatccgagcccagagcatcagaaagcatgctttcagccaaagatgcgttctctccacctccgcgcagcacccttccccagtgtgtactcctggagcaaggtggggccgatcctacgaagaccctttcccgaaggcccctgctgcccacatcagtgtcacctggaccgcctgctcccttttctggatggctggaccagccccagggcctcctggcctggtgtggggagcacagtccaccctggggaatgcctggtatgtgtcccctccccactgggtaccaggggatgaagctgtgcttcgtggaaggggacagaggcgctggtgcccaggatggtgcacctggggcggctgaactggayctggcycctactgggcccctgtggagcccagattgttgtgagaaggggtggggaaaggcaggtgatccgcacctttcacttttgtttcacatgggaacaggggcttatcctgcacacatattcagtttggagtatgaatttccatgaagaggaaaatctctattaggctctgatgtcaggattgtccgtgagggccgggccgtgttctggggcaaggacaggagtggagggggcaaccagggaaggcttcctaatggaggaggcatttgatagcatcttgaaaaagaagcagttcctaggccaagccagagactgaagaatgaccacctaacttcttttttttttttttgagatggaatctcgcgctgtcgcccaggctggagtgcagtggcgtgatctaggctcactgcaacctccacctcccaggttcaagcaattctcctgcctcagccttctgaatagctgggattacaggcatgcgccaccatgcccagctaatttttgtatttttagtagagacggggtttcaccatgttggtcaggctggtctsgaacccctgaccttgtgatccacctgcctcggcctcccaaagtgctgggattacaggcatgagccacygcacccggccacgaccacctaacttctttctacaagatgccccctgsstgacgcaaagcaggttgagtgagtgtgacacttccttcctgtctgtgggttccggcctttccagagcccggccagtgctattggagacaaagtggccttcgctcttccttcccgccctgccaggcccagcctgtgccgctgagccccactttgcaattaagaggagctgtgaaccagtgatgctgatgtcgcagaaaagtggccaggggtctatggggggtgaaggacagggatgccgccctgagaactgtctggaaggggcttttgggtaacagtgcccactccagggtgtgggcaggctggggtggctgggagctgggctcataggctggcacaaccagagtttcccaaagccgtgggcctgagggccctgccttcctgggacagcaacctttggtccaatttgggaaaaggtgggttaaaccaagcccrgctccctcactgtaggattactcagtgcgtttagtatgcaaatgtgcctctgaatctaagacaggaccacagaaacctcttcagtgttcctctggagggagggaccgcgggggatccaccgcaggggcctgggtctgcactggcctggtgaagtgcccccttagtgcttacaccatgcgcggtgagaggttggccctcgcctcccccaccctctgctggccttacctcaccacctctgcactcgcctcccagccggctcatgactaactcctgcctcttcagagccaatcggtgctgccaggttttccatttcaagtgatcccccgcctgggccaaaatgtttggattttcaggcacggaggggagayggacctcaggccaaaccatgctgggtaaaactgagggtcaaggctgtgctcagcaagtgctccagccctggccgtcaaacccatagtgtgcacagcgtgcaggaggtggctgggtgaatgaactcagtcatagcccggcccctcactcggggctgttcccaagttcccaccgccagccaggctgggtcagagcctcgtggggccttcctgggcttccctgccccacagcaggagttcgtatggagagtctcgagtgaggttaatgggttttcttcctcttctttttttttttttttaatttgagacagggtctcactctttttacccagccagggtgcagtagtgcaattatagctcacagcagcctcgaactcctggcttcaagcaatccttccgccgcagcctcccaaagtgctgagattacaggcacgtgccaccttgcccagctggggtttctgctttttactttttctcttgtttctaaactcaatacaaagaaagatattacatttataatcagaaaaaccaacaaggaatattatttcaaaattggaaaagggattaaagaaacaaaccaagaaacctctgcgattcctgcccatcggagtcagtggttgttagtggttggcttaacacaatgttttaggaagaaatagaataacagaaagcaactccagtgagctgagccctggctccgtctgtggcgctgcatcagtttcctgcagctgctgtaacgagtggccacaagctggctgggtcacaacaacgcccagccatcctctcacagctctgcaggccacacatccgagatcagggtcaccaggctgaartcagggtgtccactgggcatagccctctggaggctctagggcaggggttcccagccccgtgtgtcctattaggaactggcctgcacagcaggaggtgagtgactggcaagcgagcgaagcttcatctgtatttacagtcactccccattgctcgcattactgcccaagctctgcctcctgtctgatcagccatggcattggattcttataggagagtgaaccgtattgtgaacggcacatgtgagggatctaggttgcgtgcttcttatgagaatctgatgcctgatgatctgtcaccgtctcccatcaccaccagatgggaccgtctggttgcaggaaaataagctcagggctccaactgattctacattatggtgagttgtataattatctcattatatattataataataatagaaataaagtgcacaatcaatacaacgtgcttgtggccgggtgcagtggctcacacctgtaatcccagagtgaaactctgtctcaaaaaataaaaaataaaggccaggcacagtggcttatgcctgtaatcccagcactttgggaggccaaggctggcggatcacgaggtcaggagttcaagatcagcctggccaatatggtgaaaccccgtttctactaaaaatacaaaaattagccggacacggtggcaggcgtctgtagtcccagcttcttgggaggctgaggcagaagaattgcttgaacccaggtggcggaggttgcagtgaactgagatagtgccactgtactccagcctgggtggcagagcgagactctgtctcwataaaataaaataaaataaaataataaatataatacacttgaatcatctcaaaaccatctccccactccctggtctgtggaaaaattgtcttccctgaaaccgatcccaggtgccaaaaaggttgggggccactgccttcatcgcctgcccctttgagcctctggtggctgtgggtgtcccttggcttgtggctgcatggcccttaccttcaacaccagcatctacagatctctccgggccccatctccacttggccatccctgtctgtgtcaaatctccctctgcccccgtcttgtatgagcaccgagactgcctttagggaccacctagaccatccagggtgctctcgccacagcaagatctgcaactgaatcacagatgcaaaaactcttgttccaaacaaggtcccatttgcaggtctagggattaggacatgctatccctggggccattattcagccttctctcgtgactatgatccctcccttcctccccagcctcccacctcggctgagatgctgtccccacctccctcactgtctggctgcctgtggggctgtcctccaggctctttgggaggaggtggttgcttgatgtctcccagaaggctgggaatggtcctccccaccccccaggaagatgtcctttctgccaaggagattgcatttggggtcctatcccaggcagagagcggacgggactgtggcctgaagtggcacttcagggcctttggctctgtcatctagccgagggctgtgcatgggcctcacctggtcacaggtaactcacctggctctgtggggcagggattgtaaactcagaggcctgcggggtgtgtcgaggtagaggggtgcaaatattgtaaatttgttgggggccttggggagcagcacagactgaaaagtgttttgtctgaagagcagaactgtcttataccagccctgtgcggccaggcaggaaggcttccgtggtgcggccacgcgtcctccctttctcaacagaagctgacagtctggagttttcagagagattgcctgagttctcagccttggcacaaacacacattctctttaaacaggcttgggccaacagaaccagcctccgtgtctcgggtttgaatgaacccttgaggtgaagcttaaagacagagaggatgcccctgatccccaccccagggacccacattgtaaacccccacctgctctgctgagcccttggcctcagcatggaccctgaccatgtgctggtggggaccccccaggtaagtaagcagcctctgaggaccccggatgaacagtggggaacagcactgatcccccagtggggccccgagttcccggagaggaagactcgctccctcccaggggacggctagagactcactgactcatgcgtgtgtggtaggaatcttccaggaagtccccgtcccgttcgccctctctgcctgggcgggrayggcaactgcctctgtcactgcagactaatgggacggaggggggtgacttctcagggttcctcctgggcaggtgctccggaaccttttctcagcacgctggcctggggcacggccgttcctcctgcccagccacgttggggtacagggtgaagaagggctggggccagcccaggacagaggaaggcgaggcaggcacgcaggaactgggctttttaaacccttaagcccaaggaaatcgtagcatcgcgggacagggaaaatgaaagactttggaagtcgtcaggaatttgactctgtgagttggtttccaagagtctaagttaagcatctccaagtggatattaaaaaggagcagcaagcctcggggcggcgggggctggaggaggtggagagaggaggctgccggaagccgcactcgggacctctgcagccaccgaccagaccgggcggccgggactctgggactctcgcaggcagacccggtggtctgccggactcctcggggcccacttcgggccctctctcctgcctcctatttttggatttctctcctttgctccctttttcctcccgttttgaagagacaatgctacttcagtttggagcacaaacatatgatcagcacatggaaatgtggtaattcggatgcattcgtgattgcaacagattgaagaaattagaccagacaaagagtgtttttagaggaggaggaggaggaggaggaggctgagagagggagggcgacgggggtgagaaaggggaggccgcctctgagcgggacgccgggactcccgccgctgctaaatatatccgtaggaatggagagggaccggatctcaggtacgcagacagccccctccccatyggccgccccccactgccctggactcggggctttatttatgcntgggggaataagcatgcaaagggcgcttttgctcatttttcacagaaatatttcttttctttttgacggttccaagctcgtgggatgaactccgtctcagaagctaagctctcctgagtctggcttttatttaaactcggctctcctctctcctggctacttccctttcattttccagtgtgccattcttgcatgtcatggccactgtcaatgctgaggctgttggcgccgaaaccttgggagggtgtgggggacctgcccccctggctcgggtctggggcggcggcgcttggacctggctggtggttggtttgtccactgtgtggtttgttttttgcttccagccaaagtctgtcttcaaggctgcctcggtctcctacctraaatagcatttctgtgccttcctggcagttgattatagagggggaagctcccggcgctcagaggagcctggcgtgtgtgtgcacgtgtgtgtgcatgtgtgtgcgtgtgtccattcacgctggcagcccccttgccgcaggcacagacccatcagggcgtgaacaggcaaatgaagagaaagggggctcccctgcctttagttcaccccagctttccaggccctccctcccaggcccagcctccttggtcccttcactcacatgcggtgccgtggctgccatctcacgtggccagcgccgtcatcggtaattagcagtgatgacagtttctgccgctcatgccgccctctgagcccagcgctgggagacatggggtggctgagccaagctccaggctttgggtattctgaagtgacctacgggccatggagcgggaggtcgctaagagtgtcaacccctacgtgccttgggccctggtctgttggttgccactatgtgtgtgttggggggtccctgagaggcctgagagagggaggcccatctcggtggctcctctctaggacgtgtggtcccctccaccactgctcccagggccacatctttttttttttttttctttgagacggagtctggctctgttgcccaggctggagtgcagtggcgcgatctcagctcactgcaagctccgcctccctagttcatgccattctcctgcctcagcctcccaagcagctgggactataggcgcccgccatatttttttgtatttttagtagagatggggtttcaccgtgtcaaccaggatggtctcgatctcctgatctcgtgatccgcccgcctcagcctcccaaagtgctgggattacaggcgtgagccacggcgcccggcctcagggccacatcttgattgtcacgttgggactggtggagcgggtgtgtgttgtgccgctgagcacacccagtcgggcacagcaggcggacctcaggagggggccaggggagacggcagaaggcttgggtggcagtgaaactgcatcttatctgtttgagctcgggggctcaggcccgctgggacgggtgggtgtggagcccagcgtcctgctctccgcccagcaggagccgcagggcagggagcgctgagagggaccttcgtcaggcttgcacagtggagccgtcctcggagtgaccaccccaccaggcagcctgggcagaccacagtgggtcccctgcctcctgggccaccagccccaggaggacgtcactccacccgcctggctggcaggggcctcggggagcctcgggttcggccttcactttatagatgatctagccgaggcccagatgggtgaccagcaggggatctgagagctgagcagagaggcgtgggtttgggggtggtgctccctggggagctggaagtgatggcaccctcccaggctcacaaaacacgggcttttcatgaactgaacaaaacactctttgaaagcagccagtgctgtgccccagagaccactctgatccctgctgcccttggctgaggacagcacagccagggatgaagcggggacctcccctcgggctgtgccttgatgaaagatgctttctacaaaatcccattcggatgtgttttcatgtaagaaaacgtacatttttagaaactcagttgtaaactggctgccttccgaatgaacacgacagtcccggagctgtttcccttaatgaggttctcgtcctgggcaaactttagcgctggtctttaattgtcactgaactcccgcacagtccctggggaagtgacttccttcctgtccctgctgggtggccttgagcaagccacttggcagctctgggccgcagttccgtcatctgcaaggtgaggggtgggagckgcacggcccctaggcagcgcccccacctcctgcgggtttctgcgcgtgtcctgagttttgtgggcgcctcttccctcactgaggggctcttcttctctgcagggcatggctcacgccgcgttgtcaggctgcaagccactgcgagagctgctctgatccccaagcatgctctggcctgaggaggagccatggggaggacgctgtgcctgtgtgacagaggcctgcccggcagatgccggcccgctgacttccagacgtggctgtgggtgcctcatgccccactgggctggcgtgtgaggcgtgtccagctcaggctgccctacagctgcccaggaagggtttgtgggagggggtggtcctaccctggtgagtccacggtggtctgccagccccagggaaggcttaggagccccaagacctgccctcttgtccctccctcggcagtgtctggctccggtctggtttgtgaacgggggcctgggtactctcccgccctccctgggggctgtggccttcccctgggaaggtgctggagggtttgtcagcagggccggcatgagtcatggagtggtgactggccgctgaggcatggaaggccactccttccagccaagggtcggagctttttttttgttctggaacggctttgtggcttttacaaattaagcagttttatcttgttccaagagcttgtatttcagcagggagagagtctccaagaagggaactttccactggggagctctgttgggctgggaggctaggaacaggccacgagggagggctgcaggcaggggaagtggccgtctgtgcatggtcatgaatgcaggcccggggtcctggagggggcttggccacgctgtcgctggacgtctgtccccaccagggtccatctgatgcagtacggcacagkgtaaagcccagctcctcttacggggttcctgggtcatcagtgggcggggaaccgaggcctcctggagggcggtgcctcagccctcacccctccctcctgtccctcgctgtgctgtccccgatggcctctgccatcccctgggagttcttacccctggacgctcggtgcctgtccggtctcaacctctccagctctgcttttccatctccgaggtgagaggcctggcctgacgcgctctgcacccgcttcctgcccagccccgtgggaactctggtccctgtagtggtttcctggggctgccatcaccargtgccacaaactgggtggctcaaaacaccagacatttcttctctcgccgttctggaggccagaagtccgaaatcacggcatcagcaggcctggttctttccggaggctccgagggggagcctgcttctcgcctctggcagcttctggcggctcccgaaacccttggcgttccttggctcgtggccacaccactcgacctctgcctccgttgtcacggggcctccttctgtgccctaaatctccccctgtctgtctctcatacggacagtctttctcggatttagggcccactgggtaacccaaaatggtcccatctcaagatccttaacttcataacgtctgcaaagaccctttttccaaataggccatgttcataggctctggggtggatgtaaattttaggggccrcctttcatccccctgttgtccccgtgtgtctggatgcacagyatggttccatgtcccagactccttgctggacccctctggccctttggggtggcctttggccttttccactcgtttctgtgctcctggtgaggtgtcggggtcgggcttagcccctgcaggaattctggggacagcatggagccggcaactccccaccaggcgtcttcctacctgcccagagctcatggttgtgaggggtctctccttgtggttttgatttgcaattccccagtggttagtgatgttgagcatcttttcgtgtttattgctcatttgcacatattcttgcagaaatgtctgtccaagtcctttacctgtgtttgatttggatgattgttgttgctgagtgttaggagatctgtagattaatatccagatactaatcccatatctgacctatgatttgctgccattccatggattgccttctccccacgttgttagtgccctttgatatgcaatttttttttttttttttttgagatggagtctgactctgttgcccaggctggagtgcagtggcatgatcttggctcactgcaacctccgcctccctggttccagcgattttcctgcctcagcctcctgagtagttgggattacaggcacccrccaccacacccagctaatttttgtatttttagtagagacggggtttcactgtgttgactaagttggtctcgaactcctgacctcaagtaatccacccgtctcggcctcccaaagtgccggagttacaggcgtgagtcaccgcrcccagsctgatatgcaaatattttaaacttctatgacgttccactttatctatttgttcttctgttgcctgtgcttttggcgccatatccaagaaatcattgccaaatgcaacgtcaggaagcttttcccctgtgttttcttctaagagttttgtggttttagctcttgagtttaggtctttgatgcaagttgagttgatttttgcatgtggtgtaagggctggtccagcctcatgctctgggctcttgattcacttctcttcttttctcacgcccagctggttccgctgggtggcggggaggagtggggaagtcccgggctgggcctgcactcgatcatcccctctcaggccagccagggagtctcagctcctgcccaggacctggctggacgtgctccctaccgggaaagcctgggccgtctttctaggctgatggcagggccagcccggggcgtcctgaggcctgccctgcggacatgccccttgttctaggtggtgtggctgcccggcctgcgtgtgagaccagctgtctgtgcttcaggccatggaggctgagtgtttccagcctgtccccttgctcggctctccctctggggaagcccctgcagcccattctctgcctccgcttctgccatctgtgcctttgtctgcttcctgtttggaggtggtcatccctggggccacccctcatgatctggacacragtctccatcctgaagccaccacccaaacccctgtgcctcaaacccctcccacccaccacatgggkttccactgtgaccaactcagcagctgatgaagcttcccttggggctctcctagcaacggggagctggctttcccggaggcctggcctctccctaagtggaagtggggcgtgagggtgtcagcctttttctgctgcctggtgctctaggttggcttgtcacccctggaagcacttgccatccttatacagcaccccacacccacctccccgcctcctaccccttcttccaaggggtcatctctgcttccctccccacccaacctcacccaygtggtccgcccagcaacctttgacccccaacatgacaaaataaacctcccttgccggtcactcattcattcattcagcattgggtgctccctgtggacttggcgctggggtcccgtggaggacaaagccagacacagtccttgccctcatgggactgcacaagtgcaagaccacatcagtaaacgtgaaacacaggaagtgacaggtgtgacaaaggggaccagtggcaggacagaacctgsggttcgtaggaccaggtcaggagggctgcctcggggggacaccttcgggctgagcgcagaaggatgaggggagtaaaccaggctcaaacccagcaggcagaggcgatcgctgcaggcaaccggcaatgtgttcaaaggccctggggcgcggggggctgaggccggcagcacggcaggaagtaagactggggttgaaagagactgactgtcatgttgtgaaatatacacttggttttcatctccatttcctggcacacaactcctaaaatccttggaatctccaaagtgatgtctttttggatgctcatgattgacagaccagctggcagcttcaggatggttcccagggaagaccaggtagaatcacaaggttcagcaccaccccgcaacctccaggtaggggagaggggctgaaggttaagcagatcatcagcggccaatgattgaatcaatcatgccttcgtaatgaggcctccgtgaacactcagaaggatggggttccgggagcttctggatggwtgagcatgtggaggctcctggagggtggagcgcctggggagcacatggaagctctgcgtccctcccccataccttgccctacacatctcttcccctgtatcctttgtaatatcctttataataaactagtaaattccatgagccccaggaacatgtgtaaaagaaaaaaaaaagaataaaccatagctgctgtagcaagttaatcctaccagcactggctctcatctgccgaccttacctctggcaatgcctccctctcctgggctcctgggacccctccggccccaccacccctcctgtagtggtctcgctggctgctgccctcaggttagtttatttttacccggcctgctcccaccaggggctgaggcctccytgctcactccagcttcctggcccgtctcttgctctgggcacccccccactccgaacggccagagcttctgaagccgctcgctgtgtgcccccgcctggccccatgcatcccgcacggtgctccccagggtctcccactggcaagggcattggcatagattctggggctgccttggttcaagcccaccctgactgggagcctgagggtccctgagggggtcctgaaggccagggcaggcaaggctggcatgctctgggcagtgggggctgggtatgggaggggatcgtgggtggggagattcctcttaaccagcggcccacgtttggagactgatttgggctccaggctacgccttgaaattgggacagagagtggcgcagatctcagcccggagactccctctgcctgtggacgccctcatacctccatccgtggagccaccctcctctttttttttctaaatggggaaactctgacttgaacactgaataaacaacacaccctcgaaatcagcgaagaggcactggctctgaaactttgccatgaaagcttgaaaatgctctttggaccgatttgctggaacagacgggtgtgatggggctgcggggtttcaggtggcaggaggcgtccccgtgcctagggcatcccgatgctcagagtttccccgtgcccagtgtgtccctgtatccagggcatccccatgcccagggtgtccccgtgcctagtgtgtccctgtatccagggcatccccatgcccagggtttccccgtgcccagggtgtccctgtatccagagcatccccatgcccagggtgtccccgtacccagggtgtccccgttcccagggcgtcctgtgcccagggtgtccccgtgcccagtgtgtccctgtatccagggcgtccccatgcccagggtgtccccatgcccaggcactgcctctccccactttcctaatctccctccaccaacaggtgtcagctgtgaaatgcctgctgtgtgtgtcctttggttgagttcatcttgtgctcttaagttcctgttagacacaggcaggctgctttagttcttctggcaaatgttttgttgttgttgtttgatacgggktctcactccgtcacccaggctggagtgcagtggcgccatctcgcctcactgcaacctccgcctcccaggttcaagcgattctcctgcctcagcctcccaaatagctgggatgacaggcgtccgccaccatgcctggttaatttttgtatttttagtagagatggggtttcaccatgttggtcaggctggtcccgatctcctgacctcaagtgatccacccagcttggcctcccaaagtgctgggattacaggcatgagccaccgtgcctggcccgtctggtgaatgtttattgaggcctactatgtgcagcccctctcttaggtgcttggcctgtaatgaggagcaacaaagacacagtcgctggtcgcttgttacttaacagttggaactgagaggcagtccacaaatgagcaaatccataggtggttttagatgaggactgtgaagaagctaagaacaggttgctgggggtgcatatctgtgtgtgtggcgaggggattaatggaagccctttctgagtggtgacactgagctgaagctgtaatgaccagaaggacccagccaggccaaaatccaagggaagagcaacctggcaaaggaaacagcaggtgtgaaggcccgaggctggagcctggggaaggtgggagtggctggagtgtgttttcagagacgggccatggtgacaccaatgcgacaggcagggccaggtcgtgccgggccttggaggccctggtgagggcttgattttattctcactatggtgggacctcagtgccctgtggctgctgagaatggccaggggcaggcagggaggcctgctagggaggaggctgctgcaggccctgcagctggagagggaggatcaggatctctttagagaggaagttggagagggaggatctctttgattgctggatggacccacctgcctggctgcccccgtcagcatccagcagaggccactggatgctgacaggtggccggccctgcccagccttgcactgccctgtgctgccctggtggctgccggctttaggaggagcgcttttggtgtctgagcccagtggtcctggctgtggtttggtacacttggccgtgggtgaggccaaggtggtttggatcctgggaaggttgggtrcctggcagcctcaaggcaggagctggggtgttggaggaggaagcacgctcatccctcgttccttcctgtttcgtgggatgctgagtctctgggcagggacatggtgagccctggtgtgatgcacttaacacctgctggtgcccccatccccaagcaggaaccctggtgcctggtgcctgaggactgctgtccaccgtcccaccatccttcaggtttcttcccagcctctgactcggggcaaggttcagatatccagaacattcttggctggctcttggagctggggtgaggcagaacctccctcccatatttacagcaccagccaaggcttcggggtttggacaccatccctgggaggggtgagcaggacaagtgaggtctccagacttggggtggcttcggactggccaggcaggtgggtgggggctgcagtccatgcccccgctccaggcaacacagtcgagctgcagcccccgctccatccccagctggggctccctgtgctcaccttctgcttccttcctctccctcggaatggggggtggacactccaagactagcctcccagccactctccctgcctcctgcctcctctccttcgggacagacccctgtgatcgctgggtgttcctgatgctctgtcccctctgcgtcctgtgccgtgggtgagagagggcttcggggggacttccccctcttggagcacctgctgctccgggtgcctctgggggcgggcccccacctcacattgtggagctggtgtaggaaggaaggtgccgggagccagctccaattcacgtgctggctgtggccctcaaggtgtggatggcaggaggtggtgagacagggactcattgatcatgggactgacaccccctcatgttgatgtgggccctgagccatmatctcaccagctcctgagttttggcgctgctcttggcgatggcgtggactcagccaggctctcgggcagcctttcctggattcttcctccgttctcccctgggcagtgtttctgttcacctggaaaggatgggtaggacttggagacaacagggattcaaagaagtcgggagtgggggcacctgtgcagctcaccctgcagaacagacaatttggttaaagcctaaagcctgctgtcaggagcctcgcttgcctctcagagagcacatggcttgaccatcacggggactgggggagaggcacaggcatgcctgtccggcagcagaagggaaccccrggcctgggcctctccattctgtggcgttgtctttcctcagagttgcactgtctccctcactgtccctgcctggccccagtgctcatgtggcttgtggccctcagtctgggcttggtctcccgcaattcaccctgcccagccccacacagcttgtccctccagctgggaatcggagctcacctggagtcccaggcagcagattcgatgcagtgatgcagggctgtcagccatgccagcrggccctgctgctcacagagggatgggtattgctgttgacaataattaaagaactacggcttcaggctgggtacagtggctcacacctgcaatcccagaactttgggaggccgaggcaggagaatcaattgaatccaggagttccagaccaggctgggcaacatagcaaggctttgtctttacaaaaaataaaaaataataataataataaaaactacagcttcagaatgattgacttcagcwtgtttataaagtcaagggtcttcagtgtcctgggcctatgtcactgcgtcagagggagagaggaagaggctggggtgatgggcactggggcttatgctcctcctggaatgggtggtcttggactgtgcctgtgtgatatgtttgtcgagcgggggcggtgtccactgaggactggatgttgaggtgtgggtggggggaggttatgaagcactgggcatttcccgtgcaccagtgccccgagattgcagagaggggacccgcccagcctgggcagggaggcgggtggcagcgaggaaggggagaggaactcgggtgcagaaagcctttcctccagcaggtggcgccgcaagctctcgagagtccagctcctgcggggtttgcattttcactgaatttgtgggcagaggctgcctgggtgtagtttccgccaactgtgactgctcactgcgggcgaggggaagtggagtgcagagaatgcaccggagggcagatgaccagcccccgcacaggcacgggggtgcctccttccccgcacaggcacggggggcccgagcccttggggttcctgtcctaactgggcggggaaagggagggttggaagctgagttagggggaaagggggtggtctcctgccatctcttttattttatttttcctatttttggttgataggtttcaatcttttttacatttttccaactttttgccgtaaaacttttcaaacatagaaaagatgaaagagggctgagtgtggtggctcatgactgtaatcccagcactttgggaggttgaggtaggaggatcacttgagcccaggagttcaagaccagcccgggcaatatagtgagatcccatctctataaaggatacaaaaaattagtcaggcatggtggtgcaggcttggagtcccagctactcggaaggttgaggtgagaggattgcttgaacctgggaggttgaggctgcagtgagctgggattgtgccaatgcactccagcctgggcgacagaacaaaaccctgtctcaaaaacaaaacaaaacmaaaccacaaaaaaaraaaccatgaaagattctaaagtaaacacccatgcacctaccacctagattccacagcaaccattttgctgtttgcttcaccacaaatccctctggccaccagcatccacgctggttttgatgcacttaaaataagctgcagaaatcagcacacaacatcctgtcaacacctcagtttgcatttcattaactagagtccggcatttgtctgtgattatttttgtttttctttgaagtaaaatgtatataccctgagatgcacaggtgtgaaacgttccgttctttgaattttaacaaaggtatccacgtgtatcccagcctgaccagaacatagaacatcactatcaccccagtaagttcctcatgcccctccaggtgcatcacagtccccaccttccccagggcaaccacaattgtgctttttttccaccacgaaataattttgccagtttgagtgtttcttagagctacccatgttgctgcaggtgccagcgatttgttctgttttattgctgagtaacgtccactgtgtgaacattctgtgggtttttagtcattctcttgttgaaagacccctggctgtttccatctggaggctcttatgagtaaacctgttacgctggttcttcttgtacaagtttttctgtgcatatgggcgttcatttattctgtagaaacacctagagtaggtatagggtaggtatacatttagttttataagaaactgccagatcttttcccaaagtggcccttccatttcacactcccaccagcaatggatacgagttctagttgctccacatcctggccaacatttggtgctgtcactctgtgaaatcttagtcattctggtgggcgtgtagtggtatcatctcattatggctttaatttgctttggcctgatgactaatgcggttgagcacattttcatgattggctcttcatatatttttcctttgtgaaatgtcttttcaaatctgttgctcattttaaaattgggttgcttgactttttcttctggatactgatcttttgtcagatacgtgttttacaaatattttattccagtctgtggcttgcctgttcattttctttcctttttcaagaacaaggtctcgctgtattgcccaagcaggtctgaaactcctgggctcaagctgtcctcctgcctctgcctccccaagagccggttttacaggcatgagccaccatgcccggcctgttcattttcttagtggtattttccaataagcaaaagtgtgtcactttaatttttatgaagtctaatttaacaaactcctttctttgtggttctctctctgtgttctttgtaagaaacctttgcctaccctgccaaattgcaaagatatttatgttttcctttagaaggcttagagttatatagcttttatgaattaacttttgcatatggtgtgaggtagagggtcagggttcattttgttgtcgttttatgtgtttattcagttgttccaaacttcatttttttttaaagcttttattttgtattttcttggtgacttatgaggtcgcacaattttccaagatccttgttggtcatttacgtattttcctttgtaaaattatctgtccacgtcttacttctttttaaaaattatgttgtttcaagatcgagtgatttctgaagccttcattttataatgcttgaaagaatgaacaccttgttccccagctacaggcttctgctctttgtcctgcagctgcacagtggggtaagacttgggttttgttttgttgctgctttgttgtttcttcatttgactgtttccccatgggtctcatttaaaaaaaaaattggccgggcacagtggctcacgcctgtaatcccagcactttgggaggccgaggcgggcagatcacgaggtcaggagatcaagaccatcctggctaacacggtgaaaccccatctctactaaaaatacaaaaaattagccgggcgtggtggcgggcgcctgtagtcccagataatcgggaggccgaggcaggaaaatggtgtgaacctgggaggcggagcttgcagtgagccgagattgcaccactgcactccagcctaggtgacagagcaagactctgtctcaaaaaaaaaaaaaaaaaaaaatgttgtttcatatgttttttatatattctggatataagtcctttatcagatatatgtatcataagtttttttttccacattgctcctttccttttggttttcttaatgatgttatttaatgagcaagagtattttgttttcataaagtccaatttatcaactttttccagtttcgatttatgatttttgtgacctatggaggaaatctttgcctacactaaggtcaaaagaagttctcytattttctagaaattttatagttgtatattctatgattccttttattttttaattttttaaatttttacattttttaacctattatagccgtcaggatgttgtatgatccattttaaatcagtttttgtatttggtttgaggtcagggttaattctcgtttttctatactcatatccagttctagcaccgtttgttgaaaagacataccttactctattgaattacctgacacctttgctaaaaatcattgactgtatatgtggccctatattagtatatgtacgtatatacatgtaggccctgtgttgactgtatgtgtggtcctatattagtatatgtacgtatatacatattggccctatgttgactgtatatgtggtcctgtattagtatatacatatcagccctatattgactgtatatgtggtcctgtattagtatatgtacatatatacatgtaggccctatgttgactgtatatgtggtcctatattagtatatgtacatttatacatgtaggccctgtgttgactgtatatgtggtcctgtattagtatatgtacatatatacatataggccccatgttgactgtatatgtggtcctgtattagtatatgtacatatatacatgtaggccccatgttgactgtatatgtggtcctatattagtatatgtacatttatacatgtaggccccgtgttgactgtatatgtggtcctgtattagtatatgtacatatatacatataggccccatgttgactgtatatgtggtcctgtattagtatatgtacatatatacatgtaggccccatgttgactgtatatgtggtcctgtattagtatatgtacatatatacatataggccccgtgttgactgtatatgtggtcctgtattagtatatgtacatatatacatgtaggccccatgttgactgtatatgtggtcttgtattagtatatgtacatatatacatgtaggccctatgttgactgtatatgtagtcctatattagtatatgtacatatatacatgtaggccctatgttgactgtatatgtagtcctatattagtatatgtacatatatacatgtaggccccatgttgactgtatatgtggtcctgtattagtatatgtacatatatacatgtaggccctatgttgactgtatatgtggtcctgtattagtatatgtacatatatacatgtaggccctatgttgactgtatatgtggtcctgtattagtatatgtacatatatacatgtaggccctatgttgactgtatatgtggtcctgtattagtatatgtacatatatacatgtaggccctatgttgactgtatatatatatgtggtcctgtattagtatatgtacatatatacatgtaggccccgtgttgactgtatatgtggtcytgtattagtatatgtacatatatacatgtaggycccatgttgactgtatatgtrgtcctgtattagtatatgtacatatatacatgtaggycctatgttgactgtatatgtggtcctatattagtatatgtactatatacatgtaggccctgtgttgagacactattgtgttttcttgatattttgtccattcctttgctgatgccacatcttgattaatgtggctttacagtaagtcttaatataaagtctctcaaatatctaaaatattactttgaatattctaggtcctttgagtttccttataaatttaagaagtagcttgttgatgtctacaaaaatgcagtgtgaattttggttgagattgtgttgaatctgtagatcaattaaggaagaaytggcattttaacaatattgagtcttttgtatagatggtatatctccrttttaaaggtccttttgtatttcttttatttctctactgaaaaaaaatctctacagaattacattgttttgtagttttcaagaaaaagatcttgcatgccatttgttaaatttattcctaagaattttacttttggcactattttaagctgaaatagattttaaatttcatttttaattatttgctgctagtatgtaaaaatacaatagatttttgtatgtaaatcttatatcctatgatctyttccaaagtcatttattactctggtaatggttttgtaggtcttttaggatttaaatacatagttttacttctttctgatcttgatgccttgtttttttttcttgctttattgcactggttagagctgccagttcagtattgaatagtagtgattagtggacatccttgcctgtgccaaacttataatgttaactttagatttgtcatatatgacctttgtcagattgaggaaattcccttctattcytaatttgctgaaattttttaacatgaatgggtatgattttagtaaatgctttttctgcatctatggaaatgatcattgttttgtcttttattcgtttaataggataaattacaatgattgatttttgccccccgttttttttttttttttttttaaagaaacagagtctcactcttgcccaggctgtagcacagtggtgccatcgtagctcactgcagcctgaactcctggacttaagcaatcctcccacctcagcctcctaagtagcagggactataggcacatgccaccatgccaagctaatttttaatttttaaaattttttgtacagatggggtctcattgtgttgctcaggctggtctgcaattcttgagcttaagcaatactcccacctctgcctcccaaagtgctgagattacaggtgtgagccactgtgcaggcctgattttttaatattgaaccaaccttgcatttctggaagaagtccaacttgcttatgagatatcatcctttttatatattgctaaatttgatttgcccagtttttaaggatttttgcgtgttgattcatgagggatattggtgtggtattttctttgtttgttagtttgtttcggtaatgtctttgtcagcctcattttggcttcataaaattagtttggaagtgttcccttctctttgttttctgtgttttcataaggttgatgttgtttcttccttaaatgtttgatagaatccaccaagaaaaccgtctggacctagaattttctactaggaaaggtgattgtttgtttttaatcacaaattcaatttaatgtatagaaagagttattcaggtttttttacttccccttgtcttacttttggtaagttgtactttgaaggaatttgtccctttcaggtaagttgttgaatttactcatttaaagttgttcgtaatacaagcatacctagggtttgcttccagacctcggcaataaagcaaatattgcaataaagcacgtcacacaaactttttggtttcccagtacatataaaagttatgtttaggccaggcatggtggctcatgcctgtaatcctagccctttgggaggccaaggtgggcggatcatttgaggttaggagtttgagaacagcctggccaacatggtgaaacctcatctctattagaaatacaaaaattagctgggtgtggtggcacatgcctgtagtcccagctgcttgggaggctgaggtgggagaattgctcgaacctgggaggtggaggttgcggtgagctgagatcacaccactgtactccagactgggtgacagggcgagactccatctcaaaaaaaaaagaaaaaagttatgtttacactatactatagtctattaaagtgtataagatcattatgtctttttgctaaaaaatgctaataatcatctgagccttcagcaagccataatctttttcttggtagaaggtctgcctcaatgttgatggctgctgaccaggtggtggttgctgaaagttgaaggtagctgtggcagcagtttctttgtttcttttttctttttctttttttttgagacagagtcttgctctattgcccaggctggagtgcagtggcacgatttcagctcactgcaacctctgcctcccgggttcaagcaattctcctgcctcagcctcccgagtagctgggactacaggtgcctgccaccacgcctggctaatttttgtatttttagtagagacagggtttcaccttgttggccaggctggtctcaaactcctgacctcaggtgatccacctgccttggcctcccaaagtgctgggattacaggcgtgagccactgcacctggccggcagtttcttaactgaagtttttgacatgggttgactctttctttcatgaaagatttttctgtggcacgcattatgtttgatagcatcttacccacaatagagcttccttcaaaattagagtcaattctttcaaccctggccacggattgatcaaataagttgatgtaatattctaaatcttttgttgtcatttcaacaatgttcacagcatcttcgcctggagtagatcccatctccaggaaccactttgtctgctcatccataagaagcaactcctcatctgttcaagtttgatcatgggattgcagcaatccagtcccatctccaggctccacttctaattctagttctctgctatttccaccacatctgcagtgacttcctctgctgaagtcttaaaccgctcatccatgagggttggaatcaacttcttccaaactcctgttaatgttgatatttcaacctcttcttgtgaatcacaagtgttcttaatggcatctagaatggggaatcctttccagaaggttttcaatttactttgcccagatccattagaggaatcactaactatggcagatactgctttataaaatatatttcttaaataataagacttgaaaatcaaatttatcccttctccatgggctgcagaatgggtgttacattagcaggcatgaaaacaacattcatctttacatacatctccgtcagagctcttgggtcacaaggtgcattgtcaatgagcaataatattttgaaaggattcttttttcctgagcagtaggtctcaatgatttttttttttttttgatggagtctcgctgtgtcacccagaatggaatgcggtggcatgatctcggctcattgtaacctctgcctcccgggttcaagtgattcttgtgcctcagcctcctgagtagttgggattacaggcacacaccaccatgcttggctagtttttgtattttttgtagaaacagggtttcaccatgttggccaggctggtctcgaactcctgacctcaggtgatccacctgcctcagcctctcaaagcattgggactacaggcatgagccactgcacygggccctatttgttttttttttgttgttgttttttaattgagacagagtctcrctttgttgcctagactggagtgcagcagcgctatctcagctcaccgcagcctccgcctcccaggttcaagtgattctcctgcctcagcctcctgagtagctgggactgcaggtgtgcactaccatgcctggctaatttttgtatttttaatagagatgaggtttcaccaccatgttggccaggctggtcttgaactcctgaactcaggtgatttgcctgccttggcctcccaaaatgctgggattacagctgtgagccaccgtgcttggcccttttttgtttttttgttttttttcaaattgagacagagtctccctctgttgcccaggctggagtacagtggcacgatctcggctcactgcaacctccgcctcctgggctcaagcggttctcctgcctcagcctcccaagtagctggaattacaggcgtgtgacaccatgcctgaataatttttgtatttttagtagagatgcggtttcaccatgttggccaggctggtctcgaactcctgacctcaagtgatccccccgccccrgccttcaaaagtgctgggattacaggcgtgagttgccgcaccaggcctcaatgggtttttaatattcagtaaaccatgctgtaaacagatgtgctgtcaagtagggcctgttattccatttctgaagcatagacagaatagatttggcagaattcttaagggccctaggatttttggaacggtcaatgagtattggctttaacttacggtcaacagctgcgttagcctctcatgagagtcagcctgtcctttgaagctttaaagacaggcattgacttctcccctctagctatgaaaatcctagatgacatcttcttccagtagaaggtgggacatctatgctgaaattctgttgcttagtgtagccaccttcatcagtgctctgagctagatcttctgggtaacttgctgccgcttctccatcagcacctgctgcttcaccttgcacttttacattatagagatggcttctttccttaaacttcatgacctgacctctgctagcctcaaactttccttctccagcttcctcacttctcttagccttcataccattgaagagagttagggctttgccctggattaggcttttgtttaagggaatgttgtggctgatttgatcttctatccagaccactcaaactttctccatatcagcattaaggctgttttgctttcttcttcttcatgtgtgcactggaatcgcacttttaatttctttcaataactttttcttggcattcacaacttggctagctatttggcataagagatctcacttttgcctgtcttggctttcgacacrccttcctcactcagcttaatcatttctagcttttgatttaaagtgagagacgggtgactcttcctttcacttgaacacttagaggccattgtagggttattaattggcctaatttcaatattgttgagtctcagggaatagggatgcctgagcagagggagagagagcggggaacagccagtcagtggagcagtcagaacatacaacgtttattgaataasttcactgtcttatctggatgtggctcgtcatgccccaaaaacaactgcaataatggcattgaagatcactgatcactgggcgcggtggcccatgcctgtaatcccagcactttgggaggccgaggcaggtggatcacctgaggtcaggagtttgagaccagcctggccaayatggtgaaacctcgtctctactaaaaataccaaaattagccaggcgtggtggcgggtgcctgtagtcccagctactggggaagctggggcagaagagtcgcttgaacctgggaggtggaggttgcagtgagccgagatcacaccactgcactccactgcactccagcctgggcaacagagcgagactccatctcaaaaaaaaaaaaaaaagggccgggcgcagtggctcacgcctgtaatcccagcactttgggaggccgaggcgggcagatcatgaggtcaggggattgagaccrtcctggctaacacgatgaaaccccgtctctactaaagatacgaaaaaaatagccgggcgtggtggtgggtgcctgtagtcccagctactcgggaggctgaggcaggagaatggcgtgaacccgggaggcggagcttgcagtgagccgagatcgcgcygctgcactccagacagagcaagactctgtctcaaaaaaaaaaaaacaaagaaagaaaaaagaaaaaagagatcacagatcaccatagcagatataataataatgaaaaagtttgaactatttcaagaatcatcaaactcctacacagagacacagtgttaacatgttgttggaaaaatggtgccagcagacttacttgatgcagggctgccacgaaccttcaatttgtaaaaagtgcagtatctgtgaagcacaatgaaatgaggtgtgcctgtgttccttgtcaytgtaatgtcggtaggatccgtaaggaaaacacttcattccttttattgtgactttatgttcgccatctccctctcatcmgcagcctggctaggaggttatcaatctagatctttttaaagaaccagcattggactccccttttctggtgtccatttccttgartttctctgttatcttcattacttccttccttgtacttgcttcagcgcattagtcagggcccagtcaggaaacaaaaaccacaccggcaatttgaatagcaacttgtaatataaagtgttcttaactgtaagaggtagttaactattaaagggatcacaaaggggtgacattgtgatataagaaagatgtatttgggctgggctcggtgcagtggctcatgtttgtaatcccagcactttgggaggctgaggcaggtggatcccttgagctcaggagtttgagaccagcctgggcaacatggtgaaacctcatgtctaccaaaaatacaaaaaattatcctggcgtggcggtgtgtgcctgcggttccagctacttgggaggttgaggtgagaggatagtttgagcccgggaaggcagacgttgtggtgagccgagattgcactactgcactccagcctggatgacagagggagactctgtctcaaaaatcaatgtatctgtctgtctgtctgtcttctatctatctatctatctatctatctatctatctatctatctatctagtctctgtcccccaactttgtttggcatgtagctcctaaaactcttgaaatctccaaagtgatgggtgtctttttgtttgctaaggaggcgactggtggctggaggctcctggacagcctggggataagggctggttgccaggggacccagccttgtgattagaaggctagaacttgcagcctttcccatccacctcctgcgaggcaagaggggatgaaggttgagttgatcatcaatggccaaagatttcatgtcatgcttatgtagtgaagcctccctgaaaacccaaaaggatgaggtttgtagagtttcaggttgttgaatacctgcaggtgctgggagggcagtgtaccctcccgtggaagctccatgccgcttccttcatacctttcttatgcatctcttccagttggctgttcatttgtatcctttgaaatatcatttgtaataagtcagcaattttaagtaaactgatttcctgggttctgtgagtcactcaagcaaattattgaacctgagaagggagttgtgaagacctcaaatttgtagccaagtcagacagaagttatgggtaacctggtgtcttaccacttgcgactgatctctgaagttgagggcagtcttgtgagatggaacccttaacctatgggatctgcactaactctggttggtgtcagaattgaactgaattgcaggacacccagttggggactgctgagtattggagaattgcttgggggtcggcgggaggaaaccacacatctggtgtcagagctgaagcactgagtgttgtgaatgagagtggagagatagagtttgttttgccttatgcaagaggactctaaggagtatagaaagagcaaatatgagaagcagctactttagaagaaaacataggaggaaagcttcgtgacattggagttggcaatgctttcttggatgtgacaccgaaaatacaacaaaagaaataaatgataaattggacttcaccaaaacttaaaacttttgtgcatcaaggaatactaccaatggcgtgaaaaggaaatccacagaatggaagaaagtatttgaaaatcgtatatccgataaaggactagtatccagaatatataaagaactcctacaactaagccacaaaacaaaaaaaaacaacccagtgaacagacatttttccacagaagacataccaatggccaagaagcacaggaagagatgcgcagtgtcactaatcatcagggaaatgaaaatcaaagccacaataaaatatgatttcacaccctttaaggtggctgttagccaaaacatggataacagcaagtgttgrcaaggatatggagaaattggagccccgtgcactgctggtgggaatgtaaaatggtgcagctgctgtggaaaakatataacaattgctcaaaaaattaaactcagaatgaccataacatccagtgattccacttctagatgtatactccaaagaactgacagcagggacttgaacaggtgtgctacattcttgtttgtagcagcacttttcccataaccaaaagatgcaggcaacccaggtgtccaccagcggatgaatgaacagacaaaatgtggtccatctgtacagtggaatattattctgccttaaaaaggaaggagaggccaggtgtggtggctcacgcctgtaatcccagcgctttggaaggccgaggtgggcagatcacttgaggtcaggagtttgagactagcctggccagcatggcgaaaccctgtctctgctaaaaatacaaaaattagccaggcatgggggcatgtgcctgtaatcccagctactagggaggctgaggcaggagaatcrcttgaactagggaggtggaggttgcagtgagccgagaccatgccactgcactccagcctgggcgacagagcaagactgcctcaaaaaaaaaaaaaaaaaaaaaaaaaaaggagattctgacacatgctatagcatagatgagccttgaagacatgctaagtgacagaagccagacatgaaaagacaaatactgtatgatttcacttttatgaggtccctagagtagtcaaattcagagagacagaaagtgggatggaggttgccagaggctgggggaagggagaatgaatgggaagttggtgtttaatggggatagaattgcagtttgggaagatgagatggatggtggtgatggttacacaacagtgtgaatgtgcttcatgccaccaaactgcacacctgaaaatggttaaaatggtaaattttctgtgatgratactttaaggcatgtatgcaaacacacagaagcagttactaccactggggttgatggaaaagaaaccaagaactcggagcgtcctccacaccttgccacgtcttacgttcaggccttgttggagagtgtgtgactgccacagaaacctgcagcctactggtaacaaaaaggttcttgccagaaggtgtagaaagagtggatctgcaggatcagcttactgggtagccgagaaacctactagagggtatgggtgggcaggagctgggtgtctgagaagtttgctgaggtcccattgggctagagctggggtgctggagaaactcagtacagagcaggccccactggkcwcacgccactggcagctgtgcmttcagaggaaaaagagaccctggaaccaggaagagaagctgctacctcagcaaggcctggcagctccccacagtgttgtcccctgtggatagagcctgacatgactgtatttggccaaggagaaagactcataaggcctcggtccagtatcacggagcggggcctggcaggatgtatgcagagttaagaggcaatacatgggtaactggcatatttttccagattctttgttttttttgttgttttgttttgttttgttttgttttgttttgttttgagagagcatcctgctctgttgcccaggctggagtgcagtggcatgatctaggctcactgcaacctccacctcccgggttcaagccattctcctgcctcagccttctaagtagctggagatgcccaccatgcccagctaatttttgtatttttagtagagacagggtttcaccatgttggccaggctggtcttgaactcctgatctcaggtgatccacctgccttggcctcccaaagtgctgggattacaggcgtgagctacactgcacctggcccatttttccagattcttaaagcagatccttaggtctttttttttttttttttttttttttttttacttcttttctaatataagcacttacagtttccctctaagcactagcttcagcctacgtattttagtatgctgtgttttcattatcatttcatttgaaatattgtaaaatttttcttgtgatttcctctttgactcatgggttatttagaagtatgttgtttaatttgcaaatagtcaaggctcctctgagtatcttagagctattgatttctaatttaatcttactttggccagacaagcatattttgcatgcttttaaaatttgagacttatggcccagaatgtgtatcttggtgaatgcactgttttcacttgagaaaaaaatatgtatatatattctagacttcctgagtatagagctttataactgctgattaggtcaattgctagttaccagtgttcttcagattatctgatgcttgtttctcagatgttgagagaatggtgtttgctatggcctacctgtttgtgtcccccaaaattcatatgttggagcttaatctctggtgcagtggtgttgggaattggggcatcagggaagtattggctcatgagggcagagtcatcgtgaatgggattagtcccttctgccatgtggggacacagcaggaaaaggacatctctgaagcagggagctagctctcaccagacactgagcaccctgattttggacttcccagcctctagaactgtgagcactrcaatctgtttataaattacccagcctaaggcattttgttttaacatcctgaatgaactgaggtggtgttaaaatctccaactatgcatccaggcgcagtggctcacacctgtaatcccagcacttcaggaggccaaggcgggtggatcacctgaggtcaggagtttgagaccagcctggacaacatggtgaaaccttgtctctactaaaaatacaaaaattagctgggcgtggtggcaggctcctgtaatcccagctactcgggaggctgaggcaggagaatcgcttgaacccaggaggtggaggttgcagtgagccgagattgcaccattgtactccagcctgggcaacaagagtgaaactccgtctcaaaaaaaaaaaaaaagagtctccacctatgattgtggaattgcccatttctccctttaattctttcaggttttatatcatgtattttgaagctcctttggttaggtgcatacacatttatgattataatggtgtctcgatgaactgatcatttaaccatgatgaatgtattcctttatctcgtaataattttatcttggactcaactttattgatatttatgtagcctctccagccttcttaaacatgctgtttgggatgcataagaaggctggagaggcttatggagaaacttatgatggtttgacttacagtttttcaactttaccatggtgcgaacgtggtatgtatacagtagaaactgtactttaagtatgtgtgaaaccattgtgtttctcactttcagtacagtattcaataacttacatgagatagtcaacactttattataaaataggctttgtgtttgttgattttgctcaactgtaggctgaagtaagtgttctaatcatgttaaggtaggctaggctaagctagaatgttcggtaagttagatgtattaagtgcatttttgagatgatatttattttccacttatgatgggtttgtcaagacataactccatcatcattcaagcagcatcagtatgtctttttccaaacagaaaatttcaacctgtgtttatactgaaacagcatcttttgtagatagtatatagttgagtcttgctattttattcattctgacagcctccgccttttaattggaatattcaggctatttctgtttaacatagttatagatatgactgggtttagagctactaccttgctctttgatatttatttctttcatcttgctttcttggcttcttttatgttaattaagtattttttagaattctattttaatttatgttttttttttttttttttttttttaagacagagtctcactctgttgcccaggctggagtgcaatagcatgatcttggctcactgcaacctctgcctcctgggttcaagtgattctcctgcctcagcttccctagtatactgggattacagacgcctgccaccacggccggctaatttttgtatttttagtaaagacggggtttcaccatgctggccaggctggcctcgaactcctgacctcaggcgatccgcccaccctggcctcccaaagtgctgggattacaagcgtgagccactgagcccggcctgttttgactttttaattgtatctctttgtattgctattttagtagttactttayagattctattgcacattcttagcttttcacagtctacttagaattaacattgtttttcttcatggaaaaaaagtgtaagaactaggcaatcctatgggttcatttaccactttccatcctgtatgtgatggttgttagatatttactacatccatacacattgtaaactagacaatacaataaggaaatttttgctttaaacagccccatgcattttaaagaaattaaaagtaaaacagaatcttttctatttgcccatgtatttgctatatcctgtgctcttcattccttcctgaagagctgagttcccatctggtctcatttcccatgatcttggagaacttgcttcacggtttttgtagtgcaggtttgcagacagctaattccctttcattttcacttatctgmaaatctttattttgctgtcattctttctttttttatttttatttttatttttgagacagagtctcactctgtctccccacaggctacagtgcaatggtgtgatttcaaaactcctgcccaatctcaactcaccaaccttctcctcccgggctcaaacgattctcctgcctcagcctcccaagtagctgggactacaggcatgtgccatcatacccagctaatttttgtatttttagtagagatgggatttcaccatgatggccaggctggtctcgaactcctgacctcaagtgatctgcctgctttggcctcctaaaatgctgggattataggtgtgagccactgtgcccagcctgctgtcattcttgaaccataatttcactggttatagaattctgagttgtcagttttttctttcaggactttaaaatatagggttccagtgtctttggcctccgttgtttctgtcaaggaatcagcattcatctagctwttcccctgtagaccacatgttgtttttccctggatgcttttaagactttttatccaagtttrattgctcagtacctacctctgggcaaaaaagcctccagaaaccagaaacttatctagttttattcccctctgtcaggtgtagactctactccagcttytacctacttgagatattctatactgactccaggctgttgttrttttgttctttyaaatattttgtccagagctataatgttttctgcagaattgaccagatagcagctactctctgtgaccaggagccttgatcttccagacttgctgatgggctcacaaagctcctgcccgtggccctcagttggcagtggcctctctgccttgaagttgccatgagtgtgtaaaacctacaggctcaaccttcctcattagtacagtccagaaaagtggaattcctggtctgggtggctatggtgccctagaccactggctagaccagggtggtgactgccagctggccgaatgtggggtctccagcctagcacccttggactctaccccaggagttatggctgtttcagggccaggggcctggcctcagcccctgtcccccttctcttctcctcaagttgcccagcatcaggtcccaaccagcatcttttgcagacagggtgggtcggctcctcactagaggggcagggttgggmgggaagcctgttgagccctccttcctgtgcagcccacagccctggggttagctccagaggggtgcagaaaggagcccccaaaggcagaaactcacccttctctctgttcttgtgcttccagggataaaggagaggtggtcctagctggggggctaccagtggcatgcaggaggcccacatgaccactgtttgctggggcctttccttctctgtgagagagacgagagagaggagagagagtgtgagtcagggtagtgtcttcttccagtaacgcagacttctgcacgtgttctctaggagaaatcccgtcactcgctagagctctagatctggaagaagctctgcctctcttctctcctccagtgcagtgtgtgtgtgtgtgtgtgtgtgtgtgtccccacatgcattacacccttctacagaggaaataattcccgtccaagtgcaaaggttgggattggagcaggcagcatgtgggctaaaggagcagagaggaggaaacgggggcgggggtgagggtgggaacaggaggtgggtagatgccacgaggcatgccttccacaactagaagggctggtggagatgaccagaatgctccagacagaycttttatcaaacttccaaaattcaatyttgtttcatgaagcctgaggaccctgcagagtgaaagacaaggaagggctttcctgcaggggggtgtgtgtgcctgtgtgtgcctgtgtgctgtgtgcccccatgtgtgtgcacgtgtggacctgtgtggtgtgtgcctgcacatgtgtgcacgtgtggacctgtgtggtgtgtgctgagtgtgtatatgtgtgtgcctgtgtgctgtgtatgcacttgcacatgtgtacacagatctcattttccttttttctggcttactaagtgccagaaagaatttccgtgagcctctccacccttcccaaggctgcacatggagggacttgcgcaggcacatgtgcgcgtgcacacaacacacacacacacacacacacacacacacacacgagtcaggggcgagcactcctgtggattgtacctaggcctggcaggaaaccgggttctgggaaactgtaggccccacctttggcagaaaaccatgtttttgttgctgctcgttgaagggaacattaagtggggctggggacagtttatgttgagaagagcaaattttgcctatggcactggggacattgagtggctcctgtcccgggctctggagggcttgggagacacgtctgcagctctgggcatctctcaaggtcaygggcggccacactcaaggttaggccctcctctgtgtgagctgcggtcagcaggaaggctgacctcagaggcggccccagggcccttggaggccctgcccctgagacatgggccaaggtcagagagccgagaaggctgctgctgaggactctggttggcgcccagcccagcggcccttcaggcgggccctgtgcaggggctgatgaagtcagctgggaaatctgtgaaataaagcacaggtcccccaggcttgcccagagccccggcatcagatgaggtgcagagaagggaactgagctgccaagtgtgaacaggagagaggagccccaggaccacacaggggccccgacayggcaggtgcttggtcagcagcggtgctgcccttactgctggacgtgggaaaatgcactgacacttgctgaccagagccggggtgagcatctgggtgaccctgcagatgagacaaaataagggctgccgtgggggaggggcccttgcygggccaccctgctgaggccctgtgttactgtcctgcggctgtcataacaaaggaccacaaatgaggtgactcaaaacatccgaaatcggccacgtgcggtggctcatgcctgtaatcccagcactttgggaggccgaggcggttggatcacgaggtcaggagatcgagaccatcctggctaacatggtgaaaccccgtctctactaaaaatacaaaaaaaaaaaaaaaattagccgggcgtggtggtgggtgcctgtagtcccagctgctcaggaggctgaggcaggagaatggcatgaaccttggaggtggaggttgcagtgagccgagatcgcgccattgcactccagcctgggtgacagagcaagactccgtctcaaaaacaaaaacaaaaacaaaaacaaaaacatccgaaatgtcttccctaaagtttctggagccagaaatcccagaccgaggtgtctgaaggttcattcctcctgggggttccgagggagactgtcccatgcctttctccgagctctgcggcggccagcaacccctggtattcctcggcttgcagctcggcctaccccccacctggccttcaccctgtgtctcttcttgtgtctctgtccaaactgccctctctgttgtctttttaatttatttttagggacaggttctcattctgtcctccaggctggagtgcagtggcgtgatcatggctcactgcagcctcagcctcccaggctcaagcaatcctcccacctcagccttccaagtagctgggacacaggcgcacgccaccatgcctggctaattttttaatttttttgtagagacgagggcccaggctggtctcaaactcctgcgctcaggcaatgagactttgcctcccaaaacactgggattagagacatgagctgctgtgcccagcctacctctgtcttataaagacacctgtcattggatttagggcccactctgattcaatatgccctcaaataacccaattacatcttcaaagaccctatgtccatataaagtcacattcataggtactggggggtcaggacttgcatatgtcttttgggggaacacaattcaacccacaatgggtctcacccacagaacgaacggcctctccagggtgtgcgcaggtgggtgaggggcccaggagagggacctgcgtggcaagagggcttgtgttcacgtcagagattccagaaggagactggatggggtggctgcatggagcaaggggctacagccactgtctccaagtagttggtgggttgtctggtagaaagggagcatttattttgagttcccccaagatatgaagctagtaccaggtacctggaaggtgctagcgagtagagcttgactctttacagaaagaggtgtttttctcacaatgttcacttgagracggtggaacaggctatttcacaaggtagtgagttccccatgcctggaagcattcaagcaggggccatgtgggagttgttcaggagtgcatagaagggacctcagaggtccctgccaataccatctttgcttgtcttattttacgacaacttgaatttcagaatgtaatgttattggggatatgtctactagaggggcctccagcatcaggccccacacactatgcatcatttttagggcagggaatgagagcaggctccattctttttggttgtctgtgaggaccaggaggcttsctgctgaggcagcttcctgtggaaacagtgtctcagccccgcaatccattcatcggagctccaacatcttaatgaaacactgtgtcagatgggttctgggcatgtgtgtgcagattgtcacaagtccatgagaatgcacacacgcacattgcatgtgtgtgcacacatgtatgcacacatgcacaagaacacgaagacccgaggcaggtatagtccgtgagacagatccctctaggctgaaagactccccacaagsgtccctagaacaaggctccrgcctcggcagtccctcccacttctggtgggaggatctccacagagaagaagggtcaagaagcacagctcttgatgctcayggtgtaccaagctctgctttaagcttgtgtcttattttttacttatttagcaaatctgtcgctcttgttttgtgccagatgctgttctcagcactttacaaatattgatgcatgtttgtttcatgacaaccctgtgaagtaggtagtgttaccccgttttatagatgaggaaacaggcgtagagggataaagggacttgcccaaggtctgtctctaccttacacgcacatgaacgctcactcatgcggcaggcgctagtttccctctgatgtgagtcaggccttgagctggttggggtctgggtcccactttggttgtgttttgctgtgggcaccaaggaagcttctagcagcctcatctccctggtatgacctagctccagggactggatttccccaaatgctcctgcccagcctggagcctcctttccagctgggggagggctgaacgacccctcactcttggaggctgccggagcccctcctgcctgcatgcggccgctgccgggtggacaggcctgcttgtgggttgargctcccagcagctggggtggatcayttctcctcccaagaagctttgggagaagcagctgagggggccagcgtcctcctgaggccaattccctgcctcccccagcgcaggcgcgaagccatctttgcttgtgtgtttgccacagacagtggagggcggtgcaatygtgacgcctgcttgttgcactttgcgtccttgaggacgttgacccctggccggtgctgggcgcttgctcttcagtcatcttgccctgacctggcgtggcaggcccgagcactgctcttttacaaggaaacargctcagaggccttgagtcacttgcccgggctcccccagccaataattggctgagccaggatttccatccagctctgtgactccagaagtccaagttcttcccatcacgtcagggccaggaaaggattagaatgcttttctacgtgccgattatttggatgatctgtgcagcttagctcgttgtagttgctcaataaaaatgtggaatgaatgggcctatatgtcccattgtgtgactcagagccaatgactctggctgatcctcctgttttcattccgtggcccagcatctccctttggggtgtgtgaccttggaagcagtgactctctccatcccaccttgaatggtgtctgcgccgcagcaggggagcagctggggattgccagcgcctgttgctggtgggctgtgcgccagatccygtcttggatgtgtgggtrattgtcagccacatgtgtgtgaagggctgtgcgtgtaggatttgtgcaaatgtgcccctccctgctgccagcccatgggaggctgtcaagattctgcccctgcacattagcccacactctctttgtggcccactgctgtggctgttcccttgtgtcacgtggctgcaggcacagcccccaagtggatggggatcgtgggctgaatgtgcatcagatgctcctgcttcttggtgggtggagaccctcaacccatgcaccgtggctgccgcatctgaaaggccttccatggtgaaggacttggacctgagcaaccctccgcagaggtcttagaagtgctccctggccgggcgcggtggctcacacctgtaatcccagcactttgggaggccgaggtgggcggatcacaaggtcaggagatcgagaccatcctggctaacacggtgaaaccccgtctctactaaaaatacaaaaaattagccgggcgtggtggcgggtgcctgtagtcccagctactcgggaggctgaggcaggagaatggcgtgaacccaggaggcggagcttgcagtgagccgagatcgcgtcactgcactccagcctgggcgacagagcgagactccgtctcaaaaaaaaaaaaaaaatgaagtgctcccagctcttcctcctgtggtgaggttctgagtttccatcctcagaagaaaacctggctggggagggcatctctagacccggacataaacgccaggagaccagggctgccctctcaggtgaccaatcacagagactcagggaaagtcacgtttggaagaggcgacactgtgtctcagcctcattcatttctccatcctacagacactgcctggtgcccagcccgcaccgcgaggcttcctaagcagctctgggcaccgtgcacctggcatggcctccagccccatctccctgccttgggagacccggtggggactccgggctgagctcctgtggctgtggaaccttggtggtttattgtggtggctgagaacagggacgtggggttggacgggttgagtgtaactcccagtggctccgtgaactgcctgggagccttgggcagctctttctcactctgtgcctccgcttcctgatggaaaaatgggggccaggggggagcgaccttgaaggtattcgtgggaaccaagcgaggtgataaatgtagtgtccttggtagagaactggacacagagtccacccccatgaagggggctgctcctcctccttctannnnnnnnnnnnnnnnnnnnnnnnnnnnnnnnnnnnnnnnnnnnnnnnnnnnnnnnnnnnnnnnnnnnnnnnnnnnnnnnnnnnnnnnnnnnnnnnnnnnnnnnnnnnnnnnnnnnnnnnnnnnnnnnnnnnnnnnnnnnnnnnnnnnnnnnnnnnnnnnnnnnnnnnnnnnnnnnnnnnnnnnnnnnnnnnnnnnnnnnnnnnnnnnnnnnnnnnnnnnnnnnnnnnnnnnnnnnnnnnnnnnnnnnnnnnnnnnnnnnnnnnnnnnnnnnnnnnnnnnnnnnnnnnnnnnnnnnnnnnnnnnnnnnnnnnnnnnnnnnnnnnnnnnnnnnnnnnnnnnnnnnnnnnnnnnnnnnnnnnnnnnnnnnnnnnnnnnnnnnnnnnnnnnnnnnnnnnnnnnnnnnnnnnnnnnnnnnnnnnnnnnnnnnnnnnnnnnnnnnnnnnnnnnnnnnnnnnnnnnnnnnnnnnnnnnnnnnnnnnnnnnnnnnnnnnnnnnnnnnnnnnnnnnnnnnnnnnnnnnnnnnnnnnnnnnnnnnnnnnnnnnnnnnnnnnnnnnnnnnnnnnnnnnnnnnnnnnnnnnnnnnnnnnnnnnnnnnnnnnnnnnnnnnnnnnnnnnnnnnnnnnnnnnnnnnnnnnnnccctccctcttccacttccccctcccgtcccgttacgcacccattcccgttcccgcgtcccttctcctcacccttcccactactttttctttatcctttttccccccccaccccttccccctccccctcccctccccctttcccttcccctcccctccccccccacatgcaggcacactccatttggtgccccaactgcctttctccattgtccttctgtaagtggttctctaagtgggaactcaggcctggaaagggtgggcaccctgtctggtgggctctggcaggccaggcgctgagragcctcaggagacacaaccctaggaaaaggctcatgcaggctggctgtcatgacggactgttggtgggagaggggaaggcgccgtggtaggggaagctttggaaacatccactagtggccttatttatgactcaggacacctgccaggtcactagaacacagctgaggaagctgtcggccagacgtccagaagcrtcaacctggtggctgggctgtggggggacctctctggacaggcagacaaggtgtcggrggaaggggctgacactcactcagtgtctgtcatgcactgagggcacaaagggcaggatggagagctggcccacgccacctgtggaatcttccaggtgtgggggcagatggggaagcaagggggcttgaagacacatrcgctcattaaatktccttaaatcccaagaagaagaacaaggacacatccacaggggcagggctgaaagtctgatgcatggtgttttggggtctgctcctgctgcaacagctacagtggctccctcttacctttctcttccctccattctgttgtgaaaatgttcaaaacacatggtcaagttgaaagcattttacagggaacacattcagccatcacctagattcyaccactaacaccaagctacacctgctttatcacctcaccgtccatctatccctccttcgcctggccatgaatccattttatttttattttttggtgcatttcaaagtaatttcaggtcatcctgattatctctggaatcactgtcagaaattccctcccttcccctcccctctcctttcctttccttttctgagatgggatcttgctaggtcacctaggctgaagtgcggtggtgcagtcatagcacactgcagcctccaactcccgagctcaagcaatcctcctgcctcagcctcctgagtagctgggaccgcaggcatccaccaccacacccagcttcattttcaaaatttctcaccaactcctcactccttgtattcacccaggaccacttctcacaaagccagggtgctgcaggaggggtcagaaccccaagccctaatcctggctctgtcattaacactgtgcgaccctcagcaaatcattttgcctgtctaggtcctgttttcattcctatgaaacgagggcgttaaaytgtatgttataaataatgagggctaccagttaccaagctcctattttaggccaggcacttttcacatgttattatgagtcctttcaatctaggtattgttctcaatggacagcttagtcaacggaagctcagagaggtggtgtaacttgccaaaagtcccactacccagtgaatgtccccacggggtctgcacccaggagtctgacacagagcccaggcctcagcacctggcgatgttttgggggtgtgagcagcccagcctactctgggcacgtgtttacttgctgttccttctgcctcatgtttgtgtttgtcccctctgaagctcagactgttattttccagttccaaataccaaaactggctaggcacggtggctcatgcctgtaatcccagcactttgggagaccaaggcgggtggatcacttgaagtcaggagttcaagaccagcctggccaacatggtaaaaccccatctctacaaaaaatacaaaaattagccagacatggtggcgtgcacctgtagtcccagctactcaaggagaacccagctacccagctactgaggcacgagaatcacttaaacctgggaggtggaggttgcagtgagccgagatcgcaccactcctctctaggctaggcaacaagtgtgagactctgtctcaaaaataataaataaataaaataaaataaaaattaaaaccaaatgccaaaaccaacccacaaaataaaccttggttaaagtagcctgttcattttgctttaactatgtatattgcaccagattctgccaggggctcagcgtataaagatgagacccctgccctgccagacaggtgggatgatggccataccttgagttagtcaaggcaccatctggctgtgtaacaaaagctaaaacatcagaggctgagcagcactcggacccacrtcccagtccaagtgtcagtcgttatgggggcccaggacagcccggacctagttcattcctttggtgcatcctcgacacacagcttccatctcttgagctgagatggttccagctcctgccgtcatgtctgcactccagccagagggaagggaagaagggagaggggaaagggcaagtgtccctctttatttttaagggcatgacctgaaagttaaacacttcagctccttcccactggccagaacccagttgtatggccgctcctgtcatcagggaggctgagcaatgtattcttcagctgggcttccctgtgcacaaccaaaacttcagttactatagaaaaaagggagctcagatattggggaaacaactagcatctgtaccacatgcactgatagctctctttgtatgaacagagctgtggcaggccctatgccagggagaaagtaagattggaaaagagcttaccaaggaggtggcrtttgcactgtgcttaaggggcaagaaaaacgtcttccaatcaggagccacaaatgcttggctgaagtgctactgctctttcatcctggagctggaacagacgtcaccagtcaatcatgatggctgctgggtgcactggctaacatctataatcccagcactttgtgaggctgagggtgggaagattgcttggggccaggagtttgagaccagtttgggcaaattgcaagaccctgtctctgcaaaaaaatataaaatgtagctgagtgtggtggcacctgtagacccagccccagctactcgagaggctgagatgggaggatcgcttgggcctaggagttcgaggctgcagtgagctatgattgcaccactgcactccagcctgggtgacagagcaggacctgtctctaaaaacaataaaataaaatcaaagttttaaaatggaaaaaaaatcatgagcacataactccagatgtatcctcaagatagcaaaccygggtgggcgcagtggctcatgcctgtaatcctggcactttgggaggccaaggtgggtggatcacctgaggtcaggagtttgagactagcctggccaacagccccatctgtactacaaatacaaaattagctgggcatggtggtgggcacctgtgatcccagctacttggaaggctgaggcaggagaattgcttgaacccaggaggcrgaggttgcagtgagccaagatcacaccattgcactccagcctggagaaaaaaagcaaaactctgtctcaaaaaaaaaaaaaaaaagcaaacccagggccaggtctgtagccacatggccaccttcttccctgagcatggaggcagcctcagaaacctgccccacatcacatcagtgggcagttgattgggtcagcctgccagttgaaccctatttgccacagtcattctccatagtaaggggcattctagacataccccccttcccagggaagaataagccgtagctgcctgagcgttttatccagtggtgtgcatgtcttttcccaactctgtgtttagtgatgtcctgtttgtagcttgaaatttgccacagtgggtgtgtttacaccacaggaattggcaaacactacatatcaggccttacctcctgctccctactagggtaggttgttttttttttgttgtttttgttttttgtttctttttttttttgagacggagtctcgctctgtcgcccaggctggmgtggagtgatgcgatctccgctcactgcaagctccgcctccctggttcacaccattctcctgcctgagcttccagaatagctgggactacaggcgcccgccaccacacccggctaattttttgtatttttagtagagacggggtttcaccgtgttagccaggatggtctcgatctcctgacctcgcaatctgccctcctcggcctcccaaaatgctggcattatgccactgcgcccggcctagggtaggttgttagaaatgtaccagcctgccagtttcagccttgtttgtctttcatccttttttttttttttttttttttgagacggggtctctctctgttgccccccaggctggagtgcagtggtgtgatcctggctcactgcaacctctgcctcctgggatcaagtgattctcctgcctcagcctcccaagtagctgggattacaggtgcccaccaccacgtccagctaaattttgtatttttagtagagatggggtttcaccacattggccaggctggtatcgaactccttacctaaggtgatccacccgccttggcctcccaaagtgctgggattacaggcgtgagccaccgcactgggcctctttcgttctttcttaatgaaaatcttcctgaaagatttgcctactgatgtctgtgtcaataggtactgcctgcgggacagagcctgccctccttttgaaggtctttctctgtctgggtgaccatctgcatgtcactccctgctgctcagaactaaagatgtagctatgcctggggtaggttgggaaaacctgtgggaatcacagagcttgctgtcatgctgtgttctggatacctgaagcttggcaggcaggtgggatcgagggygggcattaggaaagtgatgtggctctataggaaggggacataggtcctgagattttaggtccccaattggacaaagctgttttttttttctggataaatgttctagcttattcataatygagtggtcagttttcttttcttttcttttctttttttttttgagatggagtctcgctctttcgcccaggctggagtgcagtggcgctatctcggctcactgcaagctccgcctcccaggttcacgccattctcccgcctcagcctccrgagtagctgggactacaggcgcctgccaccgcgyccggctaattttttgtatttttagtagagacagggtttcaccgtgttagccaggatggtctcgatctcttgacctcgtgatccgcccgcctcggcctcccaaagtgctgggattacaggcgtgagccaccgcgcccggccaagtggtcagttttctcagctgccgggtcttgcacaccttgctggctctggagaccatatgcaccatgtagaccccatttgtttcctaccctcagtgttgggggaggggccaagggcctgtcgatgtgttgacacctggccattcactggccttgaatgtccacattcacctccttgaaatcgatgccccgtatcggaggctccatgtggatttgggggcagaggcctgtactccagatggtggggtggccttcaccaatcaggcagattccctgccctgccctgccctttgggctctgtagctccagatgtgtgctcaagatctgtggccacatggatgggacaagccacagagactcagactccgtggtccctgtgaccagagtagccgtggccctgtctgggaatgttcccaccctgttgctgaaggtgagaaatttctctgtgctggagaacagctgtgctgagaagttggcccatctggcttgcaggactgctggggcaagggaggtctgctgccggtctcttccttcctcctctgactgggtgctccttgtctaggttccttgcagcaaaagaattctctaatttattttgttcccttattgagtctctactccatgaagcccacctcctratcccagctgactggctcccacctcctcaagaggaaggccaggggcagacgaggctgaaggaggctgactcccctgtgccttcgcagtctgagctgatgctgctgtatgttcacagggctccttcagcttttaaaaaggcttcaacacgttcgtcacacgcttgtggctctcctggatgccacactaactcagtaaggcctgagttagaggctgttcctgaggctgtgaaaatagaagaagggtccagaggagaatcccttcatctgacgatcccaggaaggcttcctagaagaagcagcctctgagctgagacctgaagacagatcaggcctgagtcaggccagggagggtgtgaggggcccaccaggcagagggaacaggatagggcaggcacagaggtctggcacctggcttgtggggaagtgtgagcccctgggcatgaccaaggcggggagaagtggcgtgagaggaggcagatgtggctggcaggagatcggcggccccggccttgctgagctccactctgtatgcaccaggtgacrgargctgcccaggacggtgggcagggaagtgacaggtcacatggtcatcccaccaacagccgggagtccagcttggggggacccaagaccctggggaaggyacgagtcaggggcctgctagagccaggagctagtgggagaaggaaacagtgttgcttatgaattataaacagacactcccgcaactttctctgacrtgatacaatctcaaagtgggccacccagaggtgggaaggtgacttctggctctccaggccttgggcctgtctttttttttttttttttttttttttttgagatggagtctcactctgttgcccaggctggagtgcagtggtgtaatcttggctcactaccacctctgcctcctgygttcaagcaatcctcctgcctcagcctcctgagtagctgggattacaggcacctgccaccacacccggctaatttttgtatttttagtagagatggtgtttcaccatgttggccaggctggtctcgaattcctgacctcaggtgatccgcccaccttggcctcccaaagtgctgggattacaggcatgagccactgtgcccagccgagcccatcttcaagttctccctggccctcagtgtttctgtattagttcacccttttggctccctgcttttaagagtctcccttaagactgtccccaagtggacaggtccccagaaccaaggagcagccttaggagtccccagttacagacactccagggggtccgtgtggccctcagcctctggcctggttccggcagccttggtcctttgtgctgtctctcacatagcctggccagagctggccaggtcccttggctgggccgagtcatcgtggccagtgactcatgcagggggagaaaagtgaggagggggaacagagtgcgagggggactgtgttaataacaaacccattaggtccctgaggtcacttcacaggagggacaaatggttcatttaggttgatctggctgccggctggcttccagagacactcagggtggggaagatttcattatctggggaaagcaataccagattgtctggaggggcccagccagcgcaccccgcgcttcctgtctgcctcccacgcagagcgttctgttcccaaggcggcaggccaagagcgcgagccgaggctcaggtgcaaagaggggtgcggcatgggggcacygcagggcacggggtgcatgcatttttatttatttttttactgagtgttagggtaatttgttaatggggtatatttggtgacataaaaccttctgtcgattcatggcagtctggaacggagtggaagcgtcccactcctggggaacccccacacacatttggctgtgaacgtcggtgcctttgcactggagcctctttggagtgtgctgggcagagcggagaggttcctcttctctcttctccatcatcctgtggaggtgtcaacatgtagccagagatggtcagtggcagtgaggagaggggggcaggaagagaccagggctgggggcttgccagcccacagttctacccctgaacacccatggcctccctgttcaggtcagcgaggctgggggcagagacgggcaggggtcccccaatgttgggcatctccccgctccctcatactctggatttgccctctggagaaagctctggagcacccagaagtcctggggctgctggctgaggtggggagcagagcccagctgtgcctggaggctccccacttccactcagcttccagggacagtctcagctgtgcaggcccaggccgctgaggctggctccagaaatttcttcacaaccaccactggatggaaaaccagttctctaaagggccccagagccagttttgtttcttcttccacaggttcccatagtyagagcatcgggtctttgttagagatgcagaagagacgatgtccccagcccttatgtggttcggtctccactgtggatgttggtgatcttagtctccttctcaaaaccaagagggctgatgccccacattccaggcccccagaaagagccgccacccacccacaccgctacatcttctttccacttttctgttccggaaagagtagagtggatatgcgctcctgtagaaatccatctacagcctgactgcagatgtattttgctcccttattgagtctctgctccatgaagcctgccttgtttgtacctctttctctctctttctctctttcttccctctcttccttcccttccgttcccttcctttttctttccttcctgtcttattctttcctctttctttctttcctctctctctctttccccctttctctgtctttcctatcttttctttctctctctttcctcttttttgaacagccaaagatagaatgaatggcataggtaggtactgagctccctgtaactggaggtgttcaagtgtagggtggatgggcatttatagggcaggcattgaggaaggatctccctgggattgtggatggcaggacaggccctgtggagccttctgagcgggtgcagaagagggagggcatgttcctgctccctgcccttcccgggttgccaggccgccactcccaacctccaccctctttccttccacctgctgggccttacgggatgggcagaggcattgttagaacatggagccgcggtccacagagggccagcagggaggagagctccctggggaccacgtcgcctcagtcactgtggtgactttgaaaataaatgctttcttctctgcttgagtccctgttgttcctgctgacgtggaactagggcaggctggtgactcagccctcatccctgcactgcatcggtggcaagttgcctccagcctcagaccccacagagcagggtgccttcttsagaaaaacagtagggaggccaggacaccaagggccccagggacagcctgtttctcctggctggcaygagttctagccaagcctcctggtaccctgggggtgaggaggtaccagctgtgtgctttagtcactggctgctttgaggctgggtcggtgccaggctggccactccttcttgtcccctagtgtgactttgcagagctcccggaagggtcagagggttttttyccatcactggtgtccatgggatactgtgtccccatctcatttttgtactccagtctcagacgggtgctaggaagttggagactttagccatttcacgactgtgtcttgcggggctggagtaggaacaggagtaggaggaacgctctggtcatgggactgtgtgaagagagaaggatcaggaagaaaacatgagctatcatgtctgggttatacctcagcagagccgctggtggcctcccaggcatctgaatttactaatcacaaagctcaccaggtgtgcaaataaacaaatgctgttcaggaggcacagccagggttctgctggagagggatcatcttggaggggtcatactttccacccagtccttcagtccttctgtcctgtgtgtgtgcagcccctgaccaccaccatccctgccccygccacttgctcccagggttccatcaggttggatgttattgcaataaaatgtagcaacagaaggtccaggcagtgctgcagtccctggtggtatcatcagagccagcaggcagcagggctggggaactccaagctgattcagtcccaagtgccggagcggggagctcggatgaggtgggggtggggaaccggggagccatggagcagagcatttgctgtgctgaaggccaggagcctccttgggagatcatgaatttagaacactaatactttgtttaaaaagtcccctgccttggagataagagctcaggccgctgtggtcaggttttgctgtaaatgttctgcacaaagcaggctggggggatcactgggaagtctggggaacagattggtcatgtgcttctttgagtgaaaccttatggttgcattgaagcggccaggcagagggtgtgatggggtgtggtagcyrcacaccggctcagtcaggctgaatggggaaatgcaaactcaggtggcctgaaagagacttagtggtccacagcctggtggctgctcccagtacaggtgatgtaaagagagaaggggttccgggggcttggcccaggtggaaaccatgcactgtctgtgatcctgggcatgtcgaggctggagcaggtctgcttggtggctggcagaacgcacatgaagaatccatgtgtgttctgaacgtcccctctgcccctttgggctcatgccccatcaggagtctcccgactctgccattctgcaaaggaaactgcgctttgtcattgcacaggatcgaacaggtgtgtgtggagtccctaaagccactgtctcaaggggtctcatgggacaatgggagagttgctgtgatgtttaagactaaagtgatggctgggcgcagtggctcacgtctgtaatcccagcactttgggaggctgaggaggatggatcacttgaggccaggagttcgagactaccctggccaacacggtgaaaccccatctctactaaaaaaacaaaaattagccgggcatggtagcgggtgcctgtaatcccagctactcgggaggctgaggcaggagaattgctccgatctgggaggcggaggttgcagtgagccgagatcacgccactacactacagcccgggcgacagagtgagactgtctaaaataataataatgctaataataaataaaataataataataaaataataaaagcaaggacttgaacaaatatttgcacacccatgtttgtagcagctttactctcaattgctcaaatgtggaaggaatggatatacaaagtgtgtgtacacacagtggaatatcattcagccttcaaaaggaacggaattctgtcactacatgtgaaccttgaataatgaaccttgaagacctcatgctacgtaagcctgtctcacaaggacaaatattgtatgatttcacttatgtgaagtcaaattcatagagaaattggaatgacggttgccagcagctaggggaaggaaggatggggagttattgtttaatgaggacagagtttcagtttgggaagttggaagaagtttcggaggtggatggtgttgatgggtgtacaatgtgaatgtacttaatgtcactaacatggaaacttggttaaaatggtaaatttgtcttttttgtttttgttttttttttttttgagacggagtctcgctctgtcgcccaggctggagtgcactggcgtgatcttggctcactgtaacctccgcctcccaggttcaggcgattctcgtgcctcagcctcccagagagctgggattataggcgtttgccaccacgcccggctgatttttgtatttttagtagagacagggtttcaccatgttggccaggctggtcttgaactcctgacctcaggtgatccacccaccttggccttccaaagtgctgggattacaggcgtgagccatggtggctggccaaaaatggtaaattttatattacatatattttatcacagtaaaaatgcattgctctattagaaaaatgatagatttttacaatatgaattaaattacaagttatgaaggaaaaattaagcaaaacattaaaaaattacttataagtaattatatttaaaacaaaagataataaatacacaactttcatcacctcttaggttttttgcaacatttaactattgtctgtcctgttgcggttatgttcttgaggttgtatttgtatgatagaaacactatattcgtggtgactaaacatctcttctcagtctcacctccaatgatgtcatacagataacttgaaattggccggctgggcacgatggctcatgcctgtaatcccagcactttgggaggccaaggcaggcagatcatctgagttcaaaaccagcctggccagcagggtgaatcctcatctctagtaaaaatacaaaaattagccaggagtggtggcgggtgcctgtaatccgagctacttgggaggctgaggcaggagaatcacttgaacctgggaggtggagtttgcagtgagccaggattgccccactgcactccagaccgggtgacagagtgagaccctgtcaaaaaagaaaagaaaagaaagaaattggccaaggcaggaatattgacaccacaggaataggcaagcgctacaaatcgggaaactgagtgttgttgcttttgctggccccaggtggccggttgttgaccgttaactggcacactactggaggagggaggttcagactgattcgcagagagactagaggtagaaacgcaccatggtttggatgctgagggtgagggaaagagaggagtcaacagtggtgcccggagacttggcttgagcaactaggtggatggtagcaccgtttcctaagatgaggggctgtgggaacttgaggggctgtggaaggctctgccactgacggacccagggctcggcagctctgggaggcctactttgtgtcaggccacgcagagataagaccatctgggccctgcccttgggaagtctctgtctatgaggacacagcctgccacctaatggggtgtcccgtctggagcctcagtgttgctgggagaaagcccctcaccttccttcgctctccgagcctcttttgcttccctgccagctgagcctctccatggaggctgtgcctggaggggggtcatggatatggatgtgtgcgccaaacgctgcttcctcgtggatttcctccccactccgttcccacgctttgtaagcttcatttccccggggcctgacctgtggggtttctctccagacctgctccttcccatttccagaaaggcgtgcaggggtttcctatggctctcttccctgtccccatcccccttcccttgggacagtgatctgctggacgggtgggctacccacagggtttgtgattgcttagacatctttgctgtatgaagctttgacctcaaggcatgatgcagatgggaataaggcacgagtttctcctggctgctgtaacaactgtcraaactgggtggcttatagcaaggggaatstgtcctctcacagttctggaggccagaagtctgaaatcaaggtgccagcagggccagcttcctctgaagactccaggggaaaacctttctttgcctcttccagcttctggtggccccaggtgttccttggcctgtggctgcatcactccggtctctgcctctgtcttcacaaggcctttttctgtgtctctstactttcttttctgtctcttagaaggacacagcattgaatttagggcccaccttatcttgagatccttgcctaaattctttctgcagagacccttaaacagaatcaggtcacatttgaggttccaagtgggcatatctttgttttgggggggatcaccrgcccactgtaggtctygttgtgcactgaagacgcaggyggtccctttggccaggcctgcagtcggtcttgccttcttttgtgaccgtggaagaatgcaccttgctggatgcacaggcctttatagttcttttgttcttgccaaatttcagctcagtttcctctctgctgccggcgtgcatcttctctgcccagtgccccttctgggactgtgtgtccaggccctgaggccctagaaaagsggggtggrgrgcctcctcactatcctgtagcaatgaggcctcattaaaatcctggagccccagactggacccagcccttagctatgatcaaaggacagctcgggatatgattaaagggctagagaaagatgatttaggctragaaagaggaggccaaggagcaactggattgtccttgaatgtggaaaaggtaattatgacttgaagggtggtgcccagctgtttcccatctcctctgaggacaggaaaaaaaaggaaataaatgatgtacaattagagcagttggttagatacgagggtgaacttcctggctgggagtatggccaagccctgatttgggtttcctgaaagagctcggggaacctccttacctggaggtttctaggcctggtcatgtggctcygagtgattacattgaaggggcagtggctggggctggagccggtgggctctgagcacagtcacgmaggcatgcgcactttctggctgctctcctgccattgtcccttgggttcccattttggtgaggcgtgcaccctggcggcgctccccagggaactaaatatgtttgctgcactgtgcgtggagatggagaatgtacaattggctgaccctgtgctaatctggtggaactccatgccagccctgggaaagaacaattgcatgggtgtgtccacactcaccaggtgctttttagaaaaacactcgagaataatgctgtggcttaggatggctgttgtgccggacccggcatcttcccaggggggctgtgttgttgggctgagyttcttaggtactggacccccaaatccccaaatacggcgtggacaggtggcccagtaggggctggactatccgataggcccaggtgctggagttcagacaagacataccctggcctggcgtggaagatacggggtgctattaatggcagcaatggctgcatttctgaaacccgggctcccaggccgacgagggtgtgcacgcatctgaaatgtctgtggttttgcagttcccatgtccacaaactcacttggttgaaaatagttcaaaatatccaaagcatgagggagggagtgcctgcttttcttaaaaaggaaggacttgatttcatctacttaaaaagccacccaaacctagaacattttccgcaagagaccccctgccccccgcctctccagaatggctggagagtctcagcactcctgcacatttgggatatttcagagggggtggggaggggcaagtgggcagcgagcgacctcagacccaggatgagctgtcaggcgctccccggccacacattcaagggaccggagtgcagttgtagcgttgcggcctgctgcttcgggggtgggggtgttgttccatgctgtgaattctcacatggcccctgactctgggcagaggccgagggtctaagggacggggtgacagggagagcatgcaggagtgggtttctggctttccagggcgagtggaagaagcgcctctctctcttgtaggtgacagacctggggggcccttcttgaggatgagagcctgttgcttctcaagttctgtgtctaacccaggtccccaggtctaccccagcccctcggccctgcctgccttgtggatgatatagtttaagggtagagaccgctggcctggagggaaggctaggcctcaggttagggcccagaagggagggagaagcccttggggcagctccctttctgctcactcactgcctagctccttccttcacaccttccttcggaaacgtctgctcctgacaaggtctacttcctgctctcaggaggcccttattgtggaggaagggaggcgtcgcccgtccctggcttctctgacagccgtgttccatccccgccctgtgccccttctcccggacagtgccttctccagggctcacccaggagggtgcagcggtggcccccggggcggtggtcgtggtgggggtgttagctgcaggggtgccctcggtgggtgggagttggtggcctctcgctggtgccatgggactcgcatgttcgccctgcgcccctcggctcttgagcccacaggccgggatcctgcctgccagccgcgtgcgctgccgtttaacccttgcaggcgcagagcgcgcggcggcggtgacagagaactttgtttggctgcccaaatacagcctcctgcagaaggaccctgcgcccggggaaggggaggaatctcttcccctctgggcgcccgccctcctcgccatggcccggcctccacatccgcccacatctggccgcagcggggcgcccggggggaggggctgaggccgcgtctctcgccgtcccctgggcgcgggccaggcggggaggaggggggcgctccggtcgtgtgcccaggactgtcccccagcggccactcgggccccagccccccaggcctggccttgacaggcgggcggagcagccagtgcgagacagggaggccggtgcgggtgcgggaacctgatccgcccgggaggcgggggcggggcgggggcgcagcgcgcggggaggggccggcgcccgcccttcctcccccattcattcagctgagccagggggcctaggggctcctccggcggctagctctgcactgcaggagcgcgggcgcggcgccccagccagcgcgcagggcccgggccccgccgggggcgcttcctcgccgctgccctccgcgcgacccgctgcccaccagccatcatgtcggaccccgcggtcaacgcgcagctggatgggatcatttcggacttcgaaggtgggtgctgggctggctgctgcggccgcggacgtgctggagaggaccctgcgggtgggcctggcgcgggacgggggtgcgctgaggggagacgggagtgcgctgaggggagacgggacccctaatccaggcgccctcccgctgagagcgccgcgcgcccccggccccgtgcccgcgccgcctacgtgggggaccctgttaggggcacccgcgtagaccctgcgcgccctcacaggaccctgtgctcgttctgcgcactgccgcctgggtttccttccttttattgttgtttgtgtttgccaagcgacagcgacctcctcgagggctcgcgaggctgcctcggaactctccaggacgcacagtttcactctgggaaatccatcggtcccctccctttggctctccccggcggctctcgggccccgcttggacccggcaacgggatagggaggtcgttcctcacctccgactgagtggacagccgcgtcctgctcgggtggacagccctcccctcccccacgccagtttcggggccgccaagttgtgcagcccgtgggccgggagcaccgaacggacacagcccaggtcgtggcagggtctagagtgggatgtcccatggcccccatccaggcctggggatatcctcatccgcctcccagaatcgggccgtgggggacagaaggggcctgcgtgcgggcagggagagtattttggctctctcctgtcttcggggtttacaaagtgtgttgggacttgcggggctgctctgtccaagcctgggtctggcgtccgcgtctctgagcctgtgagtgcgtgcgctttcctgcgtcctcktgactgccggtgctggggctctgcgtcctgcgtccgcgggagtaaatacagcaggcgaaggggaagctcacacaatggtctccagcgctctggggcagggcttctgaggggcgggcctgcctctgccgggacctggagcccccgcccctcggagaggctcctaggctgacttgggcagagccctctggtgggccgggagggggaaaggctgtgttgaaatgagcaaactgtccaggtgtcaggccaagctgggaggtgaccagcctgaggtcctccccgctccatggccagaaccagggctgacatctgggtgtcctgagcccagctgcccacacggcccacctggggtcagccctatctgagtgggggaggcggggcctcctgggggaccagaactttggctggacgccaagcagagtgccagtggctgttcttcagggctgggcctgaggagggtgtggggcggcgaagggacgggagggggttgtgatccagtggccactggcgctgtgcagagtgtgagctggaaacatcgtagttactttgtcagcttagtggtgaaagccctttttcaggctctatccctttgcatccctgcttcccagagggaggggaggtctgggtctgcagagctgggagggcttgctgttcccgcccccctcccccacaacacctcctcatctkgacatctttgggcacatgctcatactggggtctccctaggtccactgtgttccgttgagcctcctgcagtccccgagtgaatgtgacctccctgcccctgcctctttgcaactcytccctgcgaccgctcctccaggggccttccttgtcccaaatgtccaagtggcacgacttagccggtctgaccactttccagtaagcccttatggagagaggccctgtgttgtgcagagctctcctcctgcctgcgggatcgaggtctctgctctcagttcctaacagaaagtgtcgggcccccagtgggatttctggggaagaactctcgtgtctcaacgggagccctgtggcgggaggggaggccagggtttggggttgtgttcgttgtacagctgtcaccatttgcactatgaaagttgttagtgccccttccttgggtctctgggtgtaactccacccttgcccccatgtgcctccatctggagctgcttctgcggctgtctcccaagccagttttgtgaccctgtaatttagtccaagacaatgggctcattgagaccatcctggtgcagcagttggcaatcctttggctctgggggaaggtttctcagtctcggggagtggggcctcaatctgctggttccctgtgtttatcagtctcccccttgtgtgycctgaatggttttgctgggaattctggtcttagagccatcaggtggcccgagtcgataggcgtgagagagtgtgtgtgtgcatgagtgcgcatgtgcatgggggctgacctggggtatggaaaggtggccctccctggtgcccaaggagcctggagtatagttggagggtgtgggggtgtgtatatgggagttggacaaccttgggtggacagacagacgtggggaagggatgattgaaggaggtggaggagagagtgtgattcagcccagccaggggtgatgtggacaggcagcttccgaatsagggtagagaaaagtcaccactagctagcaggggagaagtcagtatggaggaggcggaccttgagggagagtaggaattggattgcaagaggaaggagagccttctggccagcagcagccagcagcagtgggggaggctggaatgagctggctggagagggggctggggcataaggaggggcctgcctgtgaagatcatatgggccaggctgyggagggccaggcatgcccgccgggagtgcagctggtccacgggaagcatctggagtggctgggaatgggcgcaggagcagcgccgtgggagcacaggtctctttcccggggcggctcacctggtgtcttggttcctgcaaggtaggccgaaagggtggggaggaaactgccagctccttacagcgctgggatggtggccccagggttcctgaggccagcggatgtgggtgcctgtcaccatgtgggttgctgaggggcggagactccaggggccaccccaaagcaggacgagctctgagccacggcatctctgggggcagttttccaatcgagcagacgtctaggcctggaatcctgtaacagaggccacagggccctgatcagggtgttctgggaggcttagaactagtggcagtatacagggtagacggcaagtgacctggcatggggaaagaggcaggtgcccaggccggcacagcacacccgtaaggaacaggtagacgggaagccrtccgtgggcctgtgtgtgtgctcggagttaaaattctgccaatgtcccatgtcctgggcacatctaccccctccctggggagcacctttctcttcaccttttccttccccgcctgtccccttcacccagggccttccccatccctcccgtcttggggaccgagggcaccatggctttatgttccatcaccgatgagttgcacagggattcagtccttccgctgttcaggccgggtccttcaggctcagggttcccaggaatggagagggtatcagtgtcttccatggactcaaacttcccgcatcccgcctttgctcccycttcaagataggtctccragcttcaaggtyttagggctctgtggaggccgccacgtagcagcaaggagaatgttttgtatttggctgatgagatttttagagtctcattttctacttttccactgtacaaacgggcctccaggcgactgcagcacccgccactgcccgtaatagggtgacaagagggatgamcctttcctctttctcccttctggttggtggaggcacggggctggcggacggcatgtgctttcgtgaattcaggccaaatctgttatcgcaaacacgattacaactcgggtctttgtgtaacaaaagcctttccaagtaccagctgttggcctgctttgctcagcggtgtttgctgtaaccagatttgcacaccgagaaagaatccaaaagtccttgatgtttgttgaaacaatctggcccaggacccacgtgctcagatcccagagctgtgtggcatctgagcttctcccgagcccccactgtcgcccgaggaggacccccrgatctgtgttctggaggcagagcaggctgtgggacgggcttctgggtgggaaggaccatgtggatatgccttcttgtctgagagtcccaacacctccgggacgtgggagctggcgcgctggcaggattcaggtgcctctttcctctctagagaaaaaggccccgttgcttggtaataggtgcagacctgtccctaattaatgccagtaggcctcttgcgtgatgaaccctgcctttcagccaagactcaaggcrtcctgtgaatactgcctctctgcagtttgagcttttgtggtgggaggcaggagccatggggagtgggggcaggcctcttacacgggtcccacagccactggcagcactgacttgatgctctttgagttcagagcccagggccagacagacccactgtcccgactacgagytggttcatttagaggggggcggacacagcacccaggcagcagatgcactgtgatcagccttgcagcggggctgtgggttctctgggctggatgtccgggaagaggcaggtggaggtaaacgccaggacacccctgcagtgactgggtgactgcaggctggaaatgctttctgtgggctgtggctgtccaggaaggttttgaatggggctagtggacagagtttgcatccagaggggcagtgctttggaggagtgaggggtatggcagtgtagggatgcccaggccgccctcactctgccattggaaagctgggcggcttcggtttcttcagtttcttcgcctgtttccctgcctgcaaagtggggttagaaacagctctctttgagggttgctgggggactctgagatgcagcccatggcgctgagcacgggtcctgcctcctacgggtgtggtgggtgtcgcggctggygtggcatctgggcgggaaaagggggcatttgcaaaggacaggtaggtttggatgcttaaatatgcagatctggggatgggaggtctcaggcaagggcctgtgtgatgccactgtatgaatgaggccggacagcatggtcaccactaattatggaaagcacggcagacactagtgccagtagcgcccgcctgggggtccctctgagcccgacaggtactcaggctcccagtgcagccatgggaccccccttttcctgcctggctgacattctggaggctggcgtcatgttggctgcaggttcctcttactgggaggttgtcctggtcttccctgccaccatctacccccacccccaccctggagtgtcacagatgggtggaccatatgcccatctgcagggccaagcgctgacaatgaggtgagcacttgctggatgaccggaccatgaggacagcgggggcgctggcagcctgcgttcggctctgcaggctggcctttccctgaaaagcggttgtggcagagtgtgcatcccagggagtggtgcctgctgccctgaacattctcatccagcaggcctctgcaagggcccagtcaagtgtggtgcagagctgggctggcagytggaacagtctcatcttgtctagtggtgagaccaagggctgatgggccaaggctgcgtgctgcttgcccagcccgtggacccatccaytgagcacccccatacccctacactgggcccggggtgtcrggaggtggaggggggactgggtgcctggaaaaacaagcccaccgagagcctgagcccccaggggtcagtatcaggcagtcaccacggtgcccggtacacagtggccacctggtctcgtcggctgtcttggtggtggagagcgtgcatggtggccgtacgtgatgggcatcacccagggtaatacagatatgcagactgtgcatttgtctgtaggagccagggacttctcagcctggcaacctgtgacctctgcctacccgttgggagagaggtgctgttccctgatagcctggtgccgggagagcagaactagggtctcctcctcctttctccacctcccatttcttacatgcccaggcatcaggggaggtcacactcagggatgagtcttggccactgggttcagggcctcactgttgccatctcttccctttgccagccagccaaatgcccgtccatcatcgtgccggggatggggctggcctgctcctctgaagtctccttggtgtatagcctaggctggagccccggaygattccgccaccccctcccccractttttctttttattttgattcatcccagaaacccagccaaaaaccaagttcctgtgctctcccttgacaaagccactgaggaaaaatggtcaaacactgcctttctttccaaagccctcttggtttttcccaaatttggaggctctgagttgcttatgagaccaaagggtccggaactctctggaacacagtcccagaagtgggaggatttgtcatctctccagccaaacagacccaccagttggcccctagacacccccaggcgcctggggcatttctgggctcaggctgtttaatttggtctgcagagccccgaggctccgtttagactgggccagcagacagttctagagacttcaagtttgttgtcgtttttaaaagtcctgccaatgcccagaaacttagagggacaagaagatgacctcgatgtcagccgggaccataaacagtgaggcccgccccccccccccgcatgcccgcctccccctccatgcccgcctccccctccatgcccgctcccccccatgcccgcccccccccacccctgcctgcctccactgctcccgtagctgggtctccaggggattgcccgtggccatgggggaggccgggaatgcggggctcagactctactgggcttctygtatttttttgtttttccttgtccatcttctttctcggaaatttctgaatatccccctacagcctttggcattctgtcactcctggcatctctgggccaactgggaaagccatcatttgtccaatatccagaaaatcaaggggcctggccttaaatacattgcagtgccctcctccccacatggcatcgaatttcctgtgtcctcaaagccaggagcctgtgccttggatgtgggcgatggagccttgcagacacctggagcggctttcctgggagagtctccctcgccttcccatccacccgcttcccctcccctgccccaagctctggtcacagmctcggaggggtcatctgagtgtaggttgcctccaggtgtacagttggaggggggcagttaccccacatccccctgtctgctaggggcacccccagggactcaggtcttgagggacagcggaagggtggggtggggagtaggccgttgtctcgtgccacctgggtgttatgtagactctgaatgggcagttcctgggagctggtttttccttctcaccccttctacagtgctgcccctctgaggggctggagctctctggagccctttgcagcctgtggcaggtctttctgattctgtgcctggtttcgcagcctccaacccatagccagtggcatgaagaacattcctggctgtctctacctgtggcctttgcaggcagcagttccctggggcagggcctgggggtcctggcacctccttgtgggaccccttgggtatgagggagggagccacctgggccacagatagacccccttcctgtatccaggaggttcaggatggacctgtctcatctttctttytggtgggaagagagcattcctggccatggggaatgtggcctggacagagccacctagcctctcccctcccccaggcagggccctgaaagatggagatggctctgctcctgccaggtcaacagccagcagtctggtggatttccatgcagtccaggcaggatctccttctgtccccaccccccaccccatgtgcaggaagctggttccaagcagggacccttggcccygctttccaygtgggtgggcagtttccctgcgaggggcaggccaggcccctgccctatgtcccccagagaccgatgttatctacagtaagagcatacaagtctttttggctccaaaccaggcctggaggggtggtcttctyctctgtcctctgcctcttgccccccattaaaggtcagggaatggagtgctctgtatgtttgctggggttgggttttttcctttggtttaaaatgaagggctggaatccctggtgcagactgcacggtgagaggtgctccttgggatccactcgaggagcattactgctgaatgccctgccaggccaggagcatcgctgggggtgggagaggcagttggcttatttgtttatccaacagccatccatgggtaccccaagggccagctctgttctaggcactgggggtctaggcatgggctcaggagaaggggtagaacgggagggcttcctggaggaaggcttcctaaccagagacyggggtaggagtttgccaggcaggtgatgctggccagcttctcttgccattttccttttctttttttctttttctttctttctttttttttgagacagagtttcgctcttgttgcccaggctgcagtgcagtggcgtgatctcggctcactgcatcctccgcctcctgggttcaagcgattctcctgcctcagcctcctgagtagctgagactccaggcacgcaccaccaygcccagctaattttttgtatttttagtagagacaaggtttcatcctgttggccaggctggtctcaaactccttacctcaggtgatccgcccaccttggcttcccaaagtgctgggattacaggtgtgagccactgcgctcggccttctcttgccatttctgcagactcatagtgtgtgtggaagactgtatgtctgtgcctggcacagctgccctcggcactcaggtgggaggtgggggagagggctgttggtgccagcacaggtcatggcatgagacaggctcccgcagccaagcggggtgcaccgcagcattggaggggccctgctgcgcacgagatccaggctctgcatctgtcctcctccccaggaggcctggagggctgggagggaccagggtggtgaaataacccaggtgggagagaggcactgttggagaggcagagggagctgcaggtttgtagcagcgagctttaaaccctgggcctccaccagaaaacctcagaaagggctgctttgcttttttttctaaactacaaaagaaacccttggccgcctgggccccttggggtcrggtgggggaggagatccttcattcgcacctttgcaggcccagtactgtgcagagggaggagggtggaggcaaaggcgagggaggagggtggaagcaaaggcggggtccctccctagccccsctgccctgcctggttgctgctctcagacccctactcctggcccggaaacatggaatcttgggacagctggggtagggggcacagaacggagaccctggtgagggaggaactctttctccagccctggctgtggccacagcaaggccaggctgggaggacctcactcaaatatttacatctctcctaatatttaaatgatgaagcaggctcctgcacacagctgccctggagccagctgttgcctgccctaccctccctctctccctccctctttctttccctccctctttctctccctccctccttctctccctccctccttccttgcattctttgtctctgacccaagtccaggcccttccagctgttctctccttacccacaggcacctcctgtgactgagcttctccttgttatttttcataaccatttcctttaattgagcacctcctaggtgccaggccctgggctggtactttgyatacaaggtgtcttttaatccccacgagagcccaacaaggtagattgggctgctgaggctccagcgctggaaggccggcccgggtcctcccagtccgcacctgcatycatccatcactcccccactgtggagacctgttccctggcccctggctgagcacgatggaaatctctgtctactagtccttggagagtggggatggctgagggtcccgaccctggggtctgacgggggctgcctctgccccacttcagcctggctgctcttccactcaatgactgagtttgcaaaaccagaataacagtgckacctggctggtactttgggtggctgggaggcgtgggagagggtgcacggaggggctgagcgaggtgtcagcatcgtggggatctccgagggtagccttcccaggcccagggcggagtgtaggcagagggcgcgatggcccagcgtgccggctcacatctggccttgcccttgcccacacggcaatgtgggggagtcatcagcctctcagtgcctcagtttcccatctgtgcaatggggacaagagtaaatcactgtcttcaggtatggtaagcactcatacacattgactattgcagaatgaacacagtgagcccttcttaggcttctactacatgccaggcagggtgccaggccctagtggagaggggacaatgatgggcaagctggctcctgccctcaagggctgtcgagcagggaggaaggcgscggctgccctgactgtgacccggagtggggtgattcgcaaagaggctggcgggaggctggctgggggctggctgggggctgctccctctcctgcctgtgttccgtggcagggtattaaactggcttttttcatggatttccgaggccctgactgtgggacctcgggcaggttttgggaccttgtgactttgttcccgcttgtcattcaggcctttgtcctcagcagtgcccagcacacggcgacttctgcatgtccttcagtgtgtgactgaccctggagctgagacttggcagctgaggctggacattgtccttggataactcccggggaggtgggggcagggtggggctgtgagctggcaactccgagtccctagcagcctccgaatkgaggctttcctcttgtaggattctcggggaggaaggaggggatgggggagatgaggcttgtgagtcttcaggagggcagaggttcacacctgcagcgccccagaaacactccggggtgcccaggcttacccagccctcctgagccagaaccaccaagagttggggaccagcagtccattttttagcaagatccagaaatgattctcctgaacagtccgagccaagaatgacatatctggaatcagaacatcagaactacagaggaatcgagagaacgggcccaaaatgtgtagggacctcagccacatggcgccacatggaggaaagcacccaacatcatcactgtatgaacctgtttaaacacacacacacacacacacacacacacacacacacacacacacactccccagtaaagagtggaaagacatttgtcagaatattgatggaagttacctgggttgtgggtttatagattttttccctttgtttttgtgcattttgcaaattttcggctttgtgcctaaattccttttacagtcaggaacaaagcaatagatgttattttttaaagttcatgggctcgtgcccgtaatcccaacactctgggaggctgaggcaggaggattccttargcccaggagtttgagaccagcctgggcaacatagggagacccccacctttttttttttttttttttgacagagtttcactgtgtcccaggctgaagtggcggtggcacgttcttggttcactgcaacctctgcctcccaggttcaggtgattctcatgcctcagcctcctgagtagctggattacagacactcrtatttgtaggatttgagaatcctacaagaggaaagcctccattcggaggctgctggggacttggagttgccagctcacatattttttagtagagacagggtttcaccatgttgaccaggctggtctcaaactcctgtcctcaagtgatccatccatctcggcctcccaaggttccaggattacaggcgtgagccactgygcccggccatgggagaccccctcttaaaacaagaataaaaataaaaataaataaaagtttactgtcaaaaagaaaaacacatcacccaacctaatctccccctaggattgagagatgaggaagcagaggccggaaagtgtcacattccctggtcgctggcagtcaggggacctgaggcctgggctggttttctcgtgctccaggcctggggtgtcaggtggagcccctgctttgcccaaaggtctaggtgcctctgccagcactgcttgcttctgcatttttggccacaaggaatgtgggccaaaggcagggtccttgacctctgcccaggagggtgaagtgggctggtcctccttgtccctgctccaaggcccctgcggctgtgcctttggaaaytgctggcccgagctagtgtgcggagctgggacagacctcaccgtggccctcgtggggtcattccatgtccgggctggaagggatctttcggtccagcccttcctgttcctcatcaggaaactgagaccagagaggtcatctgcctggcccggggtggggtgtagatggcgcttgtgactcctgcatgccacgtgcagacagtccctcagctgtgggcttcccacgcaagcagccatgctggggataacttggctgaaacctgygatttaatgaagagaagaatgactcctcctgcagccctgtgccccacaggctccctcctgcccccacccctcctgcagaggggcctcatgctggtgggtgggtccctgttgctgcaatgggcccaggcagtttctgggcagtggaggcttggctgtcttcctgcccaatgtcccctgtagcccacgctgtccgggaagggcggggaagcactcagccactggggacttcacaagatgggtatctgggagatgctgattggcaggccaggctcccgtggcccacaggcaggtcagaggtcacagtgctgagctgggctgagttggcagctcagggcagtgggggtgggggtaccttgctcagccatgggcctctctggcacaagggtttggagtttactgtaaacaactccttcagtttttccttctctcataggccaccagcagaattgaggggccctctgttgatgaggtgtggcctgggaggggctagttgtctgtccacctgatccttgcggacaggtgaccacaggcttcctgccccagggggctgggggaaagatcggggaggcctctctggcttccccacttggaaggaaaatacgggcataggggagacactttacagggacacatttcagccagtaccctctggctgtgctgggggcacagtgcctgccctgcccacaagaggggtcagttctctccaggatttaacttcagccttcagtgcagggcagatgagcactcagaggcccagaggactcatatcacgagagagaagctgtgaccrcacaggcactgaaggttaarcagaagagtgggacacacgggtgacctgaaagtcccagggtcagtgtggttagccccagatagctggggagctttgggtaccaggcttagcaggggaggagggcccccgtgacagtttgctggggctgctgcaacaaagccccaygaactttgggggctgaagatggttctagaggccagaagtccaaaatcaaggtgtcgaccaggctgatcctttggggcctctgcgggaggctccggcccaggcctctctcccagcttctggtggctcccgggtgctcctgggcatgtagatgcgtcacgccactccctgctccgtcttcacatggccttttctctgtgtctctgtgtctcgtaaggatgcttgtcattgcatttagagcccaccctaaatccaggatactctcctcttgagatcctttattgcatctgcaaagaccctattccaactcctgtcacattcacaggtccgagggctagggctctggcatgtcttttgggggtcactattcagtccactgcggcagctgatcttaggggaagcagaatgttctaagcttggggtgagcggagggaacgctgctgggtggggagtgggagaccaggctcggagacacygcggatctcctctgtctgatgagggcgtgatgaggttctcatctcaggtcctctgaatggcggctgcttctgaggagaccctttcccctggatctgcccctccagaaacctccacttaggtccaggtcccaaggtggatggtaagaggcggctgtccctgccacacttgatgggtgagtgtgtgaacggggctgggagcaggacacttgtcacttctgtggacagattccagaggctcatgaatctgctgctggggaaggygyctgatctagcctgaccctccacccccrcctcccccttcccgccccccttcaccagccctgttcccagagcttcacttccccaaaggcaggcgccgtttcctggacttctcagcagctaccccctaccccagacccctctcttgtaggcccctctggtctcagcgcctactcctccctgggcttctgcccctctaccgtgaggcttctgggcagaagtgtggggccccctcgctgtgtctggctctcgcggtataccaggggtcctcccaggggcccgccctgcccgctaggtttccagggagcttttcaagttcttagatgggcttgatggagtttcccaatgcgttgtctcagagcaggaggggccccggctgagtccgagagtcccctcagtcacaccctgggctgtttggggcagccaggcagcccgtcttctggaggtgctgcctctctcyggttaccccttctggaatcttctgcgtccagttgcggcccctcctacacagcacacccaccacccccttttacctgtgactcttctttgtcaacctcttcatgtctttgagaatggagaccaggtcctcctcaccctggagttcagcagaacctaaaccaggcagatccgtgtaggttcacgtgggggctctgtggccactgtggctctgccgtcacctccagcccagcttggcgcgctttggatcatgtcattcagtgccggtcctccaaacctctcccctggctctgcaggyctgggaagcagctggctcctgggtgcagctgtgaccggagcctgaactctgctccctggggtcaccgtcccctgtaattaggctgcagctcatattggctcgggcagaggccatcggctgcccgccttggggccacaacacagagagccccgtgattaatggaggctccacctgggccaagtggyccctggtgttaggcgcttttttttttttttttttttttttgcattttttaagtgcttgtaacatttcccctaatggacaatgagacgaggagggagggaggggtggcttctctgcccaggcagatcaggaatggtcaccgcctgtgtgtgcagtgacaggtctgggaacagacaagggagagcttgtccgggaggctggaccctcacaccgatgctgcctgtgcctggcagctctgtcccgggcctcagaacagacactgaccaacacrctcctcagggtctccaggtccgggtcctggtccccggcagagcttcccatccatgggaagaagcaccgagcagccttgctggctcctcgcagggagctgggatgcatttctaagagcagcatgygtgaagcccggggtctgggcaaaggagtgtttggggaagagtctgctgttgttggagggtcggaagtagaggggaaggaggggcacgcggtaggctgaggaggtggctggcgaccctgtggtggggacgagggggctatgagcagaccaggagccagcatcacgtttctctgtctccagaatcgaggacggagagctgccagagaggccctggcggggtgtctggggccacctaaagggcgtgggtggattaaagctgaggaaagcctcattttgggggactccrtacttaacctttgaggccctcagagctgcagcctgtggtttttcgaagtcaatcacctcccagggcctcgctcctgccttcagcgacagccatttatcagggagtctttgacccaaggagacctgaaaggtcatctggtccctctcctacccccaggcaggccacacctagaccctcccacacagatccgtcccacccttctgctgccttccaccagggamggagggtgggcggccctcccacccaggccctggcggccccaccccagccaggaaattcttcctctttatctgcctcacatctcttcccctgcggcttccgcccatttcccctcaatctgctcctagtggagcagccagcagctggtttagaacccgggggtggggggagcgctagaccagtgcagcacatctgagagtgtgccagaggtgctcccattcccatagctgatttagtaaagaaaagaggaagtccagcaacttagcgccactttaaagtccgcctggaatgaccctgtggctgccggaaccaggggcacgcggtagatgacgggagcaggcacagagagkccttcgtcccggatcagtcgctgttgccctcttggaggctgggctgcctttcaagaagaggacccaaggccctgtgagcggtggcctcctctggagcctttactgtggtcctggttctgctctgcgtaaagagagatggcttgaagcagaagctgctacgtggctgtcccaggcaggcgcccgtagtcccagctactcgggaggcggaggcaggagaatggcatgaacccgggaggcggagcttgcagtgagcagagatggcaccactgcaccgcagcctgggcgacagagcaagactccgtcttaaaaaaaaaaaaaaaaaaaaggagtagagaaatctttcccagaaggcctgcagtcacctccccttcatgtttcagaggtaaaaaaaaaaaaaactgcacatttcgctttttttttttttttttgagacggagtctcgctctgtcgcccaggctggagtgcagtggcgcgatctcggctcgctgcaagctccgcctcccgggttcacgccattctcctgcctcagcctcccgagtagctgggactacaggcgcccgccaccacgcccggctaattttttgtgtttttagtagagacggggtttcactgtgttagccaggatggtctcgatctcctgacctcgtgatctgcccgcctctgcctcccaaagtgctgggattacaggcgtgagccgccgcgcccggccrcacgtttctgttcttgaacaggtggctccctgaccctgggtgtggttactccaagaccttgctctggtggggcacrattctggccccaggtagggcgaccgtataacttactgtcccttgggggacacgttagtgaaagggacccttgaatgactacggtgggacaacagatgtgagctgggtttgtcccaggaaggctggatgtatgggcctcttgagccagaggagacaacagcagaaagctctgcggctgatgggaccgagcaggagaagggccggcggaggctggggcaacaacgcacttgcccactgtgaagggcctgtgtgagctgrtggctgatgagagggcagtggggcgaggctgcctcctgccaggctagaccagctccaggacacccatatctccttttcagaaccggtgactcagtggctagaaggggcttcagaattgacgggacactgagggagtcgaatggaatggctggagtggccacagcaggctctaggcctcctcccgtttcttttctgtgttctgttcctggggtctatatcctggggttgctgtaacagagtgccacaacctgggggcttacaaacatagcttccggcggctcctggagattcctggcgttccttggcctgcagacgcatcaccaycatctctgatctctggccccyrtctccacgtggctttctccccctgtctgtgtgtctttctccttttctgtcttttataaagatgctcaccattggatttagggcccactaaattcagaatgatctcaccttgagacccttaccttaattacatctgcaaagatccgttttccaaatgtgatcatgttcgcaggttccaggagttaggacttaagacatatcgttttgggggacactgttgaacccactacatttaataaacccagagttggtgccartgtcccctgcggacaccatagcagattctggaggttccttgtaaaggaatccgtaggacttcttttcccttctggagggatgagactgtagctgggctggggaaagctgctggttcaagctggggctggttcagctggtgctggcttgccaggttgttagagagctttatccagggagaaattaacatcacaaagttgggggataagagaaggtttggaatcccaagggctggctrttgaggtcagctgcccacccctttgtgttccatcttacagggacccaggcctgccagtgctccrtttctggaaggaatgctgtgggctgctgtgccccataggcagggtggagggtccccttgcagccagcgagctgctcttcctgtagcgtgcagagggaaggaggaggcttgtttatttctcttggcctcagcygaaaatccaaccacaggctctggcactaggcagacctgctcattctcacatcatcattgcagagtgagccaggcctcttgggtggggctgtgatgagcaggaaggacctcyggagtgcctgggacttcttgggcccagggttgccagaggcagagagaaagaagcctcctcctaacacttgagcaaagatagtcatcagaatccatcagagtggcctcctgtggctcttccctgggtgctgacccccctgrtgcatttgaagttttcagggatactattgacgctccctgcacctccatccaggggttagtggaaatggttcttttcctccttgtycagaggtactgtggatgatgaccccaggtcccagacctcagtcattgggccacgtgtgcagataagcctgggcagtcagtaacctttggccaccaagctggcctcctgcggactgggccggcactggaggcgggtcttagctgctagcactgtggcccagccaggcctggccttgggaaggcagagggggaggggactgggaaagggattgagctgggggtggggtggtaccctggttcttccctcccagacctttggcaggtttgaactatctgkctgcggctctctaaggagggagcgcctcctccgccttgatgtggactttgccttctgttcacgttgtccctgtccctaaacaaatgtggctctctgtggggagcctgggggccgccctccactgacactgctgtttcctggcttccctttgcaggctccgctcagcttcactgcgcctatttttaagcctttccttttggacggttttgcttcctgagaacacacccctccccatcaccccaactgtgtcctcctccctatccggagcctgctccacctgccccaggagccacctccctcctccaccaagcagcccaggccaattctggagggctaatttgtgtccctccagaagcaggtcctgagacagggatttcagtgggaggggacaccaggggatgcctgagtgtgggaatgggccaggcagggaatccagccaataaagggtgcctcaycagctcattgtgaccacaggtggctgcccagcccccataccgggcagcatggggagactgcagaccgtgcccccagccttgtcccacctggggttgggtaagggagctggggtttttatacttcagttcttggccaaggactgcactgytcactccttccagccttccgagggcttgggcactaggaaaggctctgggtggagacacggaaataggccatgtgaagtcagtgggcgtgattggtagcagtaaggccaggacagccttggtcaccagcaaggtgaccacacatttcagcatgcacagcccccacagacacacacccaggagatggtaattacaccagcaacagtcayccctgccgcgtgccatgcctgcacccagggaatcttattttttatttatttatttatttttatttgagatggagttgcgctcttgttgcccaggatagagtgcaatggcacaatctcggctcaccacaacctccgcctcctgggttcaagctattctgcctcagcctcccgagtagctgggattacaggcatgcaccaccacgcctgactatttttgtatttttagtagagatggggtttctccattttggtcaggctggtctcgaactcctgacctcaggtgatccacccacctcagcctcccaaagtgttaggattacaggcatgagccaccgcgcctggcctcaggggcaccttattaccccatcacctcctacagcaggtgacactgaggacactgaggctcagagtagactgtggttatgtcactctcctgtttggttctcctgctctcagccctgaaataaagagcacggtccctgtgcaggcccatacgtcctgtctccagccctggagcagtccttaagctccttgaaggcacaccaggcctttgggcctcgtcccccaagtcctggataaataggaggtgaaggagcctttgcaactggaccccrctctgccagcgccaaggccctgcctgactacccaccccaccctacacagatcagggacctgtgccaaggtccagtgtcacaggagagtgaagacaaggaggtgcccatggcgtacatgctgctggactcactctgtagatcctaagggttatggggagttatstgccaggtgaggttttcccgtggctttttcctgcaggctcagggtagcatacagggaggtgcttccctactccttggcaccatctgtccggcttccctgagccctgaccctggctcctagatagccagtgtttcttcagggacagaacctgctttgctgctgctcagaggagacccagtttgaccagggctagcgttcctggaacctgagcctggaattccaccctgccctgggcagaggccacgttgctccctcctacgagarctgagctgcgcatgagattattctgaccttgggctctaccatttctttgcatgacatttgtcccaggctggagcagggctctgtggctcgcttggtgttccctccccagactgaggcctgatatgtacaccaggaagtgcttgatctggtttcaggagctgggagcggtttgccaggcagcctgtggtcagagcaggggccttaacaatggtcccttgtgcggcacattcctctctaaayaggcccaggtccaggctgctcctgtttcgaccccgccatgggcctggaggggaaagtttgcatctggagggtggcccactgtggcctctttttgtgtagcagctgagaccgtaggtgcttgagaataggagaagccctgtgcccatcctgggctgtgagatgtttttccagaggtggggatggggatgggccagcatgcagttacccacaccctccagcttgttggcatcaaggtctgtgtatgtgtgtgtttttttttttttaattttgtttttccaacatggagtcttgccatttgcccaggctggtctcggactcctggctcaagcgatcctctagcctcaggttcccaaagtgctgggattataggtgtgagccaccatgcccagccagtaccaaggtgtgttttttaagagcaatattggccgggtgcagtggctcacgcctgtaatcgcagcactttgggaggccgaggcaggcggatcatgaggtcagcagattgagaccatcctggctaacacggtgaaatcgtgtctctactaaaaatacaaaaaaattagccagacgtggtggccgggcacctgtagtcccagctactcgggaggctgaggcaggagaatggcgtgaacctgggaggtggagcttgcggtgagccgagattgcgccactgcactccagtctgggcgacagagcgagactgtctcaaaaaaaaaaaaaaaaaagaacaatatcgatggttttattccctgaacatgctaagtgatccccatgtagtataagcatctcagaaggcaggaaaatgtaatgaacaacacccaccgccattcattccatccagagatcgttattttctgcccgggtgtgagtgtgtgtgtgcgtgcaaactgcacatgtgtgtatgaaatggaattaggatctttgtatacatcttgtgtcctgctatttttacttaatattctcggcatttctcatcttcaaaaatgtgattttaatgatggtgcaggcctttgacatatgggtttagaaaatctgcggaaacccggactgtttccaggttttgtcagtttaatgctgatgcaaatgtcctcgtacrtaaatctttctgtacttctgattatttccttgggataaattcccagaagtgggccaaagcacatgaacggtcttcaggcttttggagcaagttgagatcggtggggattggagaagggacccagggaggcttttgggagcttgcgagattggagtctggctttaggggacttgaattcacagatgaaggagatggctggcaaaggtgggaacctcctgctctatgggtgggggggtgacactgctttaccttccrgtgacagcatggggatcctcccaacatgacctggctccgcatctttctgacactgtgcacggtccacagttgtgatgctcagctgggagcctcttctgtgtccttcagttgcattaactccttgcagacagaggaggaagctgtccggtgctcctccctgctgcgtgggtcctttgaatctscccagttgggcctgtggatctgtgcagtcacgtacggggttctaaaatctgcaaaatgacaagctcacgaacactctcgcttctgtgggtgaatgtggataccccttggctgcgtctccctccacagggaagatggagacgtgtaaagtgacaaggacctgctacccctgggcaggttatgccggttccactgtgaggatggtggcagggggcttcccaggrggcctgcacattgggaagagaggggcgacygtgtgtgactgcaggacccagggcgyagtcttaggactctgatgggggaggagatgctggggagccctgttctgccagcctggtgacagacatctcctaatgtttcccggctgggtacaactcacaatgtcctccgtggggaggcaattgcccatgaggcatccctggcagggatgatcttgtttcattgccacatatcccagcaatgaaacaagaatctagagtgatgtgattcctccgatgacttctccaaccatctggggtttttgtgcgactccaagaagggggaaggaggcagctctcgctcctctgggctcctgatgtggcagctctggaatggccacgtgtccgttggcccacagtgggccatttgtcgaatgtggttgtggtgggattggggctgggctggagagtgggtgaccacaccagctagcctcaccctgggccactgtgcagccaggggtttcatcttcccaggggtctcgttgtgagtgtcctggggctgctggaacaaattactggaaaccaagtggcccaacaaagattgattcgctcatggttctggaggccacaagtttgamatcaaggtattggcrggaccacactccctccgacagctcgaggggaggacccttccttgcctcctccagcttgcgttggcccaggcgctccttggctctggcagcatctgcagtctctgctctcatcacgtagccctccccaccgtgtctctttgtgtcccaagtccccttctgcctttctcctataaggacaccgagcactggatttagagcccatcccaaatccaggatagtctcatcccgggatccctaatcacatctgcaaagaccctttttccaaataaggtcacattcgtgggttcttggggttaggtattagacatgtctttttgggggtcactagtcaaccctctacagaacctcagacgaaagtgaatcttcacaggctgaaatgggggtgaaggtctagtgcgtccctcctccttgggagctccctcagggcttgtgcctatcctgtgatcctgtgatccagccttttttttgagatgaagtcttgctttgtcgcccaggctggagtactgtggcacratctgggctcactgcaacctctgcctcccgaatttaagtgattcttctgcctcagccktccaagtagctgggattacaggcgcccacccccatgcctagctaattttttgtgtttttagtagagacagggttttaccatgttggccaggctggtttcgaactcctgacctcaggtgatccgcctgccttgggcctgccttggcctcccaaagtgctgggattacaggcatgagccaccacgcctggcatttagtaggttttggttgttttttttttttgagacagagtctcactctgtcatccaggctggagtgtagtggtgtgatcatggctcactgcagccttgatctcctggcctcaagtgatcctctcacctcagcctctcgagtagctgggattacaggcatatgccaccacccctggccaatttttgtattgtttagtggagtcggggctttgccatgttgcccaggtttgtcttgaactcctgggctcaagcgatctgtccaccttggcttcccaaagtgttggggttacaggcgtgagccaccacgcctggcttagtaggttttctagaagcgcctgaggcctggtgaaggcatggtgtcatggagtagagaacattcaactctgttcccggggagccggaacacacccctcgtagccaatctcaacagtcatgacgtggccaggatgacatggggagggggtggtgtggactgtgtgggaggccagctccccgggaagggggctggagtgggcttggctttgaggaggattcccaagaggaggaggaggcggtggcatgctcgtttggggggatggcgtgagccagggtgggcacctcttcatttaggtgtcaccttcttgacattccagccgggacatggtttccytggggaagatggacacccccagagtggggcatctcctggggaagatggacacctccggaatggggcgcctcctgttctcactgttcttctagcacacagttgtattctcttgcagttctggaggctgtgagatctcctggctgttatctagaacaaactcgcctttgagcagcgccrtcctgatggtggggtggcccctgcgggtggaacagcccctgctgtctcagagcttactgasagctagtgggcatgggagtggtgctggaccgaaacacccagagggatyatagagccaggcagtaagcacagaggccagctagtggggagggagggacccatccatgaaaagacaccaagcattgaaagagaggagaggatggttggggaccggcacacatgtgcattttgcgcagatggccaaggtggtgaggcgccagccacgcagacaactggaggaaggaggagtgccctaggggaggggccagctccggttctagaatgatccgctkgtgcacgtgggcctggctggaataaatcattgcatccgcaccgtagactcaatcgtaagctcacaccagggcagcctctgctttggtgcagtgtcttcgatcatgagttggccatggtgggggtgactccaaggggactcccaaggagggggttcaccggatctcccagggaaggtcatttgttttcttgggttggacctgggacaaggccttctcctgtctagtttctgttctccaacttgrccgcacggaaggatgctgaggacacctggaagccggcccctgctctacagcacccataggacagaggcacaccatgtggggacagtttggacagtgctcaggaggcagggagcagatcagaggaccgcgggaggccctgggaaccgcacgaggacccaggcattgagctctgcactttctggcatcagcccgatgtacagtctggctctgtgtctaccccgtacttcactttccccatctgtacgggggcggtaataatattctttacagcccaggtttaagcgggtgtagatgtgatgagcttggtaagcccatctcattacattcagttctgggcattgaaccctggactttctggctggtagaagtggacattcaacctttccttggggccctggggcttctgcagaatcagaacacagycagcagtttgcatgcagggtgcagagggacagagggacaccatgtcgggagcccacacctggcacacccctgactctggggctcagtrtcctgctgccctgcggccacgtgatcagctagaggtcatggctggacccataggcgaatacagcctgtggatttgattttgtttggccctgcggtgttttattttatttttagttttagtttgtggagacagagtctcgctctgtcagtcaggctgagtgcagtgacacgatctcagctctgcaacctctgcctcccgggttcaagcgattctcctgcctcagcctcctgagtagctgggactataggcgagtgtcaccatgcccrgctaattttttatttttagtaaagatggggtttcaccacatcagccaggctgctcagtgttttaaaaagggcttgttttgctttgtgccagcatttaaagatcaggagatatcatataaagatccagatttctactctcttgagaagtgaacagctctggccacgccgggcccatatcctctagggcagtgacggagctgagacagggcctgtgacaactgagagttctctggagtccacrcggctccttgcccagcttctggtggaggttgagcttagtgacccaggatttcgtctgtgtccaccaagaaggagaggtgcctgtggcttagagagggcgcccacaggagtgccttgcccaggaagctggcagctgaggcggccagggttagggggttgggcttcctcttcccctccccagtgcctgagtgcatttggaggaagagagacgggtgaggggaaggcactgaaattggtcctggagcgctattattgggggctggggaccagctgtcatcccttttcctgtgggcaggggaggcagtggtgggatcccatgagacccggactctgtggcctggtgaggcagggagcggctggggagacactgtgggtctccacaggggtgcgctgtgggtctggcctggggaaggagctggtgaatgtgcctgccatgtgggtccctccctgctctggccctgataaccaggagcggctggctctcatttggagtgcggttgtggggactgtggaggtggcagcttcccaggtaccatccccactgcctccgagggagcagaccctggtggagaggcaggatggctgcagggcgggagctggtggttggcatcactgcacgggcttgtagtagtggatgggaagatgcaggagaggctgatgactgagaaagttggttcctgtggactaagctgggggagccggacaaccaagtggttagaaccttgggctctggtatcagcctgatgtacagtctggctctgtgtctaccccgtgccccactttccccatctgtactgggggtactggtattctttacatcccagggttaagcggctgcagatgtgatgagctcggtargcccggcgcctcgccggcactgaaagctccagtgtccgcccttagtgtcattgatggggttttgttccygctgcggttctgattggttacagttgcggtcacttattattggaggcatgtcccccgctgtggctgatggtagaggtgtgtttgctggtggtgtcccagtgtgtgccttggctggaggtgaggagggataaaaacagccgcgacaagaaggaaatcaaggccgggcacggtggcgcacgcctgtaatcccagcactttgggaggccgaggcgggtggatcgcttgaggtcaggagtccsagaccagactgaccaacatggtgaaaccccatctctactaaaaatacaaaaattagccaggcatggtggcccgtgcctataatcccagctactggggaggctgaggtaggagaatcgcttgaacccgggaggtgccgctgcactccagccagggcaacagagcaagactccatctcaaaaaaaaaaagaaggaaataaaagtcttctctggaactagaacgttcctatgtagacgtagctggagggggaggctgtgtggtttgcgccgtggccatggcaagacacgacgggcagcatcttcccactccagcctgcatctctgccccagaactcatgatggttctcctaggatggggctgtcccttccgcttgctgagacatgaaggacgggaagagacccccggccctcaccgccgcatcgcctgccttcctctgctgctccttagcaggaaacatgccggagtgttccctagccatccattcacyaattgcatcccctctctttatttttcagccttgaaaagatcttttgaggtcgaggaggtcgagacacccaactccaccccaccccggagggtccagactcccctactccgagccactgtggccagctccacccagaaattccaggacctgggygtgaagaactcagaaccctcggcccgccatgtggactccctaagccaacgctcccccaaggcgtccctgcggagggtggagctctcgggccccaaggcggccgagccggtgtcccggcgcactgagctgtccattgacatctcgtccaagcaggtggagaacgccggggccatcggcccgtcccggttcgggctcaagagggccgaggtgttgggccacaagacgccagaacyggcccctcggaggacggagatcaccatcgtcaaaccccaggagtcagcccaccggaggatggagccccctgcctccaaggtccccgaggtgcccactgcccctgccaccgacgcagcccccaagagggtggagatccagatgcccaagcctgctgaggcgcccaccgcccccagcccagcccagaccttggagaattcagagcctgcccctgtgtctcagctgcagagcaggctggagcccaagccccagccccctgtggctgaggctacaccccggagccaggagggtgagtcgcagagcgctaggtcttggatgctgtggtaatggggggcctggytgctggctttgccacagaatcttggaggaagaagctggatatggggtggagggtgctaccctggagacccagaaagaccggaatgcatgggggtgggggtctgcaagctcaggagaggtggctctctctgtctgatgggaacatgccaagatgccccaagcgggacttgaatgagagtttggaaagattttctgggtttcaaggagcctcctttatgggtcaccgtgggccttgctgggacctctgtctgctgtgtgtccctggagggcctgggaggcttrgagaatgaggagccacgcaggaaccagggcaggctcatgcaggggtgtaggacagggtggagttgagacccctagaagggctgtcacattctggtggctcctgcttgaggaattgcaggctgcctggatatgcccagcagaggccgagggcttggggaagggaggagggacgtatgcctcctgaggcttgcattggagcccatggtctggtcctcctcccccaggagggatggttgtggcagagggaggggaacatgaggagcaccttagcctgcaggacaaaattctcagggcactgggaaggggtgcctggaccagggggctgtgtgatagctgcacacggttttatttgggggtgcccttctggcgagaggagagaggccatggggctccagcagcgtcctgggagggctcaagcccacagccgtgctgacrtggagcttacaggcaggggattggtgccagtcctgtgggacacagggcctgtttggaaatgccaggctgtgggacatggttgggtcccttctcagaagcgtgccccctggccccagcagggatcgtggctccatggggctatagtaaggtgccagctgggttagaagcccctcaagagccaggtctgattctgggcacaggatcagaactcagtaatgctcagtaagccttctttaggttggacaaacagcacagtctgggtttttgatttagctgctgcttcttatttctaaccgtggtgaaatacacaacatacaatgtgcaattttagccactttgcagtgtacgtttcagcggcattcagtacattcacggtgttgcgcagctgccaccgctgtccatctccggtacccttttcatcctcccaaactgagctccgtccccgttagaccaagctccccatgcccctcccccagctgctggcagccaccattctattttctgtctttattatgaatttatttgaccactctaggaaccttgtgtgwgtggaaaaatacaataactgcccattttgtgtctggctcattkcactcagcatgacgtcctaaaggttcatccgtcgtgctgtagcatggggcagaatttccttcctttcagaggctgaataatattctgttgtgcgatgcacttgtgttgtgtagctgttcctccatcggtggacccttgggttgcttccacatctctctaagtccckctttccatcttctttgacttttctttgacttttttgagacagggtcttgctctgtcctccaggctggcgtgcagtggtgtgatcactgcttactgcaacctctgccccctgggctcaagtgattccccarcctcagcctcccaagtacctaggaccacaggttgcgcgccaccatgcctggctaatttttaaattttttttgtagagacaggttctcactaggttgcccaggctggtctcaaactcctgggttcaaatgagcctcctgcctcggcctcccaaagtgttgggattataggcatgagccacccaacccctttttggtttttctttttgaatgagagttctccagtggtcagtgggcttgggggctgggaggaygtggggcctggagagggtgtgggtttggggggagaccagtgctcctyatgctttcatgggcatgtggagtgcacatttgtcttggcgggtctggggcctgggactctgcatttcctacagagggggcatcggaacacactgagtagccagaggctagtgggccttggaaggtcctttccggccctcagtgtgcgagtcccrtgttccctctcccatctctctaagcttgactctgaagagccaccctgccccagccacccagactcagtgacagtggttgctggtggcatggtgtcaggccaaaggcatgggcagtttgcagagtggcaggaggctgtttcctcccctgccttctgttggtgcaggacctttgtttgacgtgccggatacacccccatcctgggttgatgtgttcacactcagctgagtcaaacaggatgtggctggggaggcggttgtcacygagccatctaaatctcggtgatggctggtgctggatryacagggacgtggtcctggctctgggggacaggtagggggatgtccatggggatgtacaagaacattctcctccaggggcagacacagtttagcccctaaattgtgccagagactgtgcygggagccaggcccagggacacaacctgcgggctctgctttctggagctcaccgagccgtgagcaggatggctgggacacaaggagtgtccagggagcttccccagcagtggaagtacaatttcatcaggccaggaaggggagagaaaggcaggccacgtggaggcagcagcgttcagagctgccaggaacctggcgctctggggggacggtggctttctccatggaataggatgtacacgttggagccggggyatgggagaaaaccatcagcatcccagacccggccrcccacggacagggacctgtgcaggtgggagtccagctcacgtggagaggtccgtgggctgggctgacagtcctgagggcctaagcaagtccaggtggaggaaatgcagggacagacgagggcagggccttcccaatggaggagtgctcttgaaatccgatgggagtggcttctcgggggrcccaggcctgagccccactagttcttcctccgaggcaccacctgcttgcttctccgtcctccctctctgtgtcacgaccgttctggacacggatccagttctctccaactcagcttcctgcccatctttccttcaggcccatccmcttctgcccctccatgtggggctgggctgggagttccctgagccccgacatgcacagctctgaccaatctctgcggcccctctgtcccccgagcaccagggatccagctggcaccatggggaaaggaatcatggagggagttccgtgccctctgagcagacgcccagccccttggcttctgcctgcgggagggcatctgtgctgtggtttgtctccaccccagagctgtgggtgcagggcagggtctcctggggccccagctgaattgctcccagactgacttccccaaagcacagcactgctgagatctcttcccgtgctgagccttctctgctcactcaccataggcccctccacggttgattcactctcctgctcagctcacacctctctccttcccagcttctcctgctttggtcttcccttggtctctcacacctttcctcacaacccctttgccctgacctcctgaaccctgacctctgcttctctttacatcactgccttggtgaactcctatgcatccctcaaaacctggtccaaatacctcgtgtttggcttgggatataaatgatttgtgtataaactttctttcctctgctagacttttttttttwaatgtgaaagtagtttttcagatcataaaaagtaatcgagtaccctttctttaaaatgcaggaagtacagaaatgagaaagaacctaaaattcacctgtaagccagcgatatccatgcttgaggttttgctgtatagtcttcaaaattcctttcatgcccccactagattctgagggtagggctgttgtctttgtttttttktgtgttttttttttgttttttgttttttgagatggagtctctctctatcacccaggctggagtgcagtggcatgatctcagcttactgcaacctctgcctcccaggttcaagcgattcttctgcctcagcctcccgagtagctgggactataggcgtgggctaccacgcctggctaacttttgtatttttagtagagacggggtttcaccatataggccaggctggtctcgaactcctgacctcgtgacccacccacctcagcttccctgacctcccaaagtgctgggatcatgccaccgtgcccagcctgtcttggtttttataaagaatcccataaggggccaggtgcagtggctcatgcctgtaaatccagcactttggaggccgaagcaggcagattgcttgagcccaggagtttgggactagcctgggcaacatagagaaaccctatctttacaaaaaatacaaaaaattagccaggcatgatagcatgcgcttgtagtcccagctactggggaggttgaggtgggaggaccacctaagcatgggaggttgaggctgcggtgagctgagattgtgccactgcactccagcctaggagacagagtgagaccctgtctcaaaaaaaaaaaaaaaaaaaaaaaaaatcccataagataccaagtaagtgacttggacataataggtgtgccatgaaattatgctgaaggagtgagccactggtggtgagttgggayggcttttttgtggttcttgtaggcagatgtagtgacccccatgggtcgtccctagagaccaagcagaaactttcctggtcaactttacccccaggacacctggtctctcctctggaggttgtgctggagggctcagtgggtgggtgttggcttcagtgtgggggttctggaaggagtcagcatttcaggagggagtgtgggcacctagatggttgaaggggagggagaggaagagaggcgctgcagagggcagaggcatccctgcctgctcctccgccccagggcctggtgaggtctgagctttatgctggtggggtggattctcggtttccgaggctctggccctgcccctggacttggcaccctccttgctgtcctcccacagaagggcgctcatcctttggggtcatccctggtcctctcaggctctgggtggggacggccttgcctcctctcctggatccctgctcttttcctgccccccaacatgggtgcctctgggtggagtggggtggggctgggctgcagcacccagtactgagcctgcaagggctggctgctggctcagagccccccccaccagagttacccccctccggctcctcagccacaccagccaagtttctccagagctgccttataaggcgggtgctcagcgctcgttcatgggtctggttctctgccttcttgggatgctcactgggggcaagagggaggccaggcccagtgcccagctcagttctgggcatgtcccagctctgccccatgagtcaactggttctgaactatcattccacccctcccagcctcaatttcttgatctgtcaaagaggcatctgcagaggtggctgggggctgagctctcatgtatccacccaccccaagaaccaagaagggagtccacagtggttctggggccacttgtgaacatggatgtgaaattggggcggggtagacatggcagcatgtctcagtagttttcctgtgacccagagggtctggaaatctttgtcatgtgggtggagcgttgagggagcagggggtcaggcccccccgagctgatgatggtgggcgtggctcttcgcatacttggtccgcaccgggccgtgtgttccargggcagaacagggaggaatctcagcacagacagcagggctgccagtacagcgttgagtatagggttaatcaaagcacagggctccctggaaccacccaacacagagcagtgaagaggtggctttggggaaagtggggtcagagctgagcctgagtggggggtggggagggcgggcatcagcctgcaagggagggacacctactgggccccagaagttcctggtggggatcagggactgtgaagttggggagagggtgaccactgtgatttagggaggaagggccccatagacagcccagcttctggccccgtgtttacaggacaccccacataggctctgagcctatccctggactgtggactccctgaggcagggtgtgcaggttcgtccagtaccaggtgtaaggcagggggccttggtaagcgtcgagggactcactggtgtctgatgaagcagtgagtttggatcgtgtcatgcctcgggtcctgagcctgcaggatttttctgtggggctgtgtgcttctgcttctggaggtgtccagaaggcactgacrttcctgccgggatgccttactcggaaggtcccgctgctcccacctcctcccattttcctgagctgcttgcagagggcacccaggtccccttttactttgggattgggtctctttctctttccccttctaagaacaagtaccctccttctccgaactgtccctggagcctctcagacctaggtctagagtgggaagtcccgcatgtgctgggggaacaggaatcaatgcgggaggattggccaggcccggtgtgtctccttcgtggtgggacggggtggggccagagaacagagcctggctccagagcccaggaagagaacccctcccctcgccggcctgccaagcaccstgcagtggtgagaggaaaggagggctggtccgggaatgcagcgggtgccgagcagctgtggaataccttaaatagascgcagctgcggggaagggtggggccaggaggcaggcgctgggggcggtttctctgctccgccccctgcagctctgtggccctgaccacccagcctggccccaggatggagccccggcccccagacacatggcactgggtgaggccgcctctcagcacttgtcccaggaagtcagagcagctgccagaagagagaggagctgtgtctgtacccgccgcctcccaggcccgggacagctgccgggattgagggtctgcacaatggcgagcctgtccggaggggcgcgccgcggccagacagccatgctctgtgcggtgtggacagagggcacattcagccctggaggagcgcactcagactccccgcctcggggcccaaagtgtgggcagcccctaaccagaccctggattccagcagacagcctgggaggatgccatgtggtccaccctgacacactgtctcacctgkgacctcatttctgagagctgcagggaggcgcttcctcagttggactccacttcctctccggggttttctgtgggtgttataagtgactctgtctccttcagtccaaggggggctcctggggtatgggctgtaactgacaggctagagtagcccatggccagggctgagcttccttcccgttctctctgaacactgggcccaggaaggggttaaagtggagatgctctgattaaagttgagggaggcatggagctcccctgaccctgtccccccatcccactgctgctactgggtgtactctgtggagccccaggactcttaaagaacccagagtggagattcccggtctcatccagtgcaggtgagggggaaagtgatttgtccacagttacatggctaccatcagcacacctgggtcaagctcgattccactccacggcccctgtctgaaacctggaactggaaatggccctggaaatcactgattccatctgccgccttccaaaatggcccgcagaggttaagatatagactcctgtaatgccttgcccactcgtgtgtggggaaatggcagaggagcaccggctttgccctcacactgcctgggctgccgcccctgccctgcctagtggctttcctctctggtccgttttctcattgtggaagtgggcacaattcttcctgtgcagcgtggttagagtggacagtgatgattcgtgaagcagggtggagcgcctgggggattcgtgttaaacaagcacataaacaaaagccaacacaacccttacttaatcagcaagcaggccttgtctgaagccccygggcagcacctcatgccatccctaggttccaggccggtggtgtcgccccgtgtctctctcacccgcaagctggtgtttagaagccctgctctgtgttctggctcccattctccctgtgacctttccctttcttcatcctaaaaagcaatgcacgacggggcgtggtggcgggcacctgtagtcccagctgcttgggaggctgaggcaggagaatcacttgaacccaggaggcggaggttgcagtgagctgagattgtgccagtgcagtccagcctgggcaacagaacaagactcccatctgggaaaaaaaaaaaaaagcgatgcccagtcattcttagatagaaaatgaagatcacatgaaatttggaaagaagtttttctctcccattccccaactctctcccaaggggtggccatgttgacagctgggtgtggcattctcctgaattttattcctgcagagtcattcagggcttgtgtaaaaaaagtcaatgtgtaaatatagacttttcaagaacacaaaggaaatcagacttctgctaccagcttttattttttccatttaacaacactgttgccacttgtagatgtagcacgttcctttttctttttctttttttttttttttgacagagcgtggcccaggctggagtgcagtggtgcgatctcagctcactgtggctcactgtaacctccacctttcgccttccgctttcaagcgattctcctgcctcagcctcccaagtagctgaaatcacaggtgcttgccaccacacctggctaatttttgtatttttagtagagacggggtttcaccatgttggccaggctgctcttgaactcctgaccttgagatccgcccacctcggcctcccaaagtagcacgttccttttaatggttgtgtcatcagctgtcccatggccctgccaggcttgtccagcttcccactgtgattgagaggctgcaacagatgttctcgcacttgtacatgtgcacacatgactgaaggatgagctcttagtgaatttctgtgtcaaggatgtgtgcatttaagttttgatctgctgggcacagtggctcacacctgtaatcccagcactttgggaggccaaggcgggctgatcacttgaggtcaggagttcaagaccagcctggccaacatggtgaaaccccatctctactaaaaatacaaaaattagctgggcatggtggcttgtgcctgtagtcccagttactcaggaggctaaggcaggagacttgcttgaacccagcaggcagaggttgcagtgagccaagatcgtgccattgcactccagcctgggtgacagagcgagactccctatcaaaaaaaaaaaaaaaaaaaaaaaattgatccttgttcctgaattggcctctaaagtggttactagaattttttaggacccctcccctcgtcgasctgctcagctgtctgctgggccctgtgcastgatggtccagcagggaggtcctatgccccttacccctggctgagggccaaatgctctccaattggtgttttattttgtgcatctcggtcaagcgagagggattatctcttcgtatgttataggccagggccctgtgttctcttttcatttggaaggtgtatccttttcttgttgaaattttttaaaaagagttctttgtaagccaggcgtgatggctaacacctataatcccagcactttgggaggctgaagtgggcggattgcttgagcttaggagttcgagaccagcctaggcaacatggcaaaaccgcatctctgcaaaaattagctgggtgaggtggtgcgcctgtagtcccggctactcgggaggctgatgtgggaggatcatttgagtctgggagtttgaggctgctgtgagctgtggtcataccactgcactccagcctgggtgacagagtgagatcctgtctaaaaaaaaaaaagagttatttgtacatctttatcacagcaggtacgagtatcttgtccccagctgcctacttttgattttrtttctgggatgttcttctacacagaacattttaatcctgatattgtcaagtctctgctttcccttttagcttttggaattcacatcctgtttagaggtctcctgcgttctgaaattataggaaagaatttcacccacgttktcttctagtacttctgtggtttcatttttacatgttgaaatcatgaatccattggaatgtattttggtttcagcagcgaggtaggggtagatrgtattgcttggatacacagcagcgagcttggtctggagcgggtggggcktgtgtgtgtgtgtgtgtgtgtgtgtgtgtgtgtgctatttttatcagttttggtgtctgcattgtgctggcttagcaaaaacaatttggatgcatttcttttaccctctgcsttctggaacattttaagcagcaacataataatctctctgttaaaacttttcaagaattcactcgtgaaaccatctgagcctgatacttttgggggagtctagcactttaaaaacttaaactttttccatgggtctgtgagtttgggagtttttctttcttcttaaaattcattactatttttttcctagaaaagtgtcttttagcttatttaaaatcygtcagcttattccgagggggttgctttagctcgcttagtgaggacagtgtgcagcgcggtgattgacatgattgatcagcagagcacgatcgatcagtcggtgtgcaaacatgactgactgtggccagcgtcctgggatgctccatgttgaggcacatgtgtgcagtgcagggtgatgtgtattctgagaggggatgaagccacaggacccctgcacccttaggagagagcccccctccccaaggctgcagtcttgagtaggtagtgacgggactgggtctagggggctgagtggtcccagcaggccaagggcttcaggaattatgagaagtttggagttgcccagagagcagctttcaaaaccagtctggactgcagcctccagaaagacatgcgattgacaccacgaaccaggacacacctatatatggggtgggggtggggatgggatgtattaatgaaaccaaatttccgtgatggaattcttacctttaccatgcgtgtgctacactcagtattttctttttttttttttttttcccctctctctttttttctttttgtttgtttgttttggagagagggaaggctttttttcatttttttttaaacagctttattgagatccaagtaagctactatacaatccaccaatttatttatttatttatttttttgagacggagtttcactcttgtcgcctaggctggagtgcagtggcgccatctcggctgactgcaacctccgcctcctgggttcaaccaattctcctgcctcagcctcccgagtagctgagattacagacatgtaccactacgcccggctaattttgtatttttagtagagacggggtttctccatgttgaggctggtctcgaactcctgacctcaggtgatccacccgcctcagcctcccaaagtgctgggattacaggcatgagtcaccgcgtggcccaatccacccatttaaagtgcataattccatggttttcagtctattcagagagtagtgcaaccatcgtcaccacaaccaattttagaaaattgaaaatttgagaaatttagaaaatttttttcttaagaagaaaccccgtagcctttagctatcaatcctgccctcctcctccatatttccttcctatctgtgtggattctttttttttttttttttttttttgagatagggtctcactctgtcacccaggctggggtgcaatggctcaatctctgctcactgcaacctccacctcccaggctcaagccatcctcccaccatggcctcccgagtagctgagactacaggcctgtgccaccatgcccggctaatttttgtattttttgtagagatggggtttcaccatgttgcccaggctggtcttgaactcctgggctcaaatgatcctcctgccttggcctcccaaagttctggaattacaggcgtgagctactgcgcctggccgattctagacatttcttgtacagagaattgcacgtttggcctttgtgtctggcttctccacttggtgtcatgtttccaaggtccatccacattgtggcaggtgccagtgcgtccctgagtaatattccaccatggcatggaccattccattgtggacagacatgttgccttcatcagctgagggacattgggttgctgccaccgctggtgagtgtattcttttcaaattaaaaaaaaaatgctggtcaccacccactagatcgttttcttggcccacagggtgggacaagccggcctgggtgagggccaggaggtggccaggtggaggcggctggagcggccctgggttgcctctgggcgcagcaggcagaggtgcaatggcagagtctgagcaggttccctgggcggatctccatgccggtaatgtttgtttattcaagaagtctcggccaggcgtggtgcctcacacctgtaatcccagcactttgggaagttgaggcaggcagatcacctgaggtcaggagttcgagaccagcctggccaacatggcaaaaccccgtctctactaaaaatataaaaattagctgggtgtggtggcgtgtacctgtagtcccagctactcggtaggctgaggcaggagaatctgcttgattccaggaggcagagcttgaacctaggaggtggaggttgcagtgagccaaaattgcgccactgcactccagcctgggtgacagagtgagactatgtctcaaaaaaaaaaaaaaaaagaaaaaaaaagaaatctccagtgctgccctgtgcccggcaccgaagccgagggaaggcagcattagtatgagctcccagcccaccgggctcctgtctggagctgacgtgcgaccaaggcacacgagggaagcatggcgaggtggacggtgcggaggcataaggagcaaaataaggcagatgcagtggctcagtggctcctggtggctgcgaggagcgtgggcaggacagccccaggagggcacctggagagcagggccggctggggcaaggtgtgtcaggcacttgtcaggagcaaaatgtaaggggacaccaaagagctcaggaatcaacacagatagtatttaatgcagtatttttcaatatygaaatgatgcatagtaayctctatgatgaacaaatgttggaattttaaattragacaggcccagccctgcacgtgcacagccctgtcagagtttgttcagcgtggaatttgatttgtttaaaatgttgcttcaaaatattgtttgattcctggattttttggcactgccttaacttttgcacctggacgaaggcctcaccctaatcccagctggagagggtcaagggctggtgaatttggctttggacctgcagagcttgtggtacctgagaggtggggccaggaacaggaaggagctggtgagaacggcacccggtatgggatggggccagatcagagcagcactgtggctctttccaacccgtggttttgctgctggatgcttggcgttggtgctgagcccccggccctctgaacggagtgtgatgaataacggggccggggagctcttgggcccctccctgaagcagcagtgaagccagggacatgccggcagcaggcagggagagggacgtctggtctgtgcctggagccagctgccccatggaggagctgggtgaggatgcggtgggaggaagaccttcccagtcctgcatcctccgaagcataactgagtgcttgtgtggcttgggggtcactctggtccgaggacagtcttgctttgcttagccaggctttgaagagccaccgggatacggacagcagccctgctgggtggcaggttgtccaccctcgcccactcaacgctggaactggatgcagagcacctggatggccagtcccagagtgtctctgacactcccagtcacctcatcccttagaccaggataagatgcgggatcccaacctcgagcctcccatgggctccattccatgtgctcccataagccactgggcccacctcctggctccagggctgtctggccatttggcatcttggtttcctcatctgtacaatgaaaataatagtcccagccttctcgaggagttacaagatgcctttcgtgtgaaaaactgggatttggtaccagactatctggatttgaattttggccctacccctcctaacctgtggctttgggccaatctggcctccctgtcctcagtttccccatttatagagccatctcattgagttgctgggaggatgaacataaggaagtgtactcatgtgcccagagcattgtgattttacttattattaccaaacgaggcacacaataagtgcctaatagatgctcagtgtcatttcacggattctgtgtgccttgtgtgtctccagcagccaagctctggaggtggggaagctgttgacgagttgcacgaggtaattagaaagaggaggccacaggtgcaagggtttgggtgacacctgtggacagagagaggccgatggaccctggcagaggggaagggggcccttgcacatagaaaatgtttcctgcatccaagatccttgtgactctggaacagaggcagcagaggtctgcaaattccaaatcataaacccagaaagcatagaacattcgtagagaggaccagaaacatcatatatcttagtgtgtatagaattttccacatagccaaacaaaagcacgtttctaactgaagctgttggagagttcctgaggactttataccagacaagggccggtaagtggaagttcaatacgcaggagccattccttttgttcacaaatgtttgccgtcttttctgtctatatccgcattcatgtgagggcactcataggtccaccgtccagccccatgctttgtttgctaccaaaaaatttcttaagaattcctcagctgcaaatcctcctaccggagggggggttccaggaacccagccttgctcggggytggggcmcctcagcacctgctgcacaggcgttggtcattaaaggtcatgtgccgtatccgtgggccctcggggtctggtggcacctgggcacacagtccagtggcggcctcctacctgccagacactgggagtggggggctcctcattcctgttccctggcggtggggggagtgccccgagctgtcacacatcagaacccaccgactcacacgttgcggcaccttacagccccttgacagcctctcagcctgagagaccatcaaactgagttcctggagagggtggctgttgaggcctggacacaggtgtggacaggatagccctgcctcatctcggagtcccgctccggttcagcctcttgtgggtctgaagctcaggctgggccagtccctgcccctcagayggccggaaaggcagcccagccccacggcctccttgtcagsctctgagagccgcctggcctccagctctgctctttttttttcttragatggagttttactctgttgcccaggctggagtgcagtggtgccatcttggctcactgcaatctccacctcctgggttcaagcaattctcctgcctcagcctcctgagtagctgggactacaggcgcgtgtcaccatggcmggctagtttttgtatttttagcagggaccggttttcaccatgttggccaggctggtcttgaactcctgacctcaagtgatctgcccacctcggcttcccaaagtgctgggattacaggtgtgagccgccacgcccagcctccagctctgccttgattttctcttaaggccgtgaggatgtccacgcctcctcctttcctcacggcccattgatgtctccagatgctctgcaaagccaccctcccctcgggagctccccagctggtgacgggggaccytttggggatcactgcccaggtagtcatgtaggtctgtgggccgtgcttccaggctggaccgagacccggtgcatggggtgcttctggtctgagctgaggcccctggaagccacagccrggaggcagcragggacggctgtcatgtcccctctcccctgtctcccagggtccctgygggacagatttccctgcctgagcctcctggttgcccataccctggcctcccaaagcccagcctgaagccttaggcaccctacaacctgcttcctctagcagcctgccctgtctcttctctgccgatgttcctgaaactttcctgcctctccttacctcttggccagagagagactggagaccctgtgggaacccccgaggggagggagaaggccgctgtttgaacggaggtggtctttccctctgcccctccccaggcgsgtcacacttgcaggcccagcctcctgctgtggcagcgcttggggtgtcggctgcctcctgggcacgagttgggagctgagggaggcgctttcaggaccggagtggcaacccagctggaggaggagtaacaggcccgtggtcagcagcagccgccgcagggaccccggcgctgtacctgtgccccagctgacccctcccgcttccctagggtgggccggggatggtggtctgttgcccagcccaggaagaagaggggccgtaatcagcagcagccacctcaggggaccccagcgctgtacctgcgacccagctgacccctcccccttccccagggctggctgggaatggtggtctgttgcccagcctaggaggaagaggggctgtggcttccactctagaggtctctctcccggtcyctcccccggtgctggtctaactgcaggcctgccttaggccgtgccggcacctgctgactgacgcttagcggatgctgataggagagggctgggatggggaagcagcaagtcccggtcactgygggctcgggttacagatggttgaggcacctcctggccatccccaggaagcaaggccccacgcagcctccgactcacccactgcccgtgtgtatttcaggaggctgcatcccccaaggcccccaccaggtaacttcattgggctgggtgtcgctgcaaaaccacccattgggtgcggtggtcttctggtggggggcrtggctggggaggatgcggtggaggagaagccagctccgtggttggggggagggcggactatccgtttcctgtctgtcccctgaactggagctcatggtccctcccccaggtgcctgggccatggaagaggtcacagccctgccttattcctgtggcagcctaggggagccctggccagtcccgtgtctcctgggagggcgacagcctggtcaggctgcagggcaggactggaatgcagacccctgcttggccatgctgttgcctggctgctctgtctggggaccttctgttcaggaagagagaagcgggccggacagcccggctcagtgattggaagctcagctccccatgttcagtccagcaggaagtttgcctcctcggaacacttgcgtgcttctgcatgtgtcttcttggctggtggttctgcgaggcccctactgggctgcgtcatgtcctctggccaccctggccttggtgcctggcccctgtgaaacagagatacctgggcagtcccccacttgtgcttgcaagcctgtgtggcttcagtgatggctgattctgctccacccagaggacctgggaatcctcagcccaactgtccagaggagtctttctcagtggggagagcctgagctgtcctcctggtggacagtcctttagatctcaggcrgacttccctgccggccgttcctcctgctgcccctgctcctctgtcccccatctgtctcccaccctctcccctgcagcagccagctggcacggggacctccccttccctctgggattgtgaatgagacgactttcctggtccttctgggtctagatctttctggcaacagtcagtgaaacccttgtctcaggtgggaggagaaggctcagtatgtggtcacaacaacggtcctaaccacatcactctcaaacgctggctttcacttaccccttgccctgcccaacagttactttcatcatcccattttccagattaggaaatcaaggcgcagagagcttcagccacttgcctgaggcccccacagttaagtgtctggatttgaaccctggagcagcctggctgctgagctgtcctggagacggggtactgtgcagtggtcggggtaggggtggagctctgccgtcgctgactcccrggctacctggagtgataacacagcccagtgtctgggcccctgcctgagactttggctggatgccaggagcccgagaccttccagctctttcctgtgtaaggcgccatggggtgaaatgaaagaaaaccccagttagaaggtgtccccctcttccttcagtccctcagctgccctggattttgaaataagacaccgcccgtctgtggggtgagcaggaacagattggaaccgcatttctctccccccagtcacagctgccaggagctcatctttctctgtctcctccccctgccgcctctccccacaagactgggctggatgctgctgggaaagtcaacaggaagtcttttggctgcggtggaggtgggggtctgtgcttccctggggaccgagatgagggctccaggttggctccggcaagagcagggaggctcacgtctctgcctgctggttttgcttcctgtcctgggagaaggtatccacatgtcccagaatgcaccctctgcgtgtacagggatggcttttgggccattcacctgaggtttattgatctttctctttggaactggagtggctcctccacggtggattgggctgagctctctgcctcggccgacgtctttccccaggcacttcctctcaccgtgccagggtgcaggttgctagtggatgggtcttcaccctcggggattggcagctgccacgctcatttcacagtcgagacaccctggccgaaggttctgctaagctccatggagtgtagggattttttttgagacggtctctctctgtcgcccaggctggagttcaatggcccaatgtcccgctcactgtgatctcgacctcctaggctcagcagtcctcccatctcagcctaccaagtagctgggactacaggtgtgtgccaccatgcctggttaattttttaattttaattttttttgtagaaatggrgtcttactatatttcccaggctgaactccaactcctgggcttaaatgatcctcctgccttggcctgccaaagtgctgggattccaggcatgagccattgtgctcagctggggttttcctttaacccttcctggcccttcccaggtgcaggacccgggcctcagccttatgtgttcttgaacagctctgggctctgtcctgtacctcctgggcgcgtggtcaggcctctcgtgacatcagcaggagactcaggtgaagaagcaggcagaacggaatgcttgctcacccagcctcggggccaggcggggcggccaggacagtagcagtggctggtgtggcttcctgggaggtcagcccattggcgtggccagcgaatggggaggggagcttctccccttgtctcccctcatttctggtctctgggcctccagggccaggtctccagagttctaggtggaggatggaggtcagggaagctggggtaagagcgggctgggggtgggtggtcaggcggatcctggaaaaccatcctctgcaggtcccgctttccccagggagcactcagggctggtcccggggagccgggctaatggtcacctcggatggtgcaggggtccatccccatgaaacygggcccatccccatgaaactgggcccacagaagcttttggttccggttctgttctgccccctggctcttgcttccaaagtaggactcaggatagctctgaattccctgccgaaatgcagcttcctgggccctaacccagccctccagaaccagagtctctggggtgggccctctgcttgtctagcagcctccaggggacacttgtgcctgccagagcaagtctaataagcactgctgtaaacccctygtccccacagccttctggttcgtctcccttttcctgctgggatctgcatcaggattaaatgccaacatcagggatcaggttatacttgtgaaccctgagacaatacctgcatctttttttttcttgaggctgtcttgctcgctctgtcatccaggctgaagtacaatggtgtgatatccactcatggcaacctccacctccagggttcaagcaattctcctgtctcagcctcctgagtagctgggactacaggctcacaccaccacacctggctaatttttgtatttttagtagagatggagtttcaccatgttggccaggctggtctcgaactcctggcctcaagcgatccgcccgcctcagcctcccaaagtgctgggactacaggcgtgagccactgcgcccggcctgatacctatatcttgaccaagctgctgtggaaacattgagttccccttgatagttttgtccacagagtgaatgtttaggaaccggygaggcatctctcacccccacccagatggcgrcctggaggcagcgtttctgaccctgtgatgggatttgtctctcttgtccaagagactttagagatgtggcccctgaatgtgggggcccctgttggggtgggaacgggagctggccctggccattgtccagtgaccccatctcagtgcctcgatcctagcaccctcgatctcagcgcctccccttccccggctccgcgcggagatcacgtggcttgcgctgagcaatcctccactgcccccgtcgcgttcctgctgcagggaagcctttccagggagccagctgacacatttggcctccattatttgtttttgaacaggaatgaaaggagagagtgagtaagaaagtggcaggaggtgggggttgcagagtaggggaaggtcagagagaggggaggaaagatctggaaagtccaggcatgtgctctggaagcaggtgccagcgatgagctcatctggagggtggccgcccgccctgagccctgcctggggccagcagggaacactctgccagggcatgtcgctgggagcctgtccttggctcactttctgctgctttgagcgctgagcagatttgtttccattttagggacaacgcaaggaggctgtcattccacccctcaccttattaatatttcatgaatcataagtgaccacttactgcgtcctgacgtactccaggcgctgggctcgaagctttatgcgcttcatgggatgtatctgcactatcgccgtagaaaacggttcctgttactactgcagagaagaaggcaccgaggcacagagaggttgaggaactggcctcaggccacacagctagaagcggctgaccctggctgtgaacacagggctgcttgactccaaagcctgagctggtttgcagcgaggctcatggtttctgtgccactgtttgagcctctggtcgagccccttggctcagtggggggcccagtgacctaccagctgttccattatatgttgtggacacctccacggcccacctgggtgggagggaaggggcttcaggaggtgggaggggtacagggaacacagtccagcctgcttgggcccaataccttgaccttcaaggtaccccttgagggtagcatgaggctaagctcttgttctcctccaggactctgttcctgtgagggcctcggggtcccttgctttyttctgggggccttgctggtcaggatcacagagaagctctttgctgttgatctttctgcctctgtatcttttggcaagccattttatgactcagttgctttgtctgtaaaatgggttgaataacattgtcctgcctcggagggtttttgggaggatcaaatgagacctgttgcacagaagccctttgtaagccatgctgactggcggtcgccgggcccccaagtgaatgggcatccgggcactgagtgtgtggactcagtactcggaaggaggggctggggggtacctagaactcctgggaggcttggacccctgctctgctcagattctgagcttctccttggccagtttaattcccatcagtagggtgagggtaaccaggacttacgcatagttgggcgaagtcgagtgaccacatgtggaagtctagcgtccttcatgcaaagtgggcaggcggccaaagtgagctctgctccagtccccccacccccggggctgttcctggcgccctgccctcccccagagccccactgacctgcaccatgtgacccgggcctgggaagatgggcccagctgtgggaggtcgtgcgggctggggactgagagtgccggaggagggcctcccaggaaaacccagctgcacaggaagccgggccagcggcctccggaagcctctgggctttgcaagctggactccccagatctgtggctgtggggccctctcctgcctgcagctgagagcccttgacccgcacctgagggcttcagaggtccgggagggggatgtgaccgtgtccccagggtgaagcccacccgagtgtcactctggatacagccctcacctcttcctggccccctctctggtcatggggacgctgcctggggggggttcccttacatggaaggagctgcagctgagctggcgggcctygcacacccccaaggccgcctgacttccagcctccaagtggggttgcattcaccactcaggacctggagcctcagccagagagggaccctccactgcctctttctctgtctcttgggaaaggtagggtctttgtgccccctcccacccagggacctggcatgttgggaggctaagaggaagctgccccccgctcatctaccccccraccctcccagccagcagagttttacctgtgtgcttagaatctgtgcgtggagccagaagtcacaaggttggcccagctgtgtctgaccctggttgtgcggtcttggacagtcccagccctcctggagctgagcatcctgatctgtagaggagaggctgctgtgccggccccgcagggccctgtgcagaggggagtgtgtgcggctgtgagttcaggccatgccctcagacwggaggataggatcggaacagtgggtcaggatggccagagggtcccagcctcaggaggaggcctccacacctcccagcacctccacaccaggaaatgcagccaggcccccaggcctcccatgtcaggaagcagcaccccgccccccacctctggttgcctgggcctgagaagttgagcactcctcccgaatccgagtgccctctgacccctgcttgggtagttgtccctcctgaactgaccgcctgtcctacacagtcccctgtggtttgcccgacagggtggccagcgagtcccctgcmcagcacacctcccccaggagtgctgcctgtgatgatggtgtaaagggtgcccccccgagcccccggaggcatgcagtggcgcaacagcgtgagcccaggagccccggtgagctcctggatggagaatctgttcagatcactccccagcctaaaccttccctgggtgtctgctgtgcttggggcgctgactcatcgtggggcggcctgtgagaycctacgtcacctggccactcccctcagcccctgttcactgcaccggtcccctggcctggctgctcctggaacatgagggctcatcctcacggaagaatattcacttgttccctcctggaaagtccctccctagacctcctggccgcctcattcaggtcttgctgaagcgctgccatcttggagaggcctccctgtcacccgcagttaaaacagccctcccatgcctgtgggtggctttctrtggggcatggatgagtattggagagtcttgccgtttatttgttcatatgccctctgggagggcaggggacactgacttgtgttgtgggtgccttgcatgtcacgggtgctcagtgaatgcctgttaagcattaggggagcacaaaggagggaagcctctgtccaactggagcagtcagggaagacttcctggaggaagtggtatctggtctgcttagaatgtggcgatttgtctgtatgcagacattagattagagggcaaaggccattatcataacttagcagacagctacaagcagctaaggaattgctatgacatggactgctcgtgattggagctaagaaggagtcagagacagaggtccctgtgctctggmgtgagtccttgggggaggctgagctcccagaatgtggggccgcctgtgcagaggccggaggtgggagacacacctgtgagtgccggtgagtgtggggtgagccactggggctggatcagaagatgggaatccctaaacccaccaaccagccttggtgccctgggagtgacaggagacggggcttctgggggactaacccagcacaagtggaygagatgggatgcaggggaaaggacaaagctctctgaggctttgggaagctgagttagggtagagccatgacagggtgagttccagaagcaacacaagaaaaaatagctagactgggttttcccttcactgtgggagatgccccacctcacttcccccgtcctccgggctctggcaatgggctgggcacagtgaatgggttccatctgcaggagtggtcacaccccttgggcacagctgcctcatacactgtattgagatgggatccgaggccgggaagaacagcttcttctgtaggttgacattgtcagccttcggggagggaaggacggcagggggcctggagcatctccttttgccatccacactctgtgcctgcctgcagggtcttgagccctgtctgttctgcctcagtcctggtcaggaacttgttggagcccataggggcagtcaggctggaacaggaggagaccaggccggcaggggagccgagagggggccctggacagcacccagggctgagtcatcctgggcctgcccgacttgctatttggagctgttcccgcttgctcatcatgtgcaaggtcctgatccactcgggtctgtttaaccagcgcccctccccaggcccagttwgcctggttttcgttcgattcatttattgtcatcagtgccatccttgcaccacgtaactagcctttgcagcatgccagccaccaagctcagggccctctgtgcatctcctgtaaccctcacagcaacccgggaggcacagagaggctgagtcgctggcccatagtcacacagcaggtatggggcattgccaggatttagccggatctctgactccagggcctttccagggccttgggtgggacactggcaaggaagcaaggtatgaacactggccctgccttggacagagctcggggacggtggcctggcaggcccagctgacacagtgaccctggtgcaggttcaaccattggcaaagtgttcaagtacacacagaatctcaactggggagacaggcgaagcggtcaagggagggctgtgagtgacaggtggacactgtacctactggcagatcagctgaccttggtgccttctggagcctttcaacttccttatccagaaaaagaggaactaacagttccacccccaaactgggtgggagtaccacattcgaaattgaagcaaagctggtcgtgtcacaggctcggcagatgttagctgtgcaggcaacttagtgaccatttgaagtaggctgtgcggcggcatcctcatcttgcagatgtagtccagagaggttagggcactaaccctgggtcacacagcgacagctcaggctacagagagcagtgctggatgggagggtgttggcagcttcaggcacaggctgggagggctgtggggtcagcagagggagggcacacttcccagctggtggggttcccttgtgcctcagtactcatgtgggcccaaaggagctggaaggagggaggttagagccacccatgggttcagaagctgataagcaggttattgactctgaatttgcctcatcgtatgtaaattggggacaaatttggggatttaatgatataatgtaagaagcagacatgtcacagccctggttatacagtcagtgtataataagtggtaagccstcagaggaggcagccggtgagaatgggagcatctcagcagccctccgccccctgctcctggttgcagatgtacctgttcttggctatttgtgccccagctccgtgtcctccggtgtgtgtgaggccargctcctggggtggggacttgggggtgtgtctgcagctcctgaggccaagaccaaggctgaggccgaggctgaggctgaggccaccttggtgaggaggaaattgcaggtggagaagctcgttgacygtgaccttgatctgaccgtaattttgatggtgccgatgccgtsagcacgcaggcctcctgccctcgccacgactggctcctgcagcccacctggctgagaggtgtgctggctctcgcaggttgcnaaatggggacatcaccgtccgcctgggctacagcgtgctcgccgattgcatttggggagggactgagggctgattgtgttgtggggatgttggcagagaatcagagagggcatccaaaaaggccaacagttcggtggggagaggaggcgcaaggctggttcctgttttctgggctttgatcgaaagggaacaggggacacatctggggacagtctcyttcctggaggaagaagggcttagggtgctggtgtggagtttgcacagatggggataatgagctggagggtgctgggcaggagctggccagtaataggctgacgagggaggccctgctggctgggcctggttttcaagtgagcatcctgagctgcggggacccagggggtcttagagacctcagagctgagactcgggaccacagaggggtgggctgtgctcagggcaacacagcggatggggcagatgttgcgaaacctgtctctctgcctctctttctcctgctacagaactggatcctcccagctcatggctgtcaaatcctttagatgcttctgggttccatgggcgccttacactggcttccctgtaggacagcagaccctgggggttggctctgatggtattcaccatggggtaccccatgcaagcacagtgctttcacgcccagcctcccagcctgtggagtaggcctgtgtctggccagcctcactttgtggccagaggagggagacagtggttctggagacaggagctggcctggggctgccctcccagcccctgttctcccagctcatctccttgccttgcgggtgctggccaccctccccccgccagctccatccccagctttctctgcccgagccgtgacctgtcagtagggggcagtggaggccttgaaagtccttggagaggactttgaagcagtttttacaaatctgtccctggaaagtctctcctgtcacacccccagcggctccctccctcctaacatttttcctggggttgtcatgcagcggggggtggaggaacccactaggccgtggatagagcagagccatgttgacacaaaccctggctgaacccacatgctccctacagccagcggccgatcactggaaccagggaagtgacctcatagcaagggcccgcagagcagccatcacgcattcccgatcttggtttctggacccagctctggaaaagaagccagatcctagccacttggagctgcctagggaagaccccagcctggtgccggctgacagctcactggaacttttcatctgcttggccaggtgatgccaaggggcagaggttagaagtgctaagaagcaggccgagggtggtggctcacgcatgtaatcccaacactttgggaggccaaggcgggtgratcccttaaggtcaggagttcaagaccaggctggtcaacatggcgaaaccccatctctactgaaaatacaaaaattagccaggtatggtggtgcacgcttgtaatcccagctactctggaggctgaggcaggagaatctcttgaacccgggaggcagaggttgcagtgagccgagactgtgctactgcactccagcctgggcaacagagcaatactccgtatcaaaaaaaaaaaaaagaagaagaacaagaagtgctaagaagcatctgtcttcctgattgaaaagcaatctttgctgggcgtggtggctcacgcctgtaatcccagctttgggaggctgyggtgggagagtcgcttgaggccaggcgttcgagaccagtctgggcaacagaggtgctaggggtagtggcgcttgcctgtagtcccagctcctcaggaggctcaggtaggaggattgcttgagttaggagtttgaggctgcagtgagctatgaccacaccactgtactccagctcctgggtgacaggatgagaccctgtctcaaaaaacaaaacacaaacaaaaaamcaacgtttatcttttgtgattttaaaaatcacacctacttgtgacaaaataattaaattagaaaatgtaaaggaaatgatcaataataattgcgtcctccagacaaacactgttaacatgttcacgtttccttcyagtctttttctacatagacactcaatacttattaatttgttttgaactaaagatggttttctctgctttgtatgagaaccacctcagccaggcacggtggttcacgtctataatcccagaaagctgaggcaggcagattgcttgagcccacgagtttgagaccagcctgggcaacatgrcgaaactccatctctacaaaaaaacacaaaaattagcctggtgtggtggcacatgcctgtgctcccagctcctcaggaggctgaggcaggagaatagcttgagcccgggaggtagaggttgcagtgagccaagatcgtgccactgcattccagcctaggcaacgggagtgaaatgctgtctcaaaaaaaaaaaaaaaaaaaaaaaagttgccacsttgtcacctctctcagggattttcatcctttctacttttcgcccaagacttgccctgtaaaaggatgaggccaaayagccatgggagggtggtactggatgttcaaaaaaatgtttcgtggctggcgggacttagaaacaggttggggaggtttcagcagagggtggaccccagctgggggtggggggcagcaggggggcccctcacatgctctctctgcgtgtttcatggggctgcctgtgaggccgtgtgaaccagagcccggctgggaagccacatgctacctggactctgacctttcctggcagcatgaccttagccaatacgctcaactatgttcccctctgtaaaatgggctaatagaaatgtccactcgagacatgatgagaaacaaaggtgttcatagagcaaagtgcttagaacggtcctggcatgacaggagcccacatgtcagtgctgccgttggcatcgtcatcatcacggcggcattggctgctttgtttctcccttgtccctgtcaccttcttccctcagcaggctctcattcacttgttcatttattcatggccgaggccccgtctgtgycaggcctggtgctgagaacgggggtagagagatgggggctgtgccctgctccctgacccaagggttccctttgcaatgtgaagttcttggagactggaccctcaggctgttccaccagcccctcctcaggccagcttaacccttccgtgctcgttttctgagctgttagaggaagagagcrggaggaaggatggagtggggtttttgtggggactgagcggggggtgtgtgaggccctggaaatggtgcctgcggcactcacgcagcattagcttttgctgcagttgctgtttggagaatattcttggatttcaggacactgatgacagaaggtggaacgctttttctggaagccatcaagaggggaccaccgcggcggctgagcagagttgctgacttgtgagctgtggcctgaccacagtcactgttctcatgagcgaggccccctgtggtccccctcccaggaatttctggccccttggcaggggacagttcagggctgggggtgggtagtggtgtctgcaggccctcttggagtcagagaatcccctgtcgccgtggcggggctgttccctcctgcccctcccctcccgctgtgctctcagctgctccgacaggatgcttttggcctgagagacagaaaccccaactctgaatggcttcagccctcaagagaatttggagcttttttgtgcaaaatgagatgttctgagcatcgaggatgctgtgggggatcctccatcccaccatctccagccgtggtgtccctctcggtcacaggatgctgcagccacgttgcagggaaggagagcctcccttcctgtgagcctagggagcccctccwtgcagccccttcactggccattgcctgagacccgacctggtggctcctgccccaaggagcagaaagggggttcgctaggtcagggtggggctgggtgcgaggaccccccccggccaacagggtctgcttaggtgtccgtcctgttggggcagcagggaagggacccacatgtggcactgggacacggagaggcttttgtgcctgtgacggccaaaagggatggcgccccagccacgttcccacccaccccgaggcccagcatggccatgccggaaatagcagcatcgtccccctcactgtcctggcttgctttcaataggccagaggggtggggctggagcgggcgtctgacctgtggctggatctagctgcccgtggacaggctgtgagtgaatctgcagaggaagggagatgggaakgccgggaccttctcctgcacctcccgaacccccgttccctgtgagttagatggggagtgcacccctgccctcccctcctgggtatcccytgcgccccccgccccaggcacttgatgttgcctgttcattttccctctctgcccctcccgctggcccttcccatatggtcctaattaggaccttccgcccgttggtggatgggcagagaggggagcttgctgtggggcctcccccgatcgggggacttcccagcacagagctttctggcctctgcagggacgctgtgtgtgcctgtgtgagtctggcgtgttagaagcgctaagctgcagctgttctgtgcgtttttcacatttctcacttctcaaaggccctgggtttggtgtctgtgggctggggatctgtgttggggtctccaggaggcccttggtgggagaggcagggccccttcccctttaatctgggcaaccttgctttggcctgctgtctgcggaaagtgccctaggatacggtggcaggactggctggggttctggctccaggcccagccccagcccctgtcagacttaccctccttgtgcctccgttcaccctgtccacccgcagggcctgcaggagcatcctgagagttggtagggtggcctgcccggcgtccgcacagggtctgctggtgggtggctgaggctgcggtgaggtctccatggctccctcgtcctgcacatccttcccttgttgtgttgtctcgctagcatatgagcccgtactgcctctgagtctgcagcctgttttccttaccaggtggctaagcagggtggcagccagggtggcagagtcccattggcctgcaggggaccctctgtgggctgcaggtagtcccctgtggttgaaggtgccctggcaggacctgcaccatgacccccgtcaaagctcacgtccaaggcatttgtgggcacccccgccccagacgtgagggttggcatcttctcttgcacgtgaagcaaaggcctgtttgaaggagsgtgtggaagcctgggtgtgatgaaggcaaggaccggtggctcacccctcttgcacctggaccttgggtggcaggcctggggccttcagtccttaattcaggagggtagccagtcgctggaactaagagtgaacttcagctgttgttgccatagctggagggaagaggggaaaggaggcgctgcaggggagcagagacctcacccttcctctgccgacatcaggctgccggtgctggacggggccctggcaaccgtggcaggagtggtgatgtccgatgatggtaacaagggcttcctgaggaccccgagctgtcttaagggctctttacctggagtaagtatcccctttaatcctcccaacaacactgtgaaattgattctgttgttattcccatttcaccgatgaggaacccacagcccagagatgttaagtaacctgcccaagcctccctctgagcatggcagagggagggtccgaatgcggaaagtctggcttcagtgcccccatccctaaccactgtcatttacctcttcggccagccctctgattgcaaaacctgaggcccagaggagtgcagtgacttggccagcttcgcacggcaggttagtggcagagctgagcagtgtctcccatgccctgattctgtggcttcttgaggtggctcacccctaaacacgccccccatggtggctctgtttcctcctctcctctgaacctgccagcctgtgctcaggcagggggagaagtagagcaaccatgccgggcgggtcgtcgtgccccagtgccgcctgccctacacctgattggcagcagagtggcccctccttggtgtggtctggaggtgccagtggtcactcatcagcacagcccagtctcacacatgtcactcccaaaggatgttgacacagaatgaagcagctaggggaggcggaygctttggcacgagggtggcgtttctggtaatccgtagtgctgttgtctgtggctgcctttggctggcatctcacctcctcctggctgtcctgcagccacctgagggaggtcagcatgtcgccttcatcccaggacagtgtgaatgcagcagcgcaagcttgccagcgccgcactgcgggatctggaggcctttgctcctgagccctgcctctgtgtaatccctaaagcacggacytcttaggggcttccattcctccacctggaaaaaccttacaccgtttagggcttgaggcagggctagagcatggagacgttgctggaggaccaagggagaactgagcgcgtgttctcttggcctcagcctcgtgtgtgtgtttatgcatgggtactttgccatccacwctggcttccacggctgggtgggagttgagttgagctcggcggctgcctttccaccctgcgggcctggttggggagtgtgaggatgcctgctggaagccaacgtgcacgaaagagttaatggtggatcccatttcctcagccycctctccagctttcccagggaaagggcaggaacagagaggccttatcttcagaggaaggggtgggcggggacacagcgctgttcggcacagtcccctctgagccaccctgcatgtttcattccaccgacttctgcagcccagctgttcagagcggatccagaaggtggagagagggtttccaataagcagaggatggagtgaatgtgagattcattactgggatttggcaaagcaaagagcctcactttctccccgcagatgggacgggggcggggctggagccagcggggtgggggtatccagcaagagctccttcccatcctcccacttcctttgccatgggccccctcctccacgcagaccctcagcctggaatgatcagtgtccagcttttctcgcccctctcctgccccgctggagggagtgacctggcccctggccccggccacctacacctcctgttttgctgcactagcctcgtggtaggggctgcggcggaggtgggcaaaagccgcttccgggcagccagcccccatcctgggagtgactgaaagtccttgggggttcctgcagggtgagctgcccattctggccctggtaaggacacccaggagagggccagggtgcctstatttggggcacagcataaagaacagccgtaagtgtttctcaggcaggagggtgccgaagcattgggaagctgggatttagaagcattgtttggggtggtgagtggaagatgcaggacacagattcacgcgattgtgcagatcacctggcctcactccctcggtttacagtggaggaaactagaggccgagagaggtgaagtgagttccctggggtcacacagcctagccaggcccagggcgccgacctcctgctctgccttcccgtgcccattcggttggcatcagcatccctgccttgacacccccgtgtggcagctgctgtgattctgtgactcctcctcaccccaccccagtggggccctgcgagggaaagaagaatgccctatgcagaagtggttggaaagcaagaagcctggagagaagtgaggcctctgtggtttggcctgagtccaggactcatggcctggttcccagggatggagcaccgacccctcccttctacacccccaccccacgcccccaggagctccctatggggaagccggaatggacctgggctcagagattgtaaattcatcttgctggatgtgtggctgcctttatgtaaccaactctctcacggagaagccaggggatggctctcagtactctcgggggtctctcagtgaggtgggaggacctcgagaggtcaggaggctgctcaagaccttctgcccctcagggaccaggtgagggcttgtcgactgctctgacctcctgatgcttctggtggggagacctcagaggggcctgccgtcaccatcgccagtggccctggcctgcccagtcatcnnnnnnnnnnnnnnnnnnnnnnnnnnnnnnnnnnnnnnnnnnnnnnnnnnnnnnnnnnnnnnnnnnnnnnnnnnnnnnnnnnnnnnnnnnnnnnnnnnnnnnnnnnnnnnnnnnnnnnnnnnnnnnnnnnnnnnnnnnnnnnnnnnnnnnnnnnnnnnnnnnnnnnnnnnnnnnnnnnnnnnnnnnnnnnnnnnnnnnnnnnnnnnnnnnnnnnnnnnnnnnnnnnnnnnnnnnnnnnnnnnnnnnnnnnnnnnnnnnnnnnnnnnnnnnnnnnnnnnnnnnnnnnnnnnnnnnnnnnnnnnnnnnnnnnnnnnnnnnnnnnnnnnnnnnnnnnnnnnnnnnnnnnnnnnnnnnnnnnnnnnnnnnnnnnnnnnnnnnnnnnnnnnnnnnnnnnnnnnnnnnnnnnnnnnnnnnnnnnnnnnnnnnnnnnnnnnnnnnnnnnnnnnnnnnnnnnnnnnnnnnnnnnnnnnnnnnnnnnnnnnnnnnnnnnnnnnnnnnnnnnnnnnnnnnnnnnnnnnnnnnnnnnnnnnnnnnnnnnnnnnnnnnnnnnnnnnnnnnnnnnnnnnnnnnnnnnnnnnnnnnnnnnnnnnnnnnnnnnnnnnnnnnnnnnnnnnnnnnnnnnnnnnnnnnnnnnnnnnnnnnnnnnnnnnnnnnnnnnnnnnnnnnnnnnnnnnnnnnnnnnnnnnnnnnnnnnnnnnnnnnnnnnnnnnnnnnnnnnnnnnnnnnnnnnnnnnnnnnnnnnnnnnnnnnnnnnnnnnnnnnnnnnnnnnnnnnnnnnnnnnnnnnnnnnnnnnnnnnnnnnnnnnnnnnnnnnnnnnnnnnnnnnnnnnnnnnnnnnnnnnnnnnnnnnnnnnnnnnnnnnnnnnnnnnnnnnnnnnnnnnnnnnnnnnnnnnnnnnnnnnnnnnnnnnnnnnnnnnnnnnnnnnnnnnnnnnnnnnnnnnnnnnnnnnnnnnnnnnnnnnnnnnnnnnnnnnnnnnnnnnnnnnnnnnnnnnnnnnnnnnnnnnnnnnnnnnnnnnnnnnnnnnnnnnnnnnnnnnnnnnnnnnnnnnnnnnnnnnnnnnnnnnnnnnnnnnnnnnnnnnnnnnnnnnnnnnnnnnnnnnnnnnnnnnnnnnnnnnnnnnnnnnnnnnnnnnnnnnnnnnnnnnnnnnnnnnnnnnnnnnnnnnnnnnnnnnnnnnnnnnnnnnnnnnnnnnnnnnnnnnnnnnnnnnnnnnnnnnnnnnnnnnnnnnnnnnnnnnnnnnnnnnnnnnnnnnnnnnnnnnnnnnnnnnnnnnnnnnnnnnnnnnnnnnnnnnnnnnnnnnnnnnnnnnnnnnnnnnnnnnnnnnnnnnnnnnnnnnnnnnnnnnnnnnnnnnnnnnnnnnnnnnnnnnnnnnnnnnnnnnnnnnnnnnnnnnnnnnnnnnnnnnnnnnnnnnnnnnnnnnnnnnnnnnnnnnnnnnnnnnnnnnnnnnnnnnnnnnnnnnnnnnnnnnnnnnnnnnnnnnnnnnnnnnnnnnnnnnnnnnnnnnnnnnnnnnnnnnnnnnnnnnnnnnnnnnnnnnnnnnnnnnnnnnnnnnnnnnnnnnnnnnnnnnnnnnnnnnnnnnnnnnnnnnnnnnnnnnnnnnnnnnnnnnnnnnnnnnnnnnnnnnnnnnnnnnnnnnnnnnnnnnnnnnnnnnnnnnnnnnnnnnnnnnnnnnnnnnnnnnnnnnnnnnnnnnnnnnnnnnnnnnnnnnnnnnnnnnnnnnnnnnnnnnnnnnnnnnnnnnnnnnnnnnnnnnnnnnnnnnnnnnnnnnnnnnnnnnnnnnnnnnnnnnnnnnnnnnnnnnnnnnnnnnnnnnnnnnnnnnnnnnnnnnnnnnnnnnnnnnnnnnnnnnnnnnnnnnnnnnnnnnnnnnnnnnnnnnnnnnnnnnnnnnnnnnnnnnnnnnnnnnnnnnnnnnnnnnnnnnnnnnnnnnnnnnnnnnnnnnnnnnnnnnnnnnnnnnnnnnnnnnnnnnnnnnnnnnnnnnnnnnnnnnnnnnnnnnnnnnnnnnnnnnnnnnnnnnnnnnnnnnnnnnnnnnnnnnnnnnnnnnnnnnnnnnnnnnnnnnnnnnnnnnnnnnnnnnnnnnnnnnnnnnnnnnnnnnnnnnnnnnnnnnnnnnnnnnnnnnnnnnnnnnnnnnnnnnnnnnnnnnnnnnnnnnnnnnnnnnnnnnnnnnnnnnnnnnnnnnnnnnnnnnnnnnnnnnnnnnnnnnnnnnnnnnnnnnnnnnnnnnnnnnnnnnnnnnnnnnnnnnnnnnnnnnnnnnnnnnnnnnnnnnnnnnnnnnnnnnnnnnnnnnnnnnnnnnnnnnnnnnnnnnnnnnnnnnnnnnnnnnnnnnnnnnnnnnnnnnnnnnnnnnnnnnnnnnnnnnnnnnnnnnnnnnnnnnnnnnnnnnnnnnnnnnnnnnnnnnnnnnnnnnnnnnnnnnnnnnnnnnnnnnnnnnnnnnnnnnnnnnnnnnnnnnnnnnnnnnnnnnnnnnnnnnnnnnnnnnnnnnnnnnnnnnnnnnnnnnnnnnnnnnnnnnnnnnnnnnnnnnnnnnnnnnnnnnnnnnnnnnnnnnnnnnnnnnnnnnnnnnnnnnnnnnnnnnnnnnnnnnnnnnnnnnnnnnnnnnnnnnnnnnnnnnnnnnnnnnnnnnnnnnnnnnnnnnnnnnnnnnnnnnnnnnnnnnnnnnnnnnnnnnnnnnnnnnnnnnnnnnnnnnnnnnnnnnnnnnnnnnnnnnnnnnnnnnnnnnnnnnnnnnnnnnnnnnnnnnnnnnnnnnnnnnnnnnnnnnnnnnnnnnnnnnnnnnnnnnnnnnnnnnnnnnnnnnnnnnnnnnnnnnnnnnnnnnnnnnnnnnnnnnnnnnnnnnnnnnnnnnnnnnnnnnnnnnnnnnnnnnnnnnnnnnnnnnnnnnnnnnnnnnnnnnnnnnnnnnnnnnnnnnnnnnnnnnnnnnnnnnnnnnnnnnnnnnnnnnnnnnnnnnnnnnnnnnnnnnnnnnnnnnnnnnnnnnnnnnnnnnnnnnnnnnnnnnnnnnnnnnnnnnnnnnnnnnnnnnnnnnnnnnnnnnnnnnnnnnnnnnnnnnnnnnnnnnnnnnnnnnnnnnnnnnnnnnnnnnnnnnnnnnnnnnnnnnnnnnnnnnnnnnnnnnnnnnnnnnnnnnnnnnnnnnnnnnnnnnnnnnnnnnnnnnnnnnnnnnnnnnnnnnnnnnnnnnnnnnnnnnnnnnnnnnnnnnnnnnnnnnnnnnnnnnnnnnnnnnnnnnnnnnnnnnnnnnnnnnnnnnnnnnnnnnnnnnnnnnnnnnnnnnnnnnnnnnnnnnnnnnnnnnnnnnnnnnnnnnnnnnnnnnnnnnnnnnnnnnnnnnnnnnnnnnnnnnnnnnnnnnnnnnnnnnnnnnnnnnnnnnnnnnnnnnnnnnnnnnnnnnnnnnnnnnnnnnnnnnnnnnnnnnnnnnnnnnnnnnnnnnnnnnnnnnnnnnnnnnnnnnnnnnnnnnnnnnnnnnnnnnnnnnnnnnnnnnnnnnnnnnnnnnnnnnnnnnnnnnnnnnnnnnnnnnnnnnnnnnnnnnnnnnnnnnnnnnnnnnnnnnnnnnnnnnnnnnnnnnnnnnnnnnnnnnnnnnnnnnnnnnnnnnnnnnnnnnnnnnnnnnnnnnnnnnnnnnnnnnnnnnnnnnnnnnnnnnnnnnnnnnnnnnnnnnnnnnnnnnnnnnnnnnnnnnnnnnnnnnnnnnnnnnnnnnnnnnnnnnnnnnnnnnnnnnnnnnnnnnnnnnnnnnnnnnnnnnnnnnnnnnnnnnnnnnnnnnnnnnnnnnnnnnnnnnnnnnnnnnnnnnnnnnnnnnnnnnnnnnnnnnnnnnnnnnnnnnnnnnnnnnnnnnnnnnnnnnnnnnnnnnnnnnnnnnnnnnnnnnnnnnnnnnnnnnnnnnnnnnnnnnnnnnnnnnnnnnnnnnnnnnnnnnnnnnnnnnnnnnnnnnnnnnnnnnnnnnnnnnnnnnnnnnnnnnnnnnnnnnnnnnnnnnnnnnnnnnnnnnnnnnnnnnnnnnnnnnnnnnnnnnnnnnnnnnnnnnnnnnnnnnnnnnnnnnnnnnnnnnnnnnnnnnnnnnnnnnnnnnnnnnnnnnnnnnnnnnnnnnnnnnnnnnnnnnnnnnnnnnnnnnnnnnnnnnnnnnnnnnnnnnnnnnnnnnnnnnnnnnnnnnnnnnnnnnnnnnnnnnnnnnnnnnnnnnnnnnnnnnnnnnnnnnnnnnnnnnnnnnnnnnnnnnnnnnnnnnnnnnnnnnnnnnnnnnnnnnnnnnnnnnnnnnnnnnnnnnnnnnnnnnnnnnnnnnnnnnnnnnnnnnnnnnnnnnnnnnnnnnnnnnnnnnnnnnnnnnnnnnnnnnnnnnnnnnnnnnnnnnnnnnnnnnnnnnnnnnnnnnnnnnnnnnnnnnnnnnnnnnnnnnnnnnnnnnnnnnnnnnnnnnnnnnnnnnnnnnnnnnnnnnnnnnnnnnnnnnnnnnnnnnnnnnnnnnnnnnnnnnnnnnnnnnnnnnnnnnnnnnnnnnnnnnnnnnnnnnnnnnnnnnnnnnnnnnnnnnnnnnnnnnnnnnnnnnnnnnnnnnnnnnnnnnnnnnnnnnnnnnnnnnnnnnnnnnnnnnnnnnnnnnnnnnnnnnnnnnnnnnnnnnnnnnnnnnnnnnnnnnnnnnnnnnnnnnnnnnnnnnnnnnnnnnnnnnnnnnnnnnnnnnnnnnnnnnnnnnnnnnnnnnnnnnnnnnnnnnnnnnnngccctgcacccagccaactagtcttaaaaaaaaaaaaaaaaaaaaaagaacttagggcccgtatactatcttaataggaaaaaaggaaggggtgaaagcacatattatgggccgggtgcgatggctcacgcctgtaatcccggcacttcgggaggccgaggcaggtggatcacctgaggtcgggaattcaagaccagcctggccaacatggtgaaaccccgtctctactaaaaatacaaaaattagccgggtatggtggtgcacacctgtaatcccagctacttgggaagctgaggcaggagaattgcttgaacccacgaggcggaggttgcagtgagctgagatcataccattgcattccagtctgggcaacagagtgagactgtgtcttaaaaaaacaaataaaaaaaaaaaagcacatattatggcaaaacaaatgagtttttggaaagataaataggcccttaggagctgagatgggagatgtgaagtcttgtgacaatgtcttcttaggtgtggtgtggaaactactcacatcttccagggaagagtcagttgctcccagggagcagatttgggcctgtataccatcttaataggggaaatggaaggggcaaaagcacatattatgggctgggtgcaatgtgcccagtgcaggaggcagacgtggtttatggttgctgttgaaaccagtgcagggcccgattgctttgtattgagtgttgaggatcctggttttgtatcagccatgagtttgcagctctgggacacacttgatgttggctcaaggggaaatgaggttggaggggcagggtggttggattggatgtgggcctggggccattgctgatctacaaagtggtcatcacacgggaataatagagctggctacagaccacaaccagcaatattatttaaaagtaaggtcacacttttaataataagtcacattttaagttattatcaatttataaaacacactgttggtataatgatagcttttcaagaaggatataaaaaggcatgttgggctgggtgcagtgactcacgcctataatcccagcactttgagaggctgaggtcggcggatcacttcaagccaggagtttgagaccagcctggccaacatggtgaaaccctgtctctgctaaaaatacaaaaaaaaattagcttggcgtggcggcgcatgcttgtaatcccagctacgggggaggctgtggcagaagaatcacttaaaacctgggaggtggaggttgcagtgagctgagatcgcgccactacactccagcctgggcaacagagccagactccgtctcaaaaaaaaagaaaaaaaagaaaaaaagtaaaaaggcatgttgaaggtacctgcttgtggaaagttgcaacttgacgggaggtagggcgagcacttcttagaaaggtggaaatgggccctcctgctacagagacccacaaacatagactgaggcctgcagcctaggagactcaaaagaggcaaaggtgaataagagtcaaggtctccaagtcagggtctgactctgggggtgggggtcacatatgatggaggatgtcaggagggcttcctggaggtggtgacatttaccaggggggattttaggtggggtttgcgagacagtaggacctggctgaagagcgtaggctccttagacaggagtgggaattcaggcttgaaaatgagttggccagattgcaggggtcctcgaatgcaagggaagaatttcaactttaacagaggagcctgggaagctgtttgggaaaaggagtgataaagcgggaggggtcctccagcagagccctgcatgggcaggagggagcgagatgggaggtgggtgttggtaagggatgatcccagtggtccaggggagcagtcatagggtggaaactaaccttgtggggtctgggcaggaagggactgatttgagacaccgggaagaaacagccagtaggactttggtgagagggctgggggtcggggaggggggtgtggagagtgggagcttgagtctctgaaaacagacagtgttccaagggggagacctgaggcaagatgtggagaggcagctgagctgggaagctggaacggaggtgtggtcactccaggagactaagtcagggggcgaggggacccttgggagctatctagaccccagcactagggaatacggaggggagaaggaggggagaagaaccagctggtgcgtgtcaggcactgccctcgaggtcagatggggtggggctggatactggccatgaggattttttcaagagctgggttaatagtgagacgggcggacaccagatggctcgggctaagaagtaagtgggcggtgggaagctagaagccgtggtgtagacctactttgagaggttgggctgttcagacagggagaaagttcacagtttgaggaggtagataggtcaaaggaagagggtttgcttgtttttgagattggggcatcctgaacgttctcccaggccaagtgagaagaaaccagaagaggaacatgtcacccaaatgtgctgaaacagcccagcagctgcgctgcctcacagaaaatgtgcagaggcccctctgtcccaccatgcctgcctggggacggccttcactcgggctactcagggtttccccagcctgccaacccaagggtggcaggagctgtgggtgctcccagccccttctcaaggttggtctgtgggtagaaatgtgggctgcctcggggcgtcacagctacaaatgcataccagccctcagaaccacattcctgctccccagccctttcctccgcacccccatgcagaagcgcggccgccagctcacaaaggatagggagggatattgctcttggcatttgatgggaagcatctgctgcatcccattggggtgttgcccaggatggattggaaaagagttggcaggaaggctgagctctgtgctcacaacctggcttggtggtggccgaggagcttggcaggagcagagtgcaggacctgggaactgggggttggtgcatgtgtgcacgcacgtgtgtgtgtgtgtgcgtgcgtgctgggtgggtagggaggaagctgtgaaaccacatcccctcctctctgctgctgtgttgctgtgtgtttcagcagcacgtgggtgtcaccacacttcctagcaggtgtcaacctccaagactgttctgggctcttctcccagttggctgagttggaggtgggagtcccaactgtcccctgtggcttccagagtgggaccttgctgtgggataggctggccaatggtgctccctcccctgtgacccttctgttgggtgggtcacgaggaaggactgtgggtgttgcccacagacaggtggacatgtggcaaggacaccttgggaccttctttctgacgccccttgaagggggcactttctcagctttgagatgagtctctgtggatgtgggaagttcactatctcaagagcagcagccttggaaaatccaacacagaaccccgagtaggggcgggaaggggtcctgtcccgctcactggctgcctggcagagttctgcacaaggaagcgcctgtgttgctgtgggcggaggaatggactgagggctacattcgcttcctgttgccgctgtaactgcttatcacaaactcagtggcttaaagcaacagaggctccttcctttacagtgctaagggtcagaagccgatcagtctcaccggactaaagtcaaggtgttggcagaatccattcctgcctcttccagctttgggtgggaggctctgctggagttccttggcttgcggctgcatccctccagcctctgcctccatcctcctacagcctcctccttctctgcagtcagatctccctctgccttcctcttttttttttttgagacggagtcacccaggctggagtgcagtggcacaatcttggctcactgcagcctccgcctcctgggttcaagcgattctcctgcctcagcttcccgagtagctgggattacaggcatgtgctactacacctggctaatttttgtatttttagtagagacagggttttgccatgttggccaggctggtcttgaactcctgacctcaggtgatctgcctgcctcagcctcccaaagtgctgggattgcagccatgagccatcacacctggcctgcctccctcttaaaggacgcttgtgatttggggcccacctgggtaatctcttcatctcaacatcttcagttacatctacagagtccctgttgccacatgaggtaacacagtttgggaagggagagttattcagcctaccctaggggcctgtggtgtatctcagggcccttctgattttaagatataaagcaagaaaacaaactggctcaaggggaaaaaaggacacgttgaattctgttgctttaaatgtatatttttttattgtgctaaaatgcacagaacataaaatttgccattagtaacactgagtacattcacagtgtcgtgcaaccatcagcactgtctagcgccagaactttttcatcaccccaaagggaaaccccgtatccatgaaggactcactccccattcgccctctccagcccttggcagccaccagaatgctttctgtctccataaattcatttttaataagtgcaattctgtgtgactttaaaataaataaacatgagcacgatgagttgcttattggaaggatatccatgcggggaggccggcgtgtggagtgcgtaggcctccggacgggcaggagttgaaggggcgtggatgtgccgccctctcctccccttgctctttccttggggtcactgcctgagtatccctctttgcaaatggccccaaataatgtctcagcccccacgtctgcatcgcctcctagcttcaggaccctccaccaaaaaacattccaagcttcagactcactcctgggaaaattccaatggcctcactctcccttttgagccagccagatcccatggcctgtggcgggctgcctttgagtcctgagcacctgtgagctagggaagcaggacaggcacacccagggaaggggaagagtcgtcgtcagtcacagtaattgatatctttggaatcgtctaagagatacttagcgtgtgcctaaaacattcatttctttttttgtttgttttttgagacgaagtctcgctctgtcgcccaggctggagtgcagtggcgtgatctcagctcaccgcaacctcctcctcccgggttcaagcgattctcctgcctcaacctcctgagtggctgggactacaggcacacactaccacgcctggcgaatttttgtatttttagtagtgactgggtttcaccatgttggtcaggctggtcttgaactcctgacctcaggcaatgtgctcgccttggcctcccaaagtgctgggatgacaggtgtgagccaacacacctggccacattcatttcttaggagaagctctgcattttctgaaagtgaaatgtccccaggcgggtgacactgatggtgggatctgtggcctcaccagtgtcttatgagagatgccgctgtgtgtttcaccaagctgtatcctattgtcctctaaatgtggcttgtagacatggtgccgagaatgatctgggaggttcaaatcataatatggtccaaatcaacagctctctgatgacctggtattatcctaggatcaaattgagactatccgaggatgggcgtggtggctcacgcgtgtaatctcagcacttcaggaggctgaggcgggcggatcaattgaggtctgtagtttgagaccagcctggccaacatggtgaagccccatctctactaaaaatacaaaaagtagccgccggacatggtggtgtacgcctgtagtcccagctacttgggaggctgaggcgggagaattgcttgaactcaggagacggaggttgcagtgagccaagatcacgccattgcgctccagcctgggtgacagagcaagactctgttccccggcaaccaaaaaaaaaaaaaaaaattgagactctccgagctgcactgtccagcatgatagccactggctgcacggggccatttgaacacctgaaatgtggtgattccaagtggagaggtgccgtgtgtgtgaagtgcactctgggtttcagagtcctagcaagggggaaagaaaagaatatcaaatatctgtcatttttacattgattacatgttgaattgataatattttgggctctgttaagtgaatgatattaaaattaatatcacctgttcttacattttttaatgatttcctttttcttttcttttctttttttttttaaatatggggtctcacactgttgcccaggctggagtgcagtggcacgatctcggctcactgcaacctttgcctcccaggtttgagcgattctcctgcctcagcctcccaagtagctgggattacaggtggctgctaccatgcctggctaatttttgtatttttagtagagacagggttttgccatgttggccaggctggttttgaactcctgacctcaggtgatctgcccacctcagcctcccaaagtgctggtatgacaggcgtgagccactgtgcctggcttgttcttacattttttattgtaggtgctggaaaatgtaaggttgcgtctgtggcccatgtgccgtttctgctggagggttggaccgagggccagccgagaaggctctggggctgctctacctgaatgctgagtgtgtgctgagcggtagagaactttgagaagtgctgaaggacagaggctttgtgtgggggatgcagccccaggccggagatgccttctctgtgctctggagaccctcatttggtgacagcaagaggaaccactgcaagaggggcggccacctcagcaaagcacccaggatgctggcctcccagctcaggaatccagaggcagaggaggggaggaggctgggcttggaggagagcagggtcttgggccctgggaaaagcctggggggccagaaagctgggggacagattgaggccagaggcaaagagaagaaggttcggagaggagggccaaggaagaagggttctgcccacggggagggagaggcccacggggcaggggcgtggtgggagctgcatcctcgaggctttctgttgaccctgacacctggccagaaaggagttccttctggcatcctttgtcagcggtttctggagctgccctttaggggccagtgatgagggtgccctgggctgggctgcagacagtggaaaagacaggctcttctcactcccagtgctggggaaattagcttcttggaggaagggggagctgtattttctgagtggccgcacttcctggcctagacgtgtgtgtcttgctgtaattttggcgactggtgttggtggtgcccattttatggatggggaaggtcaaattccacagatattgagtgacaggcccagggccttggatttcagtgtttgactcagaacccaggtctctgatctgccaccagcctccctcccattcagatgggaacagggactccgggcatgcagtcttctcccagacactcccccggctctggcctggcgcccggagaccagtagcagcagctccccacggccgttcactgtgagggtggggagggccgtgggaccaggaggccttagggggaaagttggccatgaggagtgggaagcgacgggtcagatgccagtgactgctggctggggagccgctggacgtggctggcctgtttggccagtgtggcgggtgccccggggcttcagtcacccccagccacgtgtgggggtgcgggatgggaaaggtaagagtgtgtggagcccagtcagcactcaacatgaggtcccgtgggggctgcctgagggcgtagcttccagaattcagcccctggccctcagaaggtgtcaccaaaggcttctttccatttgagtgaatccctcccagcccccagcaagccctcggaacgagcccactcccaggcgctctctcctagtgtgggagtggccacgcccctgctgggagtgactcacttgggttcagaggtcgtggcactgagatgggtctggcagatcccagcgtccaggcccagcccctatagtgtcagctccctcctctggggacccccttgcttgtgcccctctgggtcccagcacatcccaggcctgcagggagggggagaggaagagactgactcactggccaggtcccccaggggctggagaggctggagaggcaggagctggatcagatctgaatccagaggctctcggaggaagagctcagggtgagctgcgcccccatcccctgcccctcctctcctgctccttctcccttccatggtcccagccagcaagcacctggggtagaggggacaaacccaggtggctgtgttccagccctggctgcaggtctgaatggctttctggggtggctggccatgctccctgagagcccagctgtggcgatgtctgagcaggtaggtgggggagcacctaggaagcaggggtgtcaggcagagcacaaggagagagggtgtccaggtcagtttcaggacctggctgagaggagggggctcctcacgggcaccgcctctggcaagcacagggacaagggcaaggwcggcatggccagaggtccctgggagcctcttcccctctcttcttcctagcagctccccctcactcttcccagggaccctgtcactttcctttagcgtgtggcagctccttggcgtccctcccgtgccttcaggttgcttctgcgccgggcctgccgctgggcgcccctatctctgcctgccccctcctcctgctcccctcgccctgcccccttggagcaattccccaccgagcctcccttcccaggcagtcgaggtccctccctacctctgccccgcgctctgggaggctccttgttccgcgaccacaaagcccctttgatcctctgctcggctctgagccatgtgacccggtgggcgggccgcggctctcggcgcgtccagsgcagcccgacgttccgctgctggggtgagtcctgctcctttgttcttcccagccttgcaccactggctcgggggctctcaggtggcgcggccgcgaggcggaccctgatggccatggtggcggtgccgggagccacgctgtccctgggccccggcccgaggccggcaggaccgagcggggtccccaggagaggggtggcggggagctcgatctccacgcggggaccagattttcggcctcaaaatagaagaatagggctttgtgtggtcacagctatctctttgtaaatatttggccaactaagctgagtggctaagttctcctgctgcccggagcttcttggaacatgtttccttttcgcaaggggtttccctggcttccaggagggccaggaagaaattcgaattggccaccgctttctctaaaatcactccgctcaagttatcacccctctgggctcccgaagaccggctggctggaggctggagatagtctcaatgctcgaaatgccgtaaccgaagctccccgcggcgccggcactgggatccagggagctgctgctacagcgcagctctggattcctggatgtgttggatatgtgcarggcgttcctgggaggagcggggagggagggtgctgctggcggggctggtctgcgtgtgctttgcttctctacaatggcatgctgcgtgtcggccatgcagaggcatgtcagtgagcaggggctgagggatctccctaacggacctgctttcagagggtcttttcatgctgggagaaccccagagactaaatcatgcagccaacggggtggtccccggcctcaaagcagggaggggcgaggagctttgtaggcaatgccatctgctcctgaaacgccgtcccagtgactctggggactgactcagcctccagcctgctgcacttcatccctggcccctctctctttgctttttcatgtgaaatctgctgtgttttggtcagaggtttggggaacagctctctgctcatctaagataagtttgtaattcctttcctggagaaaaatatgccacccggaagcaggttgagcagtggttttctggcaggtctgttcggggctgtggagacagcacctgctggatcaggatggagttggaatttggtttggatcccacatgagaaaacccgttggaagaggaggaagcagaaaaaggccccattccctaataatgctgtgggttttcctcctccattcattgccaccttgccttgaaacttaatggggccacgtgtgtttccatgaatgtcattctctttggccaactcccccggcagccccaggagctccttttcaggaaaaggaagaaggtgtttgcttagcatctagtatacgagtccttgttggaaaggtgggattcttgtttctccttgggtctcttttaggctgagatgtggtcaaggaaggcctgtggtgtggctcgccttttttaatgctcgtctctggagacctgagttgctgctgactcccagcttgccccttctgtcccctggccatttctgtgtcggggtggctgagacactattgcattggccactttgtgttcccmctagcccccgcccctgtaggctgtcattgtgatggtgatggggccaattcagctgcggtggggaggacccactgtgtgcgcctggggggtggcgtggggcactctgggatgagaagatgcgacttctgccctgagagccctgytttaatggaaggcgggggcatagttgcaggcagaagccatcaagcactgtggtcagaccagcattccatgtcaaaaatggccttgttggccgggcgcagtggctcatgcctgtaatcccaacacttcaggaggccaaggcaggcagatcacctgaggtcaagagttcgagaccagcctggccaacatggtgaaaccctgtctctactaaaaatactggctaatccgggcatggtggcgcgtgcctgtaatggcagctactcgggaggcygagacaggagaatcacttgaacctgggaggtggaggttgcagtgagctgagattgtgctactgcactccagtctgggcaacaagagtgaaactctgtctcaaaaaaaaaaaaaaaaagccttatctgggcctgggatctgtcctccgaacactgggtccactgtgctccacaaggactttcaccccggaagccctagacccacttgggcaaccagagtctctgggttgaccactccccagccctggccagcctcctgggccaccgtattctcccaacttcctgttgtgccacggctggtccaagctgctcttatcagacaatgcgaggcacttccacaggaggggacaaccccgtccttaggagccccttctccctgcccccaggcctggtgcagtgtgtggcttccctgccggtgtcaaaggtctcaaggcccctttaagaagcctgtcaccaccaccagcagcttccgttatctggttcttctgtacatgtaagcctttcccatacaccccggatgtttagggcttccgccctctctccctggccgggagtgtgggaagagggctttatttcaatgcttgagagtagggtcaatggccagggtaagctgtgggggctcctccccgccggcccctctctgcagccctcaccttaacacagagyatcgataccacctgggctttgggaagacctggaggctgaccaccctggaggctcccagcgtcccacagccactctttggggaagaggcttcctgagggacttgtggcccttggctgggactctagtcccagagttctgccttccggcgccgagctttgatttgtttattgagtgccagcccggttcccggacaggtagggacctgttcccggagctcagcagagccttgggaagctttcccaggagggctcccgagggtggcggccatgcccagtccgctgtacgtgtgagtttgtttgatgaggaattggctgggaaggcgcgggtctaattacaggcccatgagggtccctctcgcccccacccaggaagcagcggagatcctggcacactcagcacctgggcctgtgcctgcccagctgctggtggaatcatgggagccttgctccggggcctgtagagcagcagtgggaaccttccccacctcagcccctcccagagttggctgttcaaactcgccgccgctcagcctcttcctcctctctttcatcaaccctgggaatcgcacactgcccaccccaccgggccccggagcgggtgcaggaagagagagcttaacacccagaggtctgggccttctgcaggcgcctgagctgctgtggcctgagctgggttccctgctggaaccatcacagtagacctaatgatctgcctgcaggagttgcttcatcccagccgactccggggctgcgggaaggggctgggccttggttttgctgggggtggggggtcagtgcaaagggcctgaaaagtggcagaggtgatggcccatctgtcctccccctggccggccggcctaaacgcgattggctctctttcttttttttttttccctcccttttccctataaataacactaaatgcgatttgtcaatgcattcatttgggttcagtagttggaccatgggcagaagcactccagatttgtcactttccctaagctaagggtggggaacaccctctgtgagatcttggctcctgagcgcccaagactgctcttggaaccccaactctgggtcggtctcaggggactgacgttgatggagttgctgacattgacctccggcctctgcatggccttcaggaagggggcccttcgctctctgtcccgtcgagcctggctggcagcactcccttctcaggcctgtgcccccggcagggcctgctgcccccgccctgctctgtgggtgccaggctccaagcaccaggtgactcggtcactgaatggtcactgaacagtcatccttgctggtgtccccagtggaatgtgcatggacgtcctccctcccccagatccttgtcttttatctctcagcctttgttccaggggccaccacaggaccaggaggtacgcagacgtgggtggcacatccactgggcagattcagccctgaacctgcacgccccctccaagggggcccccagcgggcggggttgatggtgccgtctctctctctgtcactagaacggacatgaggattgtgtcttgtcgatccacgtcctgagttcccagacgtcataggtgcttgctcaacgagtgtttgaatgaatggtcagcattgtgtgaccgcagattttcaacttttatccaaatagtttgtggtttctgtgaggctatcccgagacagtctcacaagaatctccattctccctgcacgctccgcacaaggtctccttggggggtttttcagaaaaagggccaaagagcagcatttcctcggggatttgaacacgatctcccccggggcaggggactgccctggaagattcccggcaccgcttcccatgcgccacgtgactaggagggtcttggggcaggatggtgtcttttgtgccttgtgtgctggggccggaggaaacactgcccgtggccggtgtcatctgccagccctgaagactaatgatgggctggacagtggccccattgagtgggagggagaatcgctgctgtctgtagctggggggccgggtgggtgggagccgaggccagggagaacagcgcagacctggcacggagaggcctggaggaggagcagggggtctcagccacccagggtgcagggacgccacacgaggagcaggtgtggtgtgcgtcctcctgcgggttctccacctcttggcttcgttacctgcactaggctttgtggtgagagggcacagagtggaggaaggtgccgtggctagggcaggccacacgctgtgctaatggattgctgttacctgtcgcctctgtggttttgctgtcaggatcctccagcaccaggtccccaccaccaggtatgggccccacaggcactactggctccccgaagccagggacagaccccatagacaatactgagtccctgcagccagggatgggcccccacggccagtaccagatctcagggaccagcaccgggtacccacagccagggacaggcctccatggccagtaccaggtctcagggaccagcaccgggtacccacagccagggacgggcccccatggccagtaccagatctcagggaccagcaccgggtacccacagccagggacgggtccccatggccagtaccaggtctcagggaccagcgctgggtccccacagccaaggacaagtccccacggccaataccagatcccagtgaccagcactagatgtccacagccagagatgggcccctatggccagtaccaggtctcagggaccagcgctgggaccctggatgactgaaggagggcacggttgactaaagctgcaggagccagcctggccatcctgaggcactaagccatcactgcggtctcaggggactcagactcctctacttgtcttcttgaattctggaatcagacacacctgggtccagcctttgcccccggggctgtgtgcctgggatggttgcctcacctccctgaagctcagtgagatggggacggctgcacagggcccggcacagatggcacccgatggcacagggtcacctgcttgcatccatacagcctcggccctcgctctggctgcgtaccgagagtcccatgcccagacctctgctgagtctccaagctcctggtcatgcctcaggcctcccgtgagaagcatcactgcatggaccatgcctcgggacctcaccttgggctgggaagcttgctccatctccccaagtctcccctagaggcgccccatgtcccatcactctcactgcttgaggggtcagataggggaacccagtgtgggaggcccagaggtgccggagcagacgttaagcgagttccgtgtttatgcgctgggccttggcagacaccctgaatgagcctcttccccaggaaggagattggggtcccagtccaagttgtggcctcaaaccctgtgaccaagagtggagaaaaggcaagacccctcctcccagtcttccagaacagccgatagtggtggaaacatggggttcacactgaatttccttgtaacttgttgaagagaatttagcccacattttcaggggtggaggtctggccgatttggcagtgtgcccgtccccctggccacagtttactctggaccgggcaccctggtgccctccctcagtgacgcagtgaagtcactatgacgtgtttagttggtgagaaagtgcctcctgtaatgttttactcttcttagagggtgaataagccttgtttattataaataattatttacagaatacatgaggtttaacctaactctgggccacggcagcgtcccctgggtaaacccacgcgccaccctagctagagcctgtgcccccacaggcttcctggactcaccctgaaggggggctggattttctgcctgtcccgatgagagggctgcaggacagtccccagcgagcccttctgagggctgtaacctcttcccctggtattttcctgctcgccaggaatgtttcaagcttccagcagaagcctacccaccatagtcgctttccaccctgctcaccatccctcctgccctcactcattcagcagaccccgtgcacagcccagtgcaggactcagggtgggaaggtgtcccgggtgggctggagcaaggttcccagccagggcggggtcccaaggtgggtccacagccaggactgtgatttgggaggcccctccctgccttgttccagccccggcaccgccgctgtccttgtgctcagtggagactcactggctccaggctctaaaacctcagcgaggtctgcagacagggaggagccccactcgagggtagagtgactgccgggtccatttgcctgttacgaaccacgtggcctcagacctgccattcctcctctcctagagctatggtcttttgtctgaaaaatggataatgatggttaccatgtcagggaccattttgaggacaaacggggatgaaactgaagaggctcagcacggaacctggacacagaagtgctaattgtgtgttaccagctgcggtggctgccaagkcccaaccacatggcagccacgggctgagtggcgggcgggaagtggggagcaggagcatgcaagatgggcattcctgaagtttctgatccagtgagataagtacacacccagctctaagatggagtgtcccaggaaggtggagactgcaaaggccttgtggcgcaggagtgtgagctgcacctctgggctctctagaatttcaccagagctcagggaggaggtcagctcagatataggggcaacgggagagatgggagtgagaaaatggcttggcgtctggaagtggagcctggaaaggtgggcgtggggacagaggagggccttgggggccatgggcccatgcgtccaggaggtggaggcagtgaacggggccacggtcggccccacacgtggcaccaccagccctgctgagcctgcacctgctcctcaggccccctgagtgccactaccacctggcaccccttggtctgattcctgcttcctgcccgcctgggaagagtgagaccacttgcctaaagtcccttagctgtccttaaccattctggctgcctcctggccctgtccagggttagccgttgacctgaactgcctggtgccacctccccagactcctggggccttgccctggcaccaacagccacctccatcttcatcattcactcgcacattcacccagcagtgctttttgggcatccactcagcaatatcaaggcgctgagatgcggctgtggttaagacccgggcccggtctgtgaggacctcgcagttgccatttccccagagcacagccccagccaggcacactgtggggtccagaaagagaaactaatacattgtgttcgtccattttgagttgctataaggaatagccgaggctggggggttatttgactcacggttctgcaggctgtacaagtggtgccagcatctgcttggcttctggggaggccccaggaagcttttcctcatggtagaaggtgaagggggagctggcacgtcacatggcgagagagagaactcccagactctttttttttttgaaatggagtctcgctstgtcagccaggctggagtgcagtggcacaatcctcggctcactgcaacctcagcctcctgagtagctgggattacaggcgcatgccaccgcgcccggctaatttttttgtatttttactagagatggggtttcaccatgttggtcgggctggtcccaaactcctaaccttgtgatccacccaccttggcctcccaaagtgctgggattacaggtgtgagccacctcacccagccctcccagactctatagcaatcagatctcccggactttgtgaccgtggggagggcaccaaaccatccatgagggatccacccccatgacccaagccccaccccccccaggccttacctccaacatcagggatcacatttcagcatgagatttggaggggacaacgtccaaaccatatcacacgtgacctctctgtgcgtgcgtcagtttctacatctggttaagcagtagaagctccttctctgttccttgttgagagagcggtgggggagaaatgactcagggatgggaggctggtcccccgaggggccctggtgtttgtggagtgggagtgcgggaaggcccctacgttgtgtgtgccgtgctgggctggctcctcacagctcacygtggtgctccccgaggactgctggggaggaaagagctaattaacttggggacccarctgctgaagttatcattaaacttgagcagtccaggggcccctctccttctrggtcctatgtcacccagcacagtggggcttaattgaattttttctcatcccccaaggctcctggctggcgtggctggggtttgggatayggggagcgagagggcttgggcctcttccagatttggagtgggtycaccagaaatggcccaggaaaccgcgggggccacccccagcagctgggggctcctgtggtcatttcctcttggtcctgttgagcagccctggcccctggagccctcagcaagggatgtgggggcctgccaggccrgggtcctcactgctgccgctatgcacagctgcatcttgcatccggggagtggggtgccgagtggggtgtttgggaggcaggttttcccttgtcccttctgcccagagaccttggggatgagttgagtgagacccttccggcttctgactggctgtgtttctgttgccatcccccactccttttaagtggaggtttatgacttccttctttatttaaaagggtcatttagtgacttagcagatcccagtctgtgttacccagggcccttttaaaaatctgtggggaggctgggcttggtggctcacacctstaatcccagcactttgggaggcygaggcgggtggatcacctgaagtcaggagttcgagaccagcctggccaacatggagaaaccctacctctagtaaaaatacaaaaaattggctgggtgtggtggcacgtgcctgtaatcccagttactcgggaggctgaggcaggagaatcactcaaatccaggaggcggaggttgcagtgagccgagatcacaccactgcactccagcctggacgacagagtgagactctgtctcaaaaaaataaaaataaataaataaaaataaaaatccatggggggacctctgtgtccattggctggtgtgaggagagggtgaggagctgcagagaaggtaccaggctgaggaccgcccccacccttgggctacagaattgaaggaggggacacatgaaagatgttcctagactcgggctggaggctggggacatccgagggcaaggacracgctgtccctgctcttgtttgcagaggagtgcacagggctcaccagcttcttgttgctgtttaagtgatagctttatggagatagaattcacatactgtgacgttgacctttttaaaatctacagttcaatggttttgctgtattcacaaagtgattgtattagggtcatccagagaaacagaaccaatagaaggtgtgtacrtgtgtttagataaagagatttattattatgaggagttggctcacctcattacagaggttggcaagtgccaagattggcagagtaaatcagcaggctggagacacgggagagcccatgttgcggctctggtgtccmcctgaaggcccaagacccaggagagccaatggcrtcgttccagtcccgagacccaggaaaagcgcatgtgtcagtttgagtctgaagcaggaaaaatctgatgttccaggttgaaggcggttaagcgggaagaattctctctcactcaggccttgtgtcctcctattcagaccttcaggcctttgtcacaaaattacaaagacctgatcagaacaaaatctgagaaaaaaccctttccttctatcggttttggattcattggctgggaccctggaaattagactgacagagattaacaggaaacaagcataacaattcaagtaagttttacttgacaccgagccttcataaggaaatgaagacccagagaaaccgttagcctgagcggtttttgttttgttttgagacaaagtctcactctgtcgcacgtccaggctggagagcagtggcccgatcacggctcactgcagccttgacttcctgggctcaagctggggcccagctgccggccccgggagctgctctgaacccactcttaagtcccagctcagactcccaagtagctgggactacaggcatgtgccaccccgcctggctaattttttattttttgtagagacagggtcccactatgttgcccgggctggtctcaaactcctgggctcgagcaatcctcctgccttggcctcccaaagtgctggggttacaggtgtgagccactgtgcccggcctaggcctgaacagtttttatttgttttgcttgttttttaaatttgtttgttgsttgttttgagcagtttttttgtttatttcttttgcttgtcttttgcccaggctggagtgcagtggcatgatctctgctcactgcaacctctgtctcctgggttcaagccattctcatgcctcagcctcccaagtagctgcgactacaggcgtgtgccaccacacccggctgatttttstatttttagtagggatggggttttaccatgttggccaggctgttcttcaactcctgacctcaagtgatctggccaccttggccttccaaagtgctgggattgtaggtgtgagctgctgtgcctagcctaggcctgagcgtttttatgctgggtttgatgaagagtggaaagtcgtgggaaactgtgacagagcaacaaaagatgagctgaacagtgagcccgtgggggtctcggcaagacctgtgtactggggcccctctcagatcctctgtctctggagatgaggctgttcctttccgctgggtgtagggagggcacctcttaygtgaggggcttatgatctacttcagagaaggggcaggtcagtgagttcttcttggacctgccatttcttaaattccttcagctgaaaatatttactatgccaaggcactgtatcttggagtgtgcgttccaagccctgttgccttcaactgatcgggtgaggcccacccccatcagagcacacagtctgctttacccaggctcctgattgcacccttttcctgtttgccccgagaatactcaccagcagtgcttgtggctgcagcgttcaccccaagataaatttgccgggaagtatcttgcttttattattattttcacatcactctagtatatcgactttggaaacaaaagacatcattctgtttatagcattccatttttagtagtggtatttcctttaaaaaaaaatggtaattctcagctgggtgtggtggctcatgcctgtaatcctagcacttgggaaagctgaggcaggctgatcacctgaggccaggagttggagaccagcctggccaacatggtgaaatcccatctctactaaaaatacaaaaattagccaggcgtggtggtaggcacctgtaatcccagctacttgggaggccgaggccggagaattgcttgaacccgggaggcagaggttgcagtgagccgagatcgcgccattgcattccagcctggacgacagagcaagattccatctcaaaaaataaataaataaataaaatttaaaaaaaaatagtaattctcgatcgctgaaaatgtcaaatcctagagaacacagcattcctacaagtgatgttaacattgttcttgatcagttgttggctgaagattcatttgatgaatctgatttttccagaatagaygactcagatgactctgttgttttgcttagaaataactgcaggaacaatttaaaaaattttttttctttttaatttttttgttttttgagacggactctctctgttgcccaggctggagtgcagtggcacgatctcggcttactgcaacctctgcctcctgggttcaagtgattctccagtcttagcctcctgagtttagctgggattacaaggtgcctgccaccacacgtggctaattttttgtatttttagtagagacggtgtttcaccaggttgaccaggctagtctcgaacccctgacctcaaataattggcccatgtcggcttcccaaagcgctgggattacaggcgtgagccaccacgcctggccagtttttatatttaattttcacacagagcatccagtcagatttgcttcagcctcaaagagcgtgtttatgtaaaattaagtgagtgctggcagtgagctgaactttctaaaaggtaaaagggttaaatattaaactcatccaaaaacaccttcacagacacactcagaataatgtttgaccggttacctaggtgccccatagcccagtccagttgacacagaaatttttttttttttttttgagacggagtctcgctctgtcgcccaggctggagtgcagtggcgcgatcttggctcactgcaagcttcgcctcccaggttcacgccattctcctgcctcagcctcccgagtagctgggactacaggtgcccaccaccacacccggctaatttttttttttgtatttttagtagagatggggtttcaccgtggtctcaatctcctgacctcgtgatccacccgcctcagcctcccaaagtgctgggattacaggcatgagccamtgcgcccggctgacacaggaaattaaccatcacagttacacagccatcgccattaatcccagcacatttcatcatccccaaaagagaccctgcccccattagccaatccccattcccaactccgggctctcagcccctagccaccgctcatctgccttcgtctctatgaattcacctgttctagatagtttgtataagtggaatcgtacagtatgtggccttggtgtctggctcctttcacttggtagaatattttcaaggctcatccacattgtagcaggtgctggtgcttcattctttttcatggccgaataatattccatcgtggatagaccacactgtgtatctcttcatctgctgatggacatttgggttgtttctgctttttggcataattctgttgtgaagaattctgcagtgagtgctggtctacaggtttttgtgtgaacatgttttcatttctcttgggtaattgcaagatcatgtggtttagccaaccagcctttaagccatgtgtctgctgagggacccaggcctggtgggggtgcattgctgtgcttggccagccaggtgctgcgagtccgtgtcgcagccatttctctgtgctgtgctctgaggttgtctcgccggcaccgggcactgtgagccccaggaggccaaagccccctttgttttatcttgagtccaggcctcgctccatgaactaggatgaatggacattgaatcaacgcagggatgggtggggctggggtggggacgcagagtgrccccgggggcctgcagctgggtcctggctgctgacttccagtttcctttgcctgttggagcccagaacaagtcagaaaggggaaatgcaaagttcgastgtcttttctgtggtagactggcaggcctgggtgggtgagccacttgcagctagttgcagcgtgagagaggaagtgggaggggagggagagggtgagtttggtgtaactcacccctggaaggaggctgggctgaggctgggggaagtgacttttatttttctgagaggattcttccctggggccaacttcaaaccaagggagacaagaccttcctgggggaggctggaagtgctggggcccccaggtgggcaggtctcccagggccaacgtcttggggaagctataagttaccatgtttctggactgtcacacacacacacacacacacacacacacacacacacacacacacacacacacgagtaaactgtaacacaaatgtgtgcccatgaaagtgcccactttaaaccaccacacagcctgtaaagcgaaggccctggcccgcatctgggcacccactgcccagccagccggtaggcagtttgcactgtagtctgttaccatccctcagagatgcagccgaggagcccagctggcttggagggcccagtgggcgcagcctcaggaaagtggtcaggcccgggccaggccccttccccctcccagccttgggagaaattaccatatgaatgtagctccttcccggagttcgggctggaagggcctgggaggggacaggctcccaccccaggagcttccaggttccggctgctgcctgtgttagctgcgtgagcgtgagcgagccaggggtcactactgggtggaaggaagaagcgggcatttcttccaggaggtcaccgttggagtcccacagtaggtcaaccccaggccctgggtcctcgggaggaggagaaagaagagaagcaggaggtgtggagggtrggccaggaccagaaggcacacagggtcggggcagtgtgggagaccctgggggctccctcatttaaccagctaacatcacagcgttcataagaacacgctattactgcagttttattactttgctctgatttcagaaggcacaactgatgactttagggaacggagaatctgaggaaggcctcgcaggagagggtcagatgcgatcgagtaaatgtgagccgtctgtaaactgtagagtgcaygcacagcaccggtcagccctggggtcagtgttcccctggtgctcagctcggcctctgcaccttttagtgctcggctgggctctgtgggggtcagggctgggtctggtacattagaggacttctaccaagcccctggcagtgtctcagttactaaatccagtttgccagttastaaatccrctctgccggttcccgaatcactcttccgctggggccggccatgtcacgtcaggcttttcatgcaggacggcagatggatagacgctgggaccaagtcatccttgggccgcgagacgtctgaccttctgctggtgtctcagaagatgctagctctccgtggcatgtcttccacgcggtgcttggggaccagtggcctctaaggggcccccctgcctcagcgtggggagtggcctggccaaggtctcagtgtctggttggagccaggcataggctcaggtgtactggctggaggcctcctgcccatgggctctgcctgtcctgtgtccctggtccttactgtgtcttctgtgttcctgggagagaccccaggggccctgagcccagcactggggttggggagtgggcnnnnnnnnnnnnnnnnnnnnnnnnnnnnnnnnnnnnnnnnnnnnnnnnnnnnnnnnnnnnnnnnnnnnnnnnnnnnnnnnnnnnnnnnnnnnnnnnnnnnnnnnnnnnnnnnnnnnnnnnnnnnnnnnnnnnnnnnnnnnnnnnnnnnnnnnnnnnnnnnnnnnnnnnnnnnnnnnnnnnnnnnnnnnnnnnnnnnnnnnnnnnnnnnnnnnnnnnnnnnnnnnnnnnnnnnnnnnnnnnnnnnnnnnnnnnnnnnnnnnnnnnnnnnnnnnnnnnnnnnnnnnnnnnnnnnnnnnnnnnnnnnnnnnnnnnnnnnnnnnnnnnnnnnnnnnnnnnnnnnnnnnnnnnnnnnnnnnnnnnnnnnggccagcgcggccggcacagagggagcggtgttaccggggtagacgggaaccgtggctgcccccatgctggtctgggagagacgaggggccggacgaaaggacagcagactggccattcattcatttattcattcactcattcacagcgtcttactgggtgcttcggacgtgtaaggttttgtgggtagtgaatgcgacagaccccagacagcaatcggagggccacgtgtgtaagaactgagggacctaggctgggcgtggtgtctcaagcctgtaatctcagcactttgggaggcagaggcgggcggattacgaggtcaggagatcgagaccatcctggctaacacggtgaaaccccgtttctactaaaaatataaaaaattagccgggcgtggtggcgggcgcctgtaatcccagctactcaggaggctgaggcaggagaatggcgtgaacccgggaggcagagcttgcagtgagcccagatagtgccactgcactccagcctgggcgacagagtgagactccatctcaaaaaaaacaaaacaaaacaaaacaaaacaaaaactgaggaacccagtgtagatgagctatcccgggaaaacaagtgggagttctaggaacagcatggggaagggatggtcccggcagggaggacctctgtgggtagccttgttggaagagctgaaaggcagccagagaggctgtgcgtggatggaagctgaagagtaggttagggrcgtgtgttttgttaacaaagacttcaagcatttactgaccaggcacaacactatgtgcttcataaataaatatctcatttgatccccagcattcttatgagacagatgttattatcccatttcacatgtaagaacattgaggcacagagtggttaagttacttgctcagggtcacacagcacgtcggtggtaggcaggattctggagccacaggaatctggtatatcccaggtgcaatggaaaccagtcacggcttcatagagggaaatcatcagattagtaaattttacacacgccccctggtgctttgaggaggagggattcggacaggggcagctaatggtggtggctgtgagatgtgttgggttaacattgatgagagtttgggatggatgagtggattcggagtaatggaaatggagggcccaggcccggcccctggagatctagctgcaatagctgttggctggagaggctgttcacttagatgggggatggggtgggaggcaggtgagatgagagctccagagttcagcctggggcacggtcattgggttcaagatgccttcagatgttggggcttgacagtgacagtggctgcagatacccaggacccagcagagggcctggcacagcggggcccagggacacgtctgtgagtcaggctggcactcaagtgtgaatctggacaaagaaggtggcattgttggcattgaatgctcaggggctgggtgaagtcagctagggagaggggctctcaaggcaccaggactgactccgtgggtgagggcggaggaggagacggcagaggctgagagaatagccagagacaggaggaaggtcagcagagccatgcacagaagcctggagaagatttgaggaaaggaagggctgggtggtcgtcattccctgcagctaggaggcaagggtgacccctgtgtgtttcattcttcagaggattggtggctccatctggtcagaaccccaagtccagagatgcatctgagcttcatgccatggtgcaggcagcaggagccatggagcaggcctgcggggtcacggcctgcctgctgcttcctggtgtctctaccctgagctcaggggttgcttggatgccctgtgctgcatccccccaggcggtgttccagagaggatgaaagtggctatctcaaggtgtgaccaggtagcggtccatgcacactgctttttcctggggagagtctgggatggaagggtatgtgtgtgtttctgagactccttgaataggctccatgtacctatccacccatcttaccacccacccacccatccactcactcacccatccacgcacccacccatccacccatccactcatccacctgtcaacccatctatccactcattcacccatccactcatccacctatctacagtcattcactcatccacccatccactcatttacccatctatccatccactcatccacctgcccatccactcacccacccatccactcatccacccatccacccatctatctatgcactcatccacccatccactcatccacctatccactcattcactcattcactcatccacccatccactcattcacccatctatccatccactcatccacccatccactcattcactcatctgtccatccactcatctacccatccactcattcacccatttatccatccactcaaccatccactcatccacccatccactcatcatccgtccactcacccatctatccacccatgtatccatccactcatccacccatccactcatctgtccatccacttatccacccatctactcacccacccatccactcacccatccatctacccatcctctcatctatccatccactcatctacccatccacttatccatccatccactcrtccgtccatccactcatccacgcatccactcacccatccatctacccatccactcatccacccatccacttgtctactcatccactcacccacccatccactcatccacycattcactcatctactcatccactcatccatctatccactcatccaccaattcactcatccacctatctactcatccacccatccatccagtcattcatccatttgctcattcatccgccaacccatccattcacctgcctgttcatccacctacccatccattcatccatctgtccatccatccacccacccactcacccattcacacacccatacacccatccatttatccaaccatccatccccatccttacttcagaaagcatttgaagttgctggggtgtgcacttggaaaatgcgtcataagctttcataggcctctctttggcttcctcacttctttgattggtctttctttcggacatgcaggattctgagcagctcttctgggaggtgggtgcagtccaggtaggctgcctgcaaagctaggaccgagggagccacatccaaggcactgtgggttcccaaggcgatggcactgtgggcccactgcttccagacctcctcaactcccaggctcctgagcaggaggactcctggggcagggcctggagacgggaagagaaaacaattccagtctctcaactcttgtcagtccaggtgggtgctgcatggattgggggcacctggmacagttggccccttcacccctttcccccacctttccagcccctctggctataatcagacagttgtgtgcgatgtctttctccctcctgaaggggtcatttagtcaggctcctactcatggcccaggaatgtgcccctccctgcctgtccccyacccccaagcaggccgtgcctccagccccctgctstctctgaagggcctgggcatggggcagcctctgcagcatccccagggcccgagctgatctgcacagcagaagggaattgggggaaagctttttttctacccagcacctggcagggggccaccctgttgcaccccagagacccttgtctaagttttgttatttcagatgatttcataagttgggggaggcggagccccagcccccacagcccctgttgttgcctcactgctgagctctgctgtgtatctgctgacaggyctgctgatagcagaaggggctggagagagggaagctctgggccctgccctccccaacccctgcttaggggacatccctgataagaggaaattccagcctgtgacagatggccagtgtccacccacccacgggggaacttttctttctctttgtaagtttgcagatttgccargaactaaaggaatctctggttgacaggccactgtggacatggctggagggctggcacgggctggatcttggggttgctttgaggtaggggccgctcctgctggaaggttccttggggtggggaaggcatcagggccattccctgaccctccctctgcagtggatccacttcagagcctgagacaaggcaagggggcagcagaaaacagaatataaaatagccccccccaccacacaccgcaccagaagtcagaggattcatccttggcctgccctccctgcagcctaagttctgagagtggctctttaggaagtgaatggygatggtttgcaggtcagagcttgctctggcccaagattgatgtctcaataggccgcggagcctgggtgaaaaaactcaggctagggaggtggtgggttgcaaatgaaagaacagaggagggcctcttccagaaagcggcgggtggtgtgaggagcccttggaccttgtccaaatttgactttaccgactggggccaattgaaaccgtgctggcagaaaggcaaaactgcttgagattccttcctccacaatagaggagaggtttgcttgaaagggtttggcgagggaaaagctggaggaaccttggccggcagtaaaagtggggacccccgccccctgcctcgggggcgcctcggcccctgaatgaatgaaagaggaggctggatggagacagactcacaccacctgtcccttccaggtcctgcaaaggarcacacagggttcttgttggctcttccaccttgttagtcaccaagaaggagaaaacaccaacaggggaactgtaaagctgcagttttgtttaagccccatagtggaaaccggaaagagctccagctcggagaaaaatgcagctctttgcctttgcaaatccgtgtctttctctgggaggccagagccattgtgctcgatttctaagcagggtttcagagtgtctcaggaggggaaggcagagtctcagatttccggcatcccaggtcctaaccaggctttgaggagacgcttcctgtcccatacaaagtgtgaagtgtaatttgatttggagttagttaacaaattagatgagctgtgtgcattttaaaaattcagtccttgatcccccacccacacacatttgcacaatttggtcatttatattcagtgtttccatctttagaagagaacaggaagtccccagtgacatttatggagtgtttgtagtagcttgggtaggtcagtaggaacacaatgcagtgaaaagcagagttgagatgggaaaatatcctgttttcagagccccccagggatgacattccttatcgtctctgtccacccgctctggagtccactccgcaaacagcaacttgttctcacttgagagcttcctcctgccggagctcagggatggagagcagctggcctcagtcytctcctcttacctctttgtttctcagactcatcttccaccttgaataattgtttttaacctgctctccctcttctctagctgtagaacccagaactttgtgtgtgtggtcaaaagtttagagagtgctgcaggtaatgctgagataaccctattaaattctgtaagttctcatcacaccaagtttgtttgttttttttaattctcattttattttatttcattttatagggatggggtctcgctacgttgcccaggctggtcttgaactcctgggctcaaacgatcctcccgcctcggcctcccagagtgccaagttatttttttaactgggatccacgggcctagggattctttgatgaaccgttcaaaatacgtgtgtgtctgtctgtctgtcttcaatgtatacttttctagggagagtctttacttttcaccagaggtttgtggcacacacatgtcctgtactactgtatcagattgtgaattccttacatgttaaagactgcttcaaatctgtccggaagtctcggctaataaacatttaaataaatgaacttcaaattcccatgtgccaccactgttttcattctgactactctcaagcctgtagtgtcatctttttgttactgtgaagtagacactcaataaatacttgtcaaatgaatcaatgttatggtcctggtccactaggaccccaggatcatcgtctaccattattgtctatagtttctttaccatcttgttccagagcagttctttctctgaggtctgctcacctctgcacgtgtgtctagtttccagccctgtcgccttaccattctctttcctttacctgcatttcctgaactgttaatagttaacaatagcttctccctccacccactcactcatacctgaagtgagaagtcatcattgaggtctctgtggattttgtcagcccaacctggggcggcctcctggaggtggagttttcagatgagggatggacattttggtgtctgctgggtagatctacctgggagctttggcaggggccccagggcagctctgcctctttattttggctgtgggacccctggtgcactagggtttctcaagtaagcatctgtgtcctgggagagccataggcaggcctgagagggcccctggaatctgggacccccagcccggcccagtagctggtaccatcatctttcttgcaagggaagttatggaaactaagatgctaatgtgctttgataggcctggggtggctctaagccctgggaagagccctggcaactttccctggctggcgggtagaatcttctcctggcagttcagggctctgcctccagctccctgggggagagcaactgagggaggagctggaggccaaggcctcagtgctgagctgcctgcaccgcagctgcaccttctgggtcctggctgcaggaaccccatacttctccagcctttccatggttcccgaagacctggcctggggagggggtcagcagcctggggctcacctacctggcttcaaatcctggctctaccgcttactcgctttgcgaccctcataattgacaaaagccctctcggtctcggtttccttatctgtgaaatgggacaataacagkggctaccttataggattgtgtgatgatccatcagttataatagctcctgagcagcgtttagagtaacacctggggctcggtgcagtggcttatgtctataatcccagcactttgggaggccaaggtgggaggatcgcttgaggccaggagtttgaaaccagcctgaccaacattagtgagacccactctctaaaaaaaaaaattagagtaacgcctggcacagagagcccccagtaaacctcggctgctgtgatgagctttgtttcttcatttgttcattcattcaccagactttttgccggggcttgccgtgagccctacgctgctctgaagaaagccrggctggggtgagcgtgatggatgaggtgtctggcttcacaaaccctgtgtgggggggttgtggtgagaggaaaccgcacacatcattattcagttaccatcgtggggagactgtctggacgcagagagcaggctctgtgtgggagcggggagggcaagccctggttgcgaggcagggcttccccaggattcagcagggatctgaaggactttgcaggcacccagggagataggagaggaggagggagcagccctggccggacactgtcctcctagcattgcctgcatcagggactcactcagctttaagaagcccctttgtgggggacagggagcatctgttagtttataggacctgaagtgcccccatgggctcaagtttctgggaaggcctgcaggtggccgtagggctgccgcaggggtgctggccccagggtctggattcaggggagcctgcagagggagggcagctggaggctgctccagtgtgcattgttacgaggcaaagtaaggagactgctgggcccacrctgggccggggtggatggaggcaaggaagtcttcgccggggcaagggcaccagctgtagatgccggcagctttctcctggacacgggcctggaaggctgacagggtgtggtgagtgccaccggctcccctgccgtggcctggtcagtggcttcacaggcctccgtgggcaggaggaggatgaccttgcattctgcttggccaccattggcagtgacagacaaggtgtgtggggatgtggccatttcggtccgtgctctgagagccaggtgtgggttgggtttggggaagacaggggaatggcattgacttgaccctgagcactttgtcctggggtgcaggcccggctgtcactcccctggagctgggaatggcattgggcggtggctcagggtcccttgccccagcggcaccatctctgcatttggccagcaaggctgatgggacttgtgtggacatttctgggacgtagaccaggcagcatgacacacagggaggggtaggcagagaagggcggcccctgggtcttggtttccaagtcaggctttgcaagcctgctgtgtcaagccctctctcggcaccaggccaggtgggccagggtcagccctggggctgtgatgagtgtgagtgcccctaaagtgtgtcatgtccaatagctgcctcctctctgggcactgcctcccagccagatatcctacagcccccgtcccagccacagacagcaatctgattccctcatcctcggcaggtcctggggttggggtaagaatttgtcactaagtgcagatgttcccagagggtgctggctcagggctgcgtggattacagccctttcatccctgccttagacccacctgcaactctggagaaaagatggcccagtggacgcctgcggggaggagggagctggtccccaggatgagcagatttgggggcagtccccatcacgggaccggtgacctactgccaccagcgccagtgaatggcagaggggccctggcataaggcctgggttcagaatgggaacctgcagagaaactgtcaaggtctcccgccacctgacacctccgcctggctgccaccctagaaacacccttgctgcaagaagatgggggagtttgtctggggcatggtctggcgacaccaacttgagaacctcaggcctaagtgttggcctctgggcctcagctgtcctctgagctgtaaagctggctcctgggcacttgtggaaaacactggactctttattttattttactttacattctgggatacatgtgcagaacgtgcaggtttgttacataggaatacaagtgccatagtggtttgctgcacccattggactcttcaatccagctccactagaaatgactgccttctttcccttcttccgtccctccctcctcccctcccttttttccttccttccctgtttccttccccctccctccttcccttctttcccttcctctcccgtcctcatggggatataatttccatattacaccatccgccgattcagaaagcacagttgagtggcattttttcacaaccttctataagcatcacctctaattccagaacgttttcctcaccccaaaaggaaacgccatcctcggtacacagtcactccccctcccccagcccctggaaatcaccaatctgcgctttgtccctacagatgtacttattctgaacatatgactagaaccctaaaagatgtgactttttgtgcttggtttcttgcagttggaatgttttcagagttcatctgtgttggcgcacgctcgtgcctttttatggctgagaaatagtccgctgtgttgactcagcacgttgggtttctccacgcatctgttggcggatgtgttagttatttctggagccgggtgtgttgtgctactcacgggctgcactaggagctggggatatcactgagtaagccacagcctcgggcacccaggagctcgcagagcaggagctgggagggaggtcaggaggtgcatggcctgtttgccaggctggagagacttgcaaaaagtcactttgagccagaaaccagagcctgaggcctctgactcccagctgcggagccgggagggaagctctgcattttgctttgactgtggggtgacgtgtcagttactgtccaaatcagaacctttctgagagtcgacgtgggtactgctgataattagtctggatacccgaaagaatggaaagcagggacccagacagatccttgcacaaccgtgttcgtagcagggcgaggcctggaggtgcgatggggatctcaacggggcagctgccgtcttgcyggagcccacggtctttggggggggwcacaggtgttaaccgcatatcatacaagcaggagtgtgaaatttcagggttgccaaattcagtgagggtcttgtgctggcctggccacttacagtggcatttcaggaaaaaaaatcactctatggacctcagtttccccattagtaaagagtaggttggactggaattctgtaccatccagtatagttgccatttatgaaatgtggctatttaaatttaaataaaaatagaaattccgttcctcagttggactagctcagtgtcaagtgctcagaagtcacttgtgaacacactgtggcaattcctcaaaaaacgaaaactagaaccaccgtagcatcccataattccacttctgggtgtggattcaaaagaatgcacagcatcttaaagagctagagatatttgtacacccacattcatagcggctctgttcacagtagccagcgggtagaaacaacccgaatgccygcggtcaaatgaatggagaaatcaaaggcgggacaggccgggcgtggtggctcacgcctgtaatctcagcactttgggaggccgaggcgggtggatcatctgaggtcacaagttcaagaccagcctgaccagcatggagaaaccccgtctctactaaaacaaaattagccgggcatggtggcgggtgcctgtaatcccagctacttgagaggctgaggcaggagaattgcttgaacctggggaggcagaggtttcggtgagccgagatcgcgccattgcactccagcctgggcaacaagagcaaaactctgtctaaaaaaaaaaaaaaaaagggtggaacatacaaggaatttgactcagccgtaaagaggaagttaggatacctgcaacagcaagggtgaacctttcgggtattacgctaagtgaaataatttggtcacaaaaggacaatcctgtaggattccacttataccaggtccgtagagtagtcagattcagaaaaacagcagaatggaggttgccagaggcttgggggatggggctggggagttgtttaatgaggacagtttgttttacaagatgaaaaagttctggagatttgttacacaacaatgcgaatgtacttaacaccactggactgcacacttcaaaatagtgaccgtggcaaacgttatgacaattaaaaggaaaagtcacgtggccagtggctaccacgctgagcagcgcaggcctcggacggtgtcgtggtcacagacaatggagtgggtgatctttaccattgtttccagctgtctgagcaccatggtgtcctggggccaggatgaaagtgtctctgggtatgggggtctctgcttttcccacttgggagtcctgaaggcagaccccaaagctcacctggccaggtaggagagcgaggcgggctcttgcattgctctctgcgtgcgtgcctgcctgcgggccagccggggcctgcaaggccgcctctcgagggaggggttgcaggaatggctctcacctgtgcagaaggcmagccactgccctacgtcaatggcaaagatggggctcggctgcgttgtattattatttctcaagcggggcccctggtgggcaggatgtttggtttgatttgagtttctgcagtgagtgctggtgcctgtggagggacccagctgcagctgagccggcccctccctcgctctgggctccaggggcgttgggggcgagaaaggagagttcagggggcagcgcctccccccaggtcctgctggggagggttgagggatgctggggggaggtgggggcgggtaggggctggtcccagtcccaggcaaaatggctctcagacccacaggcagatggaagcgattttcggtcacgtgggtggggactgaactgctgccccgcaaggcaaggccccatgtctggcttcaggaagcggccccaaagccacatggtccatggccagatgcagggctgtgtctttgtttatttaaaggtcctggaagcccaggggagagtatttctgaagggggagcaggagcaggagcaaagccctgaaggcttccaggctgcgtggcctgggtgggggccacgtgggggcacagagagaggagccctggcctccaggtccgcctgtgggtattgctctcagcagtggagatgtgtggacccccccttggcatttcccaacaaggaattatattgttcctttgttcccccaattccataagataggaattcctgtgccctgtggaggctgagaagacggggaggtgcctgtgaggataaaccagcccccagtttctggcttccagagtcttttcctctctcacctctgatgcctcaggcctggggagcctccctccgacaccctctgaccgctccagtgaaataggccgagagggatggcttgaatcggctggggatgcaggctgcagccagggggctcagtgggcatttcctgagttcggttcttgccccgcaagtggaagggcagttgaactgaagtctcccactgcccctcctggcctggaagcctgcctcccaccttctgggcagagtgaggagtgggcgtgggccgggagggctgcctcctgtctgggagggctgctcacttgcctgtcacgggggatgagccccctgcagcctcccgtgctgtggccctggctcccacgccggctccactcccctgtggctgcccctgctgggtgcccaccggtcccagggaaaagccactcccctcccggaggactggmgggaggggccctgcctgggagcgtgcygtgtggtccctgtcttagcgcaggatgcctgaggccagatcctccctgggaggcaggatggggcaaaagtctccccgcaggcagagcagggcctggatgggcccaagcagggacgggggcacagaacagcagccgcccagcctgcgtgggagctgagggccaccaagggcagctccagcctgtggggactagcagaggcaccacctctgtgaccagcgagttgtctgcacctgcatgcgcatgcaccagtgagtgtggcgagtctgaggtgtgctgggacctggcccgtgtaccagccagccctgatgggaaccagccccatcctgggtacccctggaaccccactgtgtgggagcacctgggtcctcagcaggcgtcttccgggcgtccgcccccagccccaggcctctgacccgtgtgtggtgtcttaacagcagccaggagcagggccatcgaagggacctacagacagaagaggctttagtgatttcgggaagttcagctccacgtgccccacatacccaagagtaaaacttggtcttggcctgtgggtgtgcagcccgtgggcgctggccaggcacacaagacggccgcctgggtcagtccagggggaggcagatgtggtgcaggggcccccctcctccatgagcccaggaacagctctgcatccaggcacccgccctgcacccagcacttttccttctcccaggactgctggctcgttctatgggattgaacacacaactccatggggaccgacgctggttctatccccctttcttacaagaccatccatggggatgtgggaggcggggacacacgctggttctatccccgtttcttacaagaccatccctcctgtgtcttggctcgtggatcggcttctaaggcctttgagtggcagcaggcggtacagcttatctgagtagaggtgaaggagagggccaggtccacctgggtggcccgaggcagtgtggagggccaggagaggagagcaccctccacccttgtctgagcagccctccagggtacggagacaggagttcagggtcagccctgccttggagcgcagggggcccccagcttggcacagctcctagaagaggagatgaaaaagcctggccttgggagtctggggatggagctttgctggggaggcagcgtggctgcaggatggcagctttttagaggacaccacggccagggacatccacccgggggaattctcaggggtcgcctgggcaagtcgcttagcctttctgagcctcagtgcctcagtttccccatccaaggatgggtgtgacaaccacctggcaggcgcctgtgtgtgagcccctgttccgctctaactcctctgctgttccttccccagccactgaggcggctcccagctgcgttggcgacatggccgacacccccagagatgccgggctcaagcaggcgcctgcatcacggaacgagaaggccccggtggacttcggctacgtggggattgactccatcctggagcagatgcgccggaaggccatgaagcagggcttcgagttcaacatcatggtggtcggtgagtcctcaccttgcatgccactcaaccaatgccggaaaccagcctcagcccccagggcggyccacaagcctttgggcttggtcttcccttctgtaaaatggggcagcaaccctgacctcaaggacggattgccagtgacattgcgtgtgcatgcatgcgcctgggaggagcccacagcctccagcggctcctcagaggggcctgtcctgcacatccagggcccctgagatgactttggggagcccaggccggcctggagcaggtcctgatgagyggtcgctgcctctgagcaatgacgtcagcttgtgcagagggttctgtggcagctgtcccctcactgttgctccagcctggccctccaggctccccaccgcaccccaccgcasccyggccagaggcttcccagcagctcagcttcagctctgccctggaattggggcctcgtggcttccacaccccctggtggccccggagagctggaggtcaccacgggaggtcgtcgatcagcacgacctgggcagggtgagggggccaggctggagtctacagtgggccgcctgttgtttccaaagccccccaggtcccattcaaacctcacagggaccctgtgaagggggcgtcccgttttccaggcagaagcgaggctcagggaaggctgccaaggttccttagctcacagggcagagaaccgcagccaccgttttgactcccagaactgtgttctgcccactccacggggtccagggaggggtctggggaagtgcccccgccaggtcacaccctaaacaaaggtgagcttgcggggtttctgcaaggtgtctgggcacctctcaggccgggcctgtttctctgacctttgccagccgtgcacgtccttcctgcccagctctgtggacgcaaacccacacctgccagcccgacacctttctttcctcttctgcactgatctgggccctggctcccctggggtcttggtgtcctctctgcttcctgtagcctcatgggacccggctgctcayggccctgctgtgctcacagctgcctggaagctggcagcctgcttcaagggagggcggaggtgtggggtcccctcctacggcccccaccctgttctgcctgttgtgggggacgtgcttgtaccctgaggattcagggctgcctcccgggaagatggctggagagaaagagaggggagaggcccaaaggcagtggccaggctgggactcatctctgtgggctacggaggggctgccctgctccctagccagggacagggtgagaaggacctgggaacctctgsgtcccagccatggcacaggccttcttccggagctttggccccaaggagagggagaggcagcccagcagccctcgccttccgtggctgccactgtgacagccttgccctctgggaatggtgcgcaggaggccacttcacctgtctgggcctcttcgccctttcaaccctgagaagaacagtggtcctgattccccacaaaatcactccctcccagggatgccgagtgaggaacaagacgtggggcagctctgctctcctccctcctccctcccatggcagctgtgcccacctgcagaggtgcaggcaaggtggaggggcacctgtttggaggtccacagaccccggggagaatcccagctttgtcctaactcagcggggtgaggcytgtgtgtcttcccctgggctcctcctctgtgagccttagcttcctcgtccataaaatgggatcatcccataaagtgagatcaagcgagctaggccccgggcagggtccccaacaggttgtggttgttcgagaakttgcagcagtggtgatggtggttgtggtgatgaggatgatgggggtggtaatgacggtgatgatgatggggtgatggtgatagtggagatgatggggatgatggtgatggtggtggtggtgatagtggtgggatggtrgtggtgatagtggtgggatggtagtggtgatgtgggtgatggtgattgtgatggtggtggtggtggtgatggaggtgatggtgatagtgatcatgagggtgatggggatggtggtggtggtgatggtgacagtggtgggacggtagtgatgatgtgggtgatggtgatggtggtggtggtgattgtggtggtggtggtgatgatggtggtgatgatggtgattgtggtgatggtgatgatggtggtaattgtgatggtggtggtggtgatggtggtgatgatggtgattgtggtgatggtggtaattgtgatggtggtgatggtggtgatggtggtgatggggatgatgatggtgattgtgatgggggtggtggtggtgattgtgatggtggtgatgtgggtggtggtggtgattgtgatggtggtgatgtgggtggtggtggtgattgtgatggtggtgatgtgggtggtggtggtgattgtgatggtggtggcgatggtggtgattgtgatggtggtgatgtgggtggtggtgattgtgatggttgtgattgtgatggtggtggtggtgatgatgatggtggtgattgtgatggtggtgatgggagtgatgctggtgattgtggtggtgaagggggtgatgctggtgattgtggtgaagggggtgatggtggtgattgtgatggtgaaggggcgtgatggtgattgtgatggtggtgaagggggtgatggtggcgattgtggtggtgaagggggtgatggtgattgtgatggggtgaannnnnnnnnnnnnnnnnnnngatttgtttgtgtgtgttgtgagagttgtgtgtgaggtatgtgtaagaggtatgtttgaggtgagttgtgtgtgtgttgtgagttgtgcatgtgaagtgtgtgtgttgtgaggtgtgtgtatgaggtgtatgtgagttgtgtgtgttgtgttgcatatgaatgctacttcctcatcctcgtttgtctcagtcacctgtggactggctgtctgcacacacgggcactgtccctcgagtggcaccaccctgcaggccagcgccccctagcacatggccccacagaccccatgggacatgcgtkagcctgcctgatgctcacaccagctccacgggggaaggactgtttatcccattttgcagatcaggaaactgagacacggtgaggtcagrtgacttgcccaggccctggccggtcagggaggagcagtttgaacacctgggctttggttgcaaccaccctggtgaactgcaggaatcccggccacctggtgcaccctgggcagccctgggctcctccgccagcccggcctctgtcctgtccaaaatctgagccaccaggagacctcctgtccagaaagcacaaggggcacaagagatgccgactctcccaggcccggctcacctctcaggagaggactgtggcctgggttgtgctggcatcagagcccggctgtgtgggtttacacagtcactggacacccggctcgagggtgaagtcctcgggggctgcttggcagggatattgccgggaggtagcccaggcactgctgaatctcagactggagagcctcgtgcctgggtgggaggggccccatgtgcagaccctgctgrtctctccggagagacccctgaccggcctcccatcctctccccagggcagagcggcttgggtaaatccaccttaatcaacaccctcttcaaatccaaaatcagccggaagtcggtgcagcccacctcagaggagcgcatccccaagaccatcgagatcaagtccatcacgcacggtcagtggccgggagtgggctgggggtgcaggacgcccctgccttcctggagcacaggggttgggggtcaagaccatcacacacagtcagtggccaggagtgggctggggatgcaggacgcccctgccttcctggagcacaggggttgggggtcaagaccatcacacacggtcagtggctggggatgggctggggatgtgggatacccatgccttcctggagcactggtgcggtgtgagggtgcccgagtcaggcaatcccaggtccccaagacggggactcrctgtgcccaccatccccagcatgttgagcatgttggggctctggctgtgatgggtcagtgtcccggaccccygtgggccccgtcacactgagctccccacagacaactgagttttccaccaaaagtctgacaggcaaggggctcccaggggaacygtcaccggcctgtgccggagttggctgaggaaggccattaatttccggtgtctccttggttgtcatcgctgcctacctggggttgccccggggtcagtcaggtgtggggtgtctgtgagggtcttccgtctcccctctgactctgcgtccgtggctctgtrcagatattgaggagaaaggcgtccggatgaagctgacagtgattgacacaccagggttcggggaccacatcaacaacgagaactggtgaggcccctccagggggaggagcactagcgggggcttcagggctccctggaccccacccagagtcagccctagaggtttcccggcccgcgggggtgcagggcccacctcctgggacctgacatgctgccaaagccgcacgtctcaggggcctgaaaattctggaccaaagcagaattacctggggaatcttgctgtccccaactcatcacctgaggccagcccggggaggctggtttgggaggccgagggtaaggctgtggcatctccgctcagcaagccagacctcccagggcrtgcatttcattggaaggtggggtgttgggctctgagtcctgggaatgcacgacctrcttggggagggcatctcatgtgccyrctgactcgtmcccatcccccacgcagctggcagcccatcatgaagttcatcaatgaccagtacgagaaatacctgcaggaggaggtcaacatcaaccgcaagaagcgcatcccggacacccgcgtccactgctgcctctacttcatccccgccaccggccactcgtacgtccctgcagtgtcrgcgtcctcatgccgggtgccctgggttccctctgtcccctgggactgcmagacggtgctgtctgccctgctgctgggtgcagaggggctgagtcaggggccatggccgccagctatgaagttgggggtgtgccatgtctgcacctccaaagcctcacactgacccctatgcagtgtcctgcccagcccccatccttcagctgcgtcttggggagctgagggtcaggcaggccctgggctgttctggagcctggtggtctgtgtcctgccttctcaggccaggctctggcaggtggagtgggagcccccagccaagcacccgtagcggtgactgaccttctcatccgggccctgcctcatgggaccccttagagggtttggtgcgttcttagacgggaagcacagagatcagtgctggccccttccagggctggacggggctgctgttggtgttggtgagagccctttcctcccgccggctctgtccgcacctgacgtcgcccctagagrtcagyaagggcgggaggctgcatgtaccctggcaggtggactcttcatggcctcacrgaccctctgtcctcagctccctgtgcaccccctgccagacacctgtggctcaccctgagccagggctgggaggaggaggaccagaggccagcaggagtggctggtggaggcagccgtgggtggcttgtctgcatgggtgggtggagaaggtccttcgcacctgctgtcccagatgtacttccctgggcggaggaagcccaggggtttggggaaaccatactctgtgggcaccaggtgcaggaaggagcctggctggtgggcagcgggcctcacccagagtctgtgggaaaacccaagccggagttttcgagcccaccctctggcatcatcctctgtgggccarcaggagtcaggggcagggggccagcycgctgtccatgggcctctcctgaactgaacatctgccctcccaggcagaacggctcaycygcggtcctgtggcagctgttccagctgctccaagctttgcctcagctgaggctgatggcaggaggcagaagcctctcctgatgccagctgggcaagccgagggcgggcgggcggtctgtggcacttctgccactccccagcactgaccctttggctgggactccagctaggcatgttgcctggtcccgcccaaggcgtccagtcccatggggcaggggcgggccttggccatctctgcttaaacttctgcccggagcsggcttctccccagccatgtgtgtgaccgatttattctcactgtgggaaaagctcggctccagaactggggaagatggtgccccagttccagggccctgccagcccctgccacccacagctttccccacatcagaccccaggctcactggggccaagcaggcaaggggagcagcccgcctggtgcaggggagcagcccgcctggtgcaggggcaccgcacactggtgctagcttctatttctcttgcctctcccctcccagccaaagccccacagcaagacggctgctgagccaacgacagcccttctgtgtggacatgtaggggtgtggttgggaccccagaactcatggacgagggtgcttggagctggccctggcccgcctggcctgtgcagtggtgtcacctgtgtctgggacacaccygtgtccttcctctgccccacactcacagcgtggccgactnggcccggkgccctgtccttgccagcagggacccccgtgagccccgagccagcacctgagagtgtcgacacctgcttgggggtgggtgcccccccactgccccgctcccccagatgagcctcacgcacatccctctgcttcagcctcaggcccctggacatcgagtttatgaaacgcctgagcaaggtggtcaacatcgtccctgtcatcgccaaggcggacacactcaccctggaggagagggtccacttcaaacagcgggtagggttccatctctacttgccccagcccttctgtgcaacctggagacgctgcaggcctggcaggggccaccccgtctaaaggagtcacactgtcagggagaccgaaccgctggtcactctccccagcgggtggctggcctggtggtccctggcccaggtggctgctgggggccgtccctgagatggcctctccagctcccccatatctcaaaagcagctttgtgggagtgccaattctccagcagagtctctgaggggsgttttggagaagacctggaccaggcagatggtgaatctctcttccagggagtgaggccgagcaggggccgtgcgacatggcccaccttgttttatgccccccctttttttttttgagaaagggtctggctcagttgccaaggttgcaatgtagtggcacaatcatggctcactgcagcctccacctcccaggctcagtccccgagtagctggaattacagacgcacaccaccatgtctggctaatttttgtatttttagtagagacgaggttttgccatgttgcccaggctggtctctaacccttgggctcaagggatcctcctgcctcagcctcccaaagtgctggggttacaggcatgagccacctcacctcgccctgcctggtttttattagatggaagagaagctgggccaggtgtggtggctcacgcctgtaatcccagcactttgggaggccgaggcgggcagatcacttgaggtcaggagtttgaggccaacatgrtgaaaccccatctctactaaaaatacaaaaatattagtcgggcatggtggcgggcgcctgtagtcccagctacttgggaggctgaggcaggagaatctcttgaacccgggaggcggaggcttcagtgagccgagattgagccactgcactccagcctgggtgacagagcgagactccatctcaaaaaaaaaaaaaaaaaaaaaagtttcaggagggatggtctctgccaccttcttctccgccaccgtcygaggcccctgctgtgggatagggaggggcatccaagcaagagggcagccctgggctcttcctcctgacagggcagcacatcagagccacatggggtgcctttcaaaatgaaaccgaggtgcctgggctgcggcaccacatctgcctcggtgggtgtgggtggggcctgtaacctactccgtcctggggccaggtgtcagggaccttcccagcatgtgcaggggaagacagtccacacaaagtgggtgtgtctgccggaggctacacacgggctgtggtctgtgcctgggcaggcgagcrgccgctcactgggatgtttctgttgcacgtacccatgtcgggctgctggcagggagctgagaggttactgcaggcggggcccctgctggaactggggactgtgacgagggttttttaggaagggtttcaggaggggaggtctcggtaaccctgagtactttcttggggctgtgatgagcaggagaagagaggtgggaggtgctcaggacgatgaccttaagcccctggggagttgcagcgtcgctcaggacagcaggtgcacctgcagctgcccctcttccctccaggaggcacaggagttggaggtgattggtgtcacagccccccagagcctgcccttgaacccgagcctggggcagcacacagtgtggaggtcatgtggcaaacaccagtgggtgggtagagcttgccacagggatgggcccatctctctccctccttatcccagatcaccgcagacctgctgtccaacggcatcgacgtgtacccccagaaggaatttgatgaggactcggaggaccggctggtgaacgagaagttccgggtgagtggatccactaggatgttgttcccaggggacccccagttcctgctgaagggtgggttgggggtttggaggaccttaagccatgaaattatattcttggggccagagggcactgagcccaggtgtctgtacccagtgctgtcaggctgaggctctcgtttttgggggaccycaggctcagggcagctcctcccgggggcccaggggagggaantgccttcccgcacrtgtgtaaccaataccgtctgcccgttccccaggagatgatcccatttgctgtggtgggcagtgaccacgagtaccaggtcaacggcaagaggatccttgggaggaagaccaagtggggtaccatcgaaggtactcgccgcaggcgccggggctccagacagatgggaagacagtctcttctgctgayccagagcctgtgggccacgcctgagccrgggactcgtggaacctcatccactgccttgccccacccaagagggaggggtctccttgtccccattcaacccttgggaaagtgagagggcaagtggcctgtgcagatgcctccaccccagacctccccccgggcagggaaagattcagggagacaggagctgggatgggggccgccaagttctggatcctggtgcaggctctttcataggcacctgtgtggccctggacaaatcgcccaacctctctgggcctagaaaaggggtgggctgtagctctgtgagccagatggaccctcggmcccttrccctgctgaagttcctgggaccctcacaccttagtctcttgagtggctgttgtaaccaattagcacaaacgaggggacttaaaacaacacaaacstattttcacagttccagaggccagaggtccgaaatcaggggctgtttccttctgaggccctgaggaccagcctcatccatgccttcctccttctggtggcgcctggcattcctagttgtattgtaaaggcatcacatgctctaatctctgccccattgtcacagggccttcttccctgtgtctctgtcccgtccctcctcttcctttttttttttttttttttttgkttgagacggagtctcgttctgtcacccaggctggagtgcagtgttgcaatctcagctcactgcaacctcygcctcctgggttcaagtaattctcctgcctcagcctcccgagtatctgggattacagtcacgtaccacccacctgacttaatttttgtatttttagtagagacaggatttcgccatgttggccaggctggtcttaaactcctgacctcaggtgatctgcccaccttggcctcccaaagtgctgggattacaggaatgagccaccgagcctgccctctttccttcttgtctttggacaaggatgcctgtctttggacttagggcctaccctaagtggatgatcccatttggagatccttaatgaatctataaagaaagacgttttccaagtaaggtcacaatcatgggttccaaggcctggaccttgaccatgtctttgaatggatgggagcccctggggggccacagttcaacccactcctggcggtgacaccccgggagggatgggcccgaacgtttccttccccttcctctctctgtcccttcatttctcattagaatggaagaggggaaggtgcagagggaaatgcagcaggaaaagccactttgttctgggagagcacttggctgaaaggcccagtagagcaggaagcacaagtctcttaatcttccagggcctcagttttcatcatccacaaagtgggtgcagtgtgccaagattttagtgagttgagagactgtcccaaagaccacagagctttttgggaagctgttgctctaaaaaaatggtcataatgacaattaccaggaggcatcagacactcctgtgccactggctagacatgggttatctcgtttcatgtccgaagctccccgcacccaccctccttgcagagttgaagaggtgctgtgagcagaaaacctgccaagggacccagaacgggaggcggctctagaatctacagctccagccctgcaccagactccctcgagatgggagttcatgcctggaggagggtgtggagaggcacacgggcctttcccctgtctgcactcctcccctaccaccacccctgccgggcccaccctgcgggagctgcccagctgggtgcagcctgggtgttttccagtatccgcctgtggtgtcaggctggcttgcctccccttggcccctctgcctgcagttcctctcttcctctctgcccaaagagttcttgctgtttaggaaactttttatgaaaggcaggtttgggagagttagggrtggatgggcctgggacgggccggcggctttgctatgggcgtgcctctgctgcaccctggtggccarccttgagtaccgcaggtggccggtgacagaaactgtcaggaaatgcacaagagagaggtccccgcacctctctgacctgtgcgttgttgagcaccactggctccagctgaggaagagtctggaacctgtcaggacagttgtgaggtggtggggcccactttccagcagtcttatatgaggaccctggaaatgtgccttcagcactgctgggtttttatatcaggggccccatgagttcatagctgacctgacacccggactagtaagggctgtgccttgttcttgcctcccacttggtgaacagcatcttgaggtatctttcccatccttagaaaccaccccaagtattgtcaatagaaatgtggggtgtaattgatcacgccatgaactcatttaatcctcatgtccctgagaggcgggtgacgttattatccacattttatggatgaggaaactgagggaatgagagtaacttgcccgagccagggagtggcgatcacacactccaactccagcctgagagccccattcttcctgccggctctcgctgcccgtcagtgttagatgagagtgctgctggtcagtctgcaggaggttctagtgtggacaccgccctacacaggrccgtggcaggagggcctaggcaaaggcaaccggcrtagcactgagagcacttgagggctgggcaaggtggaggccccggccctgcctgctggcctaccaagtaaaaactagacatttttaacttggggaaaagccatgtggctctgcgatggggcagcctggagccaggtgtatgggttctgcatcccgctccagccttatgcactgtggagctgagacagacacagttcttgcgttctctatgcctcattttcttttcttttctttttctttttctttttttttttttttgagacgaagtttcactcttttgcccaggctggagtgccgtggcgtgatcttggctcaccacaacctccacctcctgggttccagtgattctcctgcctcagcctcctgagtagctgggattacaggcgcctggtaccaggcctggctaatttttgtatttttaacagagacgagatttcatcatgttggccaggctggtctcgaactcctgacctcgtgatccacccacctcagcctcccaaagtgctgggattgcagacgtgagccgtggtgcccagcgtctacgccccattttcgtaagataatggggataacaaaggaatcacaagagacacttgcaggtgtgtgaagacgaagttcatcacatgggagggcaccgggtgtctttatttgccttccctgcccggctccccacctccagtgatgccgttcactgccctccttgttaaaaggccttctgttatataacagttacacatgccaggcaccgcgtgttcatataggagttacgaagcacagcaataaaatgaccactctgagatggccaccagctcgagcccgagggcacttgtgggtgcccgtggtctcctgcccagtctccctgagaagtggccactgtcccgagcttgggcttgtatgtattgtgtgaagtgcacrtgtccctgagcaatgtttagcattgctgattcttgagcttgtgaatggtcgtccacagtacgtagcccctgtgtgtgtccctgtgtgtgtgtgctctgagcgcacacaaggtggatggggccgtgggggtaacaccctgtgggccacaggttttctttaaaatcccagctccgattcctgcttcatcccattcccagcagcccagccccctgcctgtcttcaggcccctgctgggacgtcctgctctccctggtcaccccagtggtrcgggggcccactgccctggcttctccactgtggcttccttccatgctcctatttggcctggtcactgtgccatctcccattagccaggaactttctggagagcaggagctgagctgtccaggagcaggagctggtgctggtcactccagtatcccccagactgagggcagtgccaggtgtcctatactcagctkcagagcaggtggttcccctgccctcctgcccatggggctgccctcagactctgcttttggcaccagcatttctgggcagggggagagaggtggggtccgggcagagtttctccactgggacattaaagcccctcctgtctcctctcctagttgaaaacaccacacactgtgagtttgcctacctgcgggaccttctcatcaggtgagagacagggtgcttgggtggggctgacggcttcacccctaagagggccctacagcgggtgggggcagtgggtgtggggccgaagccctgggcagagtgggtgccccctgccacctgcctgccctgccctcgggaagatcttggaagcccatcttctgaaaaagaaaacccactgggaaatgaagcaggcagtgaagatccttttcaacccctgcgaagttggctggatgggarggctgagctttgatccactgtggtctggcccgttagagctgcccggtggccactaagggcccagtgaggcctcatgtgcaggccctgccggcagcgtggggcgtctccagctccgatcccactggcctctgacccctacccctttcacctggctgaggcttctccttgtttcccttgagtccaggcaaggaggggaagccctgatggagagggtgctgggtgggtggtccctggagtgtgggccctggcctgggcaggttcttcctcagcaagcagctggcatggatgatgggartgttatcaagaggaggggcctccaggttggcgggggcaggggtggggggattccgggagccgttctgccattgtggggatactgggctttccaacctccctccagattattcctcctgagctgcagaggaatgaaaatccgagcccaggacttttttttcctggggacaagggcaacccagccctttgccccaggccacctgcctgccacaggccatagtcctggaggccggtggtcacccactgcttccaccctgccagcaccctggacaccggcctggagcaacaaygctccagccctgtccctctgagtctatgcactgtccctgggccctggacccagggccatagggtggacccagagggagacacatgcactggaatatgtgtgttctgaccgagtctgggcttaccagggggactgacccttcccccaaaacgtgtaccagatctggtccaacatggtgggcctgggggaccccatggggagccaagcagtcgggatggggagtgggggtgggggcacttttctttcttttgtggttcgatttagtaaagagaataaatggccgggagcggggagctaaagaaggattgcgcgtttctttctttgttttgttgtttgtgtactcctcggatcaatacgcaggcgtttcctcacttccggcttatccctttcgtacgtataattgattggttctgtttctcgtaatagtattaatttgggcgatgcggcatgcttagtttggctcgatgttatgattttgttttctatgtctatctttgatctctatctataattttttactctttttctatgttaatatttttttgtttttttactagataacatcttgtgtcgtttcatactggcctgtttaactcttgtctacctatttttactattctatctctccattggcgctatacttcttctatttttttatcatttttttatattttatttctttatatcattacttttctctttcttatacctcggtctccattacccccacccccacaccgaccaacgttacttattaatcgtcctatacgcgatctatgtggtcacgtacggccttgtggctcccctgtctttcggtttttgttgtttgtttcttatagcccttttcttctcaccttcctcatcctgaattagtcgtccgccgacatgtaaaggcggtcgatactctaacgacgcgcaccccgaacatagcgtacgatgcagtaattgatctagtactgtaataaattnnnnnnnnnnnnnnnnnnnncccaccccgctgcgcccacctcactgacccgcccgccccccacccccacaggacgcacatgcagaacatcaaggacatcaccagcagcatccacttcgaggcgtaccgtgtgaagcgcctcaacgagggcagcagcgccatggccaacggcgtggaggagaaggagccagaagccccggagatgtagacgccaccctgcccacccccgggatcctgcccccaagtcatttccgtcccccccccaggccctcccaccaccccattttattttatatgattttctccatttgtcatcgttccrcaccccttcgacatgctgccaggaaacaagggaaggggcctccctccgagtgagtcagtgatgaggccgcggcctccccgaggttgtggggaggctgcactggagccacaggcaggggtgagagcacccactgaattgacatgaccctctgtccccaggcctggctccccgagggctcagaagagcagcttcggtgtgcagatcatccgtcygtgtggggttctcagtgccggaggccttggggtgggggccaggcctcgcacktgcagaggagcccagtgggctgcacgctcccctccatccccatcggccctgtcccctggagtgtgtcagagcccaggggagaatgcagcccaccaggagcacctggaccccctgcccgccacatggtgtggccatcactcagcccctacccctgccctgctcctaagggtagaaaactccagggtcccctgccaccgactgcccagccactccaagccccctggcagctgcccctcctggagcagaaagtgcctttatctcagccatccgcagactgctyggccagatgcggggacaggctggaatgagggaggcgtcttcatctccctgccatccccctctcacgccacccccgcccccacygggctgcaggtgctgctgatgcgstgggatctgattgaggatraaaagraaggagagatgacccctaccccctcatcccccagttttgaaaaggtctaagcaagtgagtctggtggaggagctgagggagggagcyatggaaggtgccagaaggaaggttggcgggggcacgtgtgggccgtggcttgggctggtcagrgtggcgtgagctgccyggcgcctgccctgcccaagtgaccagggaagtgtgtgtgtgtccatgtgtatgcgtgtccgtctgtctgtctagtgtctrggtttggcccaagactgggctgtagttacattaatgcccagccagccacccctgccactcacccytcctggcccaggccttgctgactctctgagctggggaggtgggaggccaggcgagcctgactctgttgatctacccgtgcctgggcccctcccctcagagcccatggtaacgaacccctagaaaggagagaacgggcgtcaggggtgcacagtccacagctgaagagcaaggtttcgtggcagcacggcccggcccctcaccctctgtccccacgaggggacccatgggggctgtctttgcagggcacagatgaccaaagtcccttcctgcttcctgttacctgtcttgctcctggggagaaagaggggcctgatgagactccactcaggtgcacacatcaccaggtgcatctgcaggcaccgggctggctgcttgcagccaggagaaggtcagcgagaaggagtgtatgagtgtgagtgtgtgtgcatggaagttggggcactgggcgtctgactccctccccacccaagagaggaaggacccctcaccacccccactggygagacagtttactttgccracttgccatgtttttgccaaaaccaagattttgaaggaaatgagtggccagcgccagggcccaggccatgtggcctgcccagcctcaatgtcacttggyggcggggtggggtgggggtgggcagcagcatcccagccttgagatgcttcactttccttctctgtaaccagactttgaaaaattgttcgtttcatcaggctctgttcctcaatggccttttgctacgtgcctcccgagaaatttgtctttttgtataaatgacaaagtgttgaaaatgtatttcctgaaataaatgtttcaaatgcagaaacccagaaggctcctgagtgagaatgttttttctgcccctgaagtgcagttctttgggcctcgggacaggttggggtcagctgcaggtgggcaagaagcatgggcaagaaaaggtaggccgggygcggtggctcacgcctgtaatcccagcactttgggagactgaggcagttggatcacaaggtgaggaatttgagaccagcctggccaatatggtgaaaccccgtttctactaaaaatacgaaaattagctgggcatggtggtgggcgcctgtagtcccagccactcgggaggctgaggcagaagaatcgcttgaaccccgggaggtagaggttgcagtgagccaagatcatgccactgcactccagcctgggcgacagagcaagatgccatctcaaaaaaaaaaaaaaaagaaaaggtaaggccaggtcagatctcgaattcagactcccaagatttgaaactaacaaactccctgagaacttataattccagagcactgtgaagagtgagaatagcatcaaggcgattgctggggcgttgtttaatctacctggggtaaaagttcccagggcttgagaagcactcagcggagatgactgaaaagtgaatggcagatctgaacgctttcattaaagtgggggatctgaagggcgtccacagggggcgctgtgagctgcttctagttagtgtatccttgaaaataactttttctgttttattttttgagacagggtcttgctctgtaacccaggttggagtgcggcggcacgatcacagctcactgcagcctctaccttccaggctcaagcgatcctcctgagtagctgggaccacaggtgtgcaccaccacacctggctaactttttcattttttgtcaagatgggatctcactatgttgcccaggctgatctcaaattcctggcctcaggtgatcctcctgccttggcctcccgaagtgctgggattataggcgtgagccactatgcctggctgacagtaagtttttcttttagaaatttatattagattgaactccagactggtcagtatttgacagttgttttatgccaacctaactcattccaagagaacttgattccaaatagattagaagtcagagccttggctgagtgagcttttctttgcaggtgagcttaggaagtaaggttcagggagctctggtccgtatgccctttgcgtgtgcagaagggcctcacccggatcccttctcccacgtgtattagtgccctgcagctgccttaacagatgaccatgcagcagggctgaaaacagcggaaatttattctcacagttctagaggccagaggtctgagatccaggtgtcccagggcctcgctccctccaaaggctctagaggaggttcctctctcctcccccagctcctgctggccacttcaccccatctctgcctccgtcttcacagccttctctctctctgtcctggagggtcaagagggccaagagggcactcttccaggactgagggcccaccttgattcagttcgatctcatttagatcctcaccttcatgacatctgcaaagacgctcttttgaaatcaggtcacattctaaggtctgaatggatgagaatttggtgaggtgggagacacggttggaccccctacatccccttccgccccgctgtttcaggacctccaggacaacatgggcagcagagtggtgggtgggaaagccctaatttgggactcggaaggtctgggttccagggtgactctgccaccaaaacttggggttgtctcagcctctctgggcaccccctggctcttctgccaggcacctgacttctgcatgttttggagaaagcagacaggttcctctctcaatgaactgatgggcgttggcccagtggagcctctgtgccatgggccggtgtctgccatgagcacaggcaggttgagagtcaggtcagcccctgtgggcggctgccagcctgcagcctgattccaaaagagggtctttgcagatgtcattaaggtaaggatctaaataatcactaaggcccttccagctgtgatggctttgtccatcccccatctgaagttcctggcagtycctctgccttgaagccctcttcctrcagactgaagtgtctccattttcacccccaatttccatccttgcacacagggagcctgtccagyggctgccctctttgggaccgaccaccctctccaagtcctggcctcagaactccagctcctccccacttggccagcatgatcctcccaggcgtctcgtgcctctaagccatacccagccagccccctgccccctacgccatggtcatctcattgaccagaccaaccccggtacccagccaccctgcacggcccatccagcgatgctggcagggagggcctcctgccacccaaccgagcaagtctcctgctgtagaaccagagtgaccactgttacaatttgcctgaaaatgagcgctttccaagcacacaggactttcagtgctaaaatcaggagagtcctgggcaaagtggacaagttggccactctgggtgggatccccgtgccaccccgccgcttctcctgcctctgggagccctggcctctacacttgttcaaccccagaggttctgaaggagctgcatggaccaggctgtccccaaggagagacccagggagagcaggaaggccccargaacaggcaccattctcacactggctctgagctcctgcgtgggaagtggggaatctcgtgggggctgtggagaccttgtgtccctgcttcctctcctgctccaggcggcaaggtttgaagccaggaaagaaagtaaaatcaacaagcaggctttgggcttttccggacccagccttgtaggagtccctgcattctctggagctcaggggccaggtaaggatgctggcaggtgggctccactcagctccacctggatgcgcctgggagaaagccggatgggaacccagtgagcccactgggcgggggctgtgcttggcacctcctcttagatgtgcatgtcctttctcctattttattttattaatttttttgaggcagagtctcactctgttgcccaggctggagtgcagtggcgcaatctcggctcactgcaacctccgcctcccagattcaagtgattctcctgcctcagcctcccgagtagctggrattataggcacccaccaccacacccagctaatttttgtatttttagtagagacaggatttcaccatgttggccaggctggtcttgaactcctggtctcaagtgatctgccctcctcagcctcccaaagygctgggattacaggcgtgagccaccgcgcctggccaactctctcacattttaaaacactactttctgctacaaaagtggcgtgtacaatgggaaatgtcacaaataaataccccaggaagacactcaaaagcccctgtgatgcccccccagccctggtcctggggtgtcggcctygggtctccctcctggtgcggcatccttthaccactgcagttaactgggaggaaacgatccccatgcattgctctaaatcccgctggatctggttttgggggtgctgggctgctgcccaggagactggaaggggaggaaggtgtgtggcccctgagggcttccaaagcactctgtgctgtgaggatcccaccccgtgcgctcccagaaagtggccggtgtttttctgctccagcagggagcccaggtgaggttctctaggtaggtggaaaggtaggtggagcaggcttcaagagcagaacccagcagagcgccccggcttcctcccatcgccctcctactccctctcctcccctctcctcccctcccctcccatccttttgkaagcaaggaggggagaggcttccaccgaagttgggcccagctcaggtgtcctgagtggtgggaatctgtgcagggcccaggcgcatttcctgcccsggagcaggaatgctttacagatgttggagctgcctcaaggcatggccaggaggggccggagaagcagaaccagctgcataggggatgctgggctggtgcctgcacatggaacagtcattgattaaaatgtcacttgtaaggtgcctaaatcttcgggtcctcctccttggagagtcccaggtaagctgcgttccctgggctgattccaggctgggccaggcggggctgggctgcagacctctggggactgcctacccaaccccacaccaccaggctccctgctcctcctgaaggccttggccttcagtaaaatgcaaaaagttaaatgctctgggttttctctgataatagaagcaatgcctgtccattgtagaatgttgggaaaatagagaagagcaagagcaacaacaggcacggaactccacccctgccggtcagcctgcctgtgcgtgggagttaaaacaaaacgcttctgcaaacatttggttttttttgtttttccaaaattaagctccgattgtgcatatcacttgataatcgaaattattttttgaaaaataattttaatagctatgcagtactccatcctgtcaacatatggaatgaaatgatgatttctaaattcttactcttgtcacctgggctgcagttggaggcctggtgggggtccgtgcggcgactggctgggccgtccctgtccctcctcccagatgacagaggtgcctggtgtttggcaaactcacttagaaggagcaagaagcaactgggatggctcagaagcccatggtggaatagtctgttgtaaacgaagagacaagaggaggccgaggactggtttccccttctccttcccgctcccagccctcccctctttcccatcgagtctctggtctctgccttcaggcccatggatgggcaaagcatctttcgagagcttgcctgccaaccctcagagtcacatacacgaaggtctcctggagctcagaaggtcagrcacaaagtcactccttgaccctatttattgaaatatccgtttttttgagcacttttcccgtgtagactcaacagggtctccctctgttgcccaggctggagtgcagtggtgcgatcatggctcactgcagmcttgaactcctgagctcaagcaatcctgctgcctcagttctccgagtagctgggaccacatgtgtaagtcactaagcctggctaattaaaaaaaaaaaaaaaaaaaaaaaagtaggccgggcacagtggctcatgcctataatcccagcactttgggaggccgaggcagatggatcacctgaggtcaggagttcgagaccagcctggccaacatggtgaaaccccgtctctactaaaaaaaatacaaaattagctgggcatggtggtgcacgcctgcaatcccaggtaatcccagctactcaggaggttgaggcaggagaatcacttgaacccagaaggtagagattttagtgagccaagatcacgctactgtactgcagcctgggcgacaagagcgaaactctgtctcaaaaaataaaaataaacaaattttaaaagtagaggtagggtctctctgtgttgctcaggctggtctcaaactcctggcctcaagtgatcctcccaccttggccttccaaagtgctgggactccaggtgtgagccactgcacctggctcagcttggcatttcttgaatttgggtccatgtgaaagagtccaggaggtcattcctcacagatcgcttattgaggaacccctcagaggtcagagtgggggtaggtgaggggagagaggggctgaagggagatgcaaggggcccctgggatggctggtgtcagtcccaggcccggggacacagccaggtggagagaacgtgcgatcggagcccaggggctgggctagaggcctgctttgctgtgtgtgcttgggcctggggttaacggttggagcctcagtgagctcatctgacagatggggatgaggaccagcatgtagtcatcattcaacactgtgggggagagaggcaagaaggagccccccggggcgggatgaattctgacccaagccaagagccaccgtggggccagtgcccacctgcaccaggttctatatccgccatcacattagctcccccgagagccctgaagggtgggccgcgcctgctccttttccgggtccactgagcggctctggagcccgggtttgtgtttagccgaggctctccccgctgcaccctctgccttctgctcccagcagggcgctgcagcatcgtccggttttaacagggtgaggcggctcccacagacatgtgatgcagaaagtcctcgacacccccagccagctctccgtgggtccagtccagggccctgccccacggcgcccactgctgcttccaggcaagcctcagattccactgggattcggagaagttgcagctgattcaatgctgagagcccatcagagaaaacatcttccttccctttcaaagaggacagctatgcataatcagaatacaaaggggtataaataattaaagcggcccagagtgagtggttcttgaaccatctgcctgatttacaaactaattactcagaggctggtcgctgcacgggagctgtgcacgctcctcaggacgctcaccgcctcctcttcgggcaccaggggtggcggcatcggcctgatcagccagtcctggcacgtagagcagtgccacggcctcctccatctccctgattaataacttcatcagagcccgggaccagaaggaaatgtaagtcctctgaaggaaacggccacacggaggagccagcagcagtctctcccagcagatgagctgggaggtggggacccagtctcaggcaggtgagtggagccccagattcaacccaagggatgacccattacaggggctcagcaggacctaaggatctttactctttatctaagggtccaaggcacactctccgcatacacccatcaccgtgtccctggagggagggaattggatctctgctctgattcttctgcaagaagaatcaccaggcgtggtggctcgcaactgtggtcccagccactcagagggctgagacaggaggatcacttgagcccaggagttcgaggctgcagtgagatatggccacaccactgcactccagcctgggcaacgggctgaccctgtccagtctacatgggaaaagtgctcaaaagacagacatttcaataatataataataatagttatattctgccctgcaggggagttgaggaatcctgcaggaagcccctctcctcatccagcccccatcccttgcccttccctactcctcttccttggagacttgcctggaccrtcagyccctgcacagcagcctgggaatggggcagggtggggtcaggggacagaaagaccctgtcctagaacaatgaaccctgacatttgcttggcacagattctcatccttgtgttccctctgaagagggcacatcaggggctgctgctccacttcacagatgaggaaagagaggtcaagaaggttcaaagtcatgcagtggagagtgtggaggtgacctggactccagacttcctccttcgggagctttatgttcgggtgctgcttggggacagctcttcctatgcccccaccttctctggaaggcagccaggactgaagcacggccacctcacaacgcatcatgctgggacatgtagggtctcagagtgaggtatgtgtgtgcatgagtgtgtttatgagtgcgcatgtgagaattccgataaatgcacacaccctcacagcacaagatgtggggaaagacatagggtccaaaacagcccaccaggctgtgccttgtgtttgtgggtttagccctgagtggggaggtgttgagattagctgcactcttggatgagggtggagaggtgctgccamtgccactgcatggcacccagctgtgagatgacccctctgttggcacaggcagagttacaaaatcagcattgcaaaactgaggaatgggaaccagggacatccatctacacacatcaaaatggttaaaggggaaaaacaaacacactgtccatttgcaaactgcctgcagttaagccctcagtgagtcaacccttcaaggtggcatcagcaggggagaaaatttcagctccaggctctctgggtttttcttatctccactgtactttcctaaagcctgatttcttttaggtaatgcgcatcctcctctctccatcatattttctttgtaagctcttagactgtgttcatttgcaaaggtcatcaaagggcagttttctctggagctggttttgaatcctggttcttctacttaccagctgagtgacttcagatgggtgacttaacctgggtccatgcctcagtttctccatctataaaatggtaacaacagtacccaattcacaggattgttatgattaaatgagttagttcacgtgaagcacttacaacagtgtctagccaatgagtgtttcatagatgtgagccatcattatcaccattgacatcaccgccaccatcatcatcaccatcatcatcatcactgtaatcactatcaacattaccatcatcaccctcactatcattatcatcactatcaccatcaccatcactaccatcatcaccatgaccatcatcatcaccatctccatcatcatcatcattgttatcatcacatcatcagtatcatcactactatgatcgccatcattactaccatcatcccttcattaccatcatcaccatcattatcagcatcactatcatgatcatcaccatcaccatcatcaatatcattactactgtgatcaccatcaccaccaccattatcccatcattatcattttcactatcaccatcatcaccactaccatcattatcatctcatcaccatcatcaacaccatcaccatcatcatcattaccattaccatcatcaccgtcactattattaccattatcatcatcaccatcaccatgatcatcaccattaccatcatcaccatctccctcattatcatcattatcattatcatcacttcatcagtatcatcactactatgatcaccatcaccactaccatcatcccatcattatcaccatcatcccatcattatcatcatcaccatcaccatcatcagtatcatcactactgtgattaccattaccaccatcatcccatcattatttctgtcaccatcattatcaccacaaccatcatcatcaccatcatcatcaccaccatcaccatcatcatcaccaccatcattagcatcacgatcatcaccatcatcaccaccatcaccatcatctccatgaacatcaccatcaccaccattaccatcatcatcactactactaccttaccatccatgtaacgtacctactgccttacctagcaccatcaatgtcaccataattattatcatcaccatcaccatcatcatcacgattatcaccacaaccatcaatatcatcgtcattttctccatcatcaccatcaacaacatcctgaaactgaaataaagaaaaaggccctgctgtggcctcatcttgctcctctgctctggaatcagaaggagtaaaaaccagccaagtggagggcagagctgacagcaaaggagaagctgggctgtttgctgcccaggcctggctggcacccctcctcctgggacgtagcaactttctgagcatgtcctcagtacgaggcttccctgcactgcttctccctgaatgttcacaatagtcccacggggcaggtgccatcacggtgaagttgaggtacagagaggtcaaggagcttggccagggtgcacagctggtgagggactgagtcaggatgtaaaacactgtctgatctgtggtccagtggcatccactgcacttcactgcccacagtaggggtgggggtgggggtggcaggctccctgttgcctcagactgaagaagtgctcaaggctggctctgtgtactgggacctctctcctgggccatgaaccacagcatctatttttaaatgtggagcacctattcacggaggcagcaccatgctgggccctggaggaacaaagcaggcaaataagtcaggactctgaacctgtgggcggccggttgggtggggaggacagacatgtacacagagcatcataatacaatgaagccagtgccatgacagaggtacatgggggccacyggggaaggttcccagaggaggggcacctacccttgttggcagggccagtgctgagtgtcagttacgccctttatattctttataaattacacaatcttagatttttttttttttgagacagagtctcactctgttgtccaggctggagtgcaatggcgcaatctcacctcactgtaacctccgcctcctgggttcaagcattctcctgccttggcctcctgggtagctgggattacaggcacatgccaccccgcctggctaatttttgtagtttttagtagagatggggtttcaccatgttggtctggtcttgaactcctgacctcgtgatccacccaccttggcctcccaaagtgctgggattacaggtgtgagccaccgtgccctgcctcagatacttctttatagtagtgtgaaaatggactaatacagtatgcattcattgagtttcttggatctattggctgatctttttagattttggaaaattctcaacaactattcctcaaatatttactctgccttatgctccttttcttctctttctggtgctccaatttcatgtatgttaatatttttccacagttcttcaacactctgttcttttttaaatttttattttgttaattatttttctgtttgaattttagtttggataatttctattgactagtctttaagatcctttcagttttattgatcttttcttctactgtgttcaatctgctgttaaacccatcaaacaaactctttgtatctaatattacagttttcatctctagaatttccatttggttattttatagtttccatttctgtgctgaaatttcccatctgttcacacatgctgtctacctttcccactagatcttttaacatctctattttagtttatttaaggtccttgtctaataattccaacactcagtcatctgtgggtctacttctattggtaatttttcccctgattattagtctcattgccctgcttctttgca

SEQ ID NO: 94364 - DNA, 15964 bp, Homo sapiens
ttcttcaccaataaaatacagattaatacctgtctcacagaatgcataagtattaattacttcttttctgatgtttcttcaccaataaaatacagataatacctgcctcacagaatgttgtaaggattaagtaattacatcaagaacttaggacaatatctatcatataacaagttttcaataaatagtagctgctattattacagatcatctccacctaaatgtcccatggatatcttaaactcatgttgttcaaagctgaagtgatcttatctcttctatttctgctactgacatcactctaggcctcctggtaggaaaccttagtttcatcttttgttttgtttttaaagatggggtctccctatgctgctcagactggtgaaaagtggttattcacaggcacaattatagcacactatagcttcaaactcccagactcaagtgatcctcctgtctcagcttcctgagtagctgggactacaggcacttgccaccatacccaggttcatctttgaacataccataatcccatgaactgccaaatgtattgcacttagtttagcaatttctcttaggctcactgacataaccctagttcagatgttcattacattcttatctgaattactgcaatagtcttctaaatgatcctatttttagactccccaaacctaccctacacactgctaatttaatcttcctaacacttagatgacatagaaaaatgttcaacatatactattaggcttaaaaaacagattacaaaccagtacatactgtagtataatcctaattttataaaatatgtaaaaaaaaaaaaaagctcccccttccatccacacatatatacacaaaaagacaaaggaggggggaaaaaatctctcaaaggatatactcctaaatggcaagaaaagttatctctggatagttggattatgggcaatttatttcctggtttgaactttttcctttgttttctgcagttccgacaataaatgtattattttatataagagttaaacaattaataatataacatatatccttctgtgacttcctcactgcttatgttaaaaagtcataaattctttggcatgcactcaaagacctctatggccttattcaactactctcctcttatcatattccctactttctattcccactgctacctgttcaaatccatccactccttcagggttctgctcaaatacctctaacataatcatggcataagtgaaaaaaatacctgattcttaagtccctcatttaaaaatcctgctcttccagttactgaccttgggcaagttaactaaagcctctgaaattaaaatgtcctcacctataaatggaggacaacacaacctacttcaaatggcagtaattgaataacagaaggtaggcctgagcggtggctcagctcatgcctgtaatcctagcactttgggaagccaaggcaggtggactgcttgagcccaagagttcaagaccagcctgggcaacatggcaaaactccatctctacaagaaatacaaaaattagctgggcagggtggcacacgcatgtagtcccagtaacttgggaggctgaggtagaaggatcacctgagccttgggaggttgaggctgcagtgagccgtgatcgcaccactgcactccagcctgggcaacagaatgagaccctgtctcagtcagtaacagaaggtaaaacaagtgtctaacacaatgtgttatttgcttccatcttgtttgtaagggacatatgtggctcaaatttgcagcagtgataaatcttgtaatgttttacccagtgttctctccagaataaacaaaggcaagagaatgttaatcaaggaacagcctcaaaactcacttatcacacttcctcagtttcctgagggaagtttgaggggttctctttagctcccctaaaacagtggttccactcttgttctacttcttttttcactttctgtacaaactatggaaagtgatcatttttatccataaccacggctttatcatccataaactcaattctcaaatctgtatctccaactcagatttcttactgtatctcaagatttaaaaatcaaagtgtctactgaatgtttaacctgggtgtcccacaagaaacctaaactcaaaatcctaaaataaacttacatttcccccaaaattgtctgtcttcctacattccttatggcaccattatccaccaaagacagaaacctgagagacatcttatattcctcttttacccccttttctccatattcaagttctgtaatccacctcaaacattaagtcccacctgcatcccaaacatgccaggcagtttcacgccttagtgttttggaacacatttattccctctacctagaaaatcttccacttccttctttgcttgactaacttctctcatcctttagaattgagctgaaggatttttctcctctagaaaacaaaagctaactagcatttactaaacacacactatattctaatcactgtgcaaaacacttcgcatgcattgtcttgcctaatactctaaattcagtgatgaggtaggtattgttatgtttctacagatgggggaggccaagatgtaactcatgggaggtcatatataaatagtaaatagtagaaatgaaattcaaacttaggtctgaccctagtgcataagaatgctcttagccaccctactataccacagcttcccttatccagcccctacccccacaatcctacaacctcgtgattagttaggggtctctcctctgctgccataatgaagggattgtgcagcacactataaatctttattgtttggtttgtcttttctcaaatgagtctgagtaaagcaatttgaagacaaagtctgtttcatgtacaatagtctctcattatccagagttatccaatgtctgaaaataaatggaaaattccagaaataaacaattcatactttttgtgtgtttgttttttgagacaagagtctcgctctttgcccaggctggagtgcaatggcgtaatcttggctcactgcaacctctgcctcccggattcaagcgattctccctgcctcagcctcttgggtagctaggattacaggtgcccgccaccacacctggctaatttttttatttttagtagcgatggggtttcgccatgttggccaagctggtctcgaactcctgacctcagatgatccacccacctcggtatcccaaagtgctgggattacaggcgtgagccacggcacctggccaacaattcataagttttaagtttcacactgttgtgaatagcgtgatgaaatctctagccatcccgctcaggatgtgaatcatccttttgcccagcctatccatgctgtatatgctacctgccctttagtcatcaacatctgctcaacattgtcgtggctcaatgatctgagatcacctaaagcagatgattctccttctgacttatcatcaatagtggcctaaggctatatcacaatgctgtcattcaccttacctcatcaggaaggcagtttatcatctcacatcatcacaagaagggtgagtacagtacaatcagatattttgaaaaagagagaccacattcatgtaacctttattacattgtcataactgttctattagttactgcacctattatataaattagactttatcataggtatgagaaaaaacatagagttcaatactatcccaggtttcaggcatctactggggtcttggaatatgtccccctcagataagggggagctacagtatctgtatcgctgtacccagcagagtgcttggcccatggtagccttaaaaattattagggggagccaggcaaggtggctcacacctgcaatcccaacactttgggagaccaaggcaggtggatcacctgaggccaggagttcaagaccagccagagcaagaaagtgagactcccatctctaccaaaaaaacaatttttaattagccattcaaatggcttatgcctatagtcccagctactcaggaggctgagtcaggaggatggcttgatcacccagggatttcaaggctgcagcgggctatcatcacgccattgcactcagcctgagcaacgaagtgaaactctgtctctaaaaaaaaaagtactgtggctcatgcctgtaatcccaccactctgggaggccaaggcaggcggatcacttgaggtcaggagttcgagaccagcttggccaacatggtgaaaccccgtctctaccaaaaagacaacaattagccaggtatggtggtgcacctgtaatcccagctactcgggaggctgaggcaccagaatctcttgaacctgggaggcagaggttgcagtcagccgagatcacgccactgcactccagcctcggcaacagagactccgtctcaacaacaaaaaagtattaaaaagcattaggttccttttcccttcccccaccccaagtcagaaaccatattccatagcactttatacttctcttaggacacttatcttctgcctcatatgagcattttgcttctcttatttaccccactagactatgctcttcgagaccagcatgggcaacatggtgaaatcctgcctctacaaaaattaactgggcgtggtggtgcgggcatgtaatcccagctactcgggaggctaaggcagaaatgcttgaacccgggaggtggaggctgtggtgagccgacatcccgcaactgtactccagcctggatgacagagcgaaactctgtctcaaaaaacaataaaaataaaaatctttatgctgatacatctgcttgtattaattgttcaacaaaaactgaacctataattaagacagctgtaggccgggagcggtggctcacgcctgtaatcccagtactttgggaggccgaggcgtgcggatcattaggtcaggagttggagaccagcctggccaatatggtgaaaccccgtctctactaaaaatacaaaaattagccaggtgtggcggcgcgcgcctgtagtcccagctactcgggaggctgaggcagaagaatagcttgaatgaaccacgaggcggattgcagtaaggcgagatcgcgccactgcatgcactccagcctgggcgacagagcgagactccgtctcaaaaaaaaacgataataataaagtagctgttaactgttttcatttctattgtgtagctttcctcccactcctatttttccacttagcaaaacacggttcccaagccacaaagggttttctaattaacttatcaaacgcttcccgatgctaggcactggggaaaatgcaaactcggattagaaaggggtttctggtctctaaagaaattcgatctagtaatgaactcccgaattaaaatagtatatagaacactaggctgttcgagtatgagagtcacgtggctctgcagcgtgacggcgattgtcaacgtgggttcaggatcacgtaacagactacacagccagcccgttaactaattctctagggttagtttcgagctgtcttgcccagccataacctgtttggagaggctgaggagagatagagaaagcagcaaaccatctcccctcagacctgtgcatcttcccagaccctacatgtcagggctttccccttgctcaggctcacccaccacctcacggaggcgtggctctcacctacccacccgtctacctctccgaaggggttcggctagcttttccggggacccttccctctctaggtgccacgcacatgtggtgctggagtaaaggcctgcacaagccacaggctcccccttctcgctagtattccagacccaggtgggtaccctgcttcgcgttagccactcctcacctgctctgcggacaccgcccccttccccgcgccgctcccgctgctcttgccggcgcgaccgctgttctccgccatcttcgccgcctgctgggtttccggccggcgcagctcagcccccgccttgcgtcacgtccggcctgcgagttaccgcccactcgctgcggcgcttctggctccagaccgccctccggatcggaccctgcgaatggttttggctatatcttcatgtaggacctactccctatcccgtcggccgcggtgaatcccacctgcggtgctttaacttgtgtaacagagatgctgcctctgggagaggcggggagggacgggccaactggagcgggcggcgggagggtggagggcggggcgcggcttggggcctgggttcctttgccccttgcccaccagggaggggtgggagacgagagagggtgaactttcccctgcgagattctggtgaaaggggaaatatgcttcgagtcagtaaagctgcgcaagtgcacagtcaaggagagagtcttgggaaaaccaaggatagttcccggagatgacttttggactgcggaaacgtttgtcagaggaaagaggcttcagtttaatgtgagatcattggaagttgaactattcaggcggcgagcagagcccctttctccatcttcccactgtatggtcttgtcccttagcctataatttcttataaagagcgttttgaagactaggtttttactggcagggccctgattcaggctcacagtataaagagagaagtcagagaatcctagaaatttattgcttgaagaaggggttggtgtcctcatatctcaccttcctcakgctgggcktcatcaccaggcctcctcacagattcctgtcccttctgtgtcctggactccggatacctcaactctcagtactttgtgctcagcccaggtaacacgttttgttgtgtcctcagtgcctggcacttagatgctcagtttgttaaatggatagtgggagacacaggagtgtcaactatccacacatttgattggtgagccctactagccctgggtcaacgtgccctgtaagagcatgatcaaaaggaagtccagctttcctgcctctccacttgcaccccttagcattaaatttgcttccctgtgctatgaaatmtgagaatcctgcctatgctgttcacaggcccagagccatggctatctcctcttcctcctgcgaactgcccctggtggctgtgtgccaggtaacatcgacgccagacaagcaacagaactttaaaacatgtgctgagctggttcgagaggctgccagactgggtgcctgcctggctttcctgcctgaggcatttgacttcattgcacgggaccctgcagagacgctacacctgtctgaaccactgggtgggaaacttttggaagaatacacccagcttgccaggtatcagggaaatagcgagggagaggtagaatctttgttggacagtgtccctgggttgccagatatgagggtagagccttgagaagtcagtgaagagttgtcagtgtcccttccccccagggaatgtggactctggctgtccttgggtggtttccatgagcgtggccaagactgggagcagactcagaaaatctacaattgtcacgtgctgctgaacagcaaaggtgagactttataaccctttagcctgcctcttcccatgctcttctacctagattctccagaattgtttctcaactcttatttccttgacccaaggatttaggggtggtcctacttcagttcctagcctataaactatctcctccttgggaggagtaagcaaggcttctagaacaccagcactgatattccttctttcttactgtaggggcagtagtggccacttacaggaagacacatctgtgtgacgtagagattccagggcaggggcctatgtgtgaaagcaactctaccatgcctgggcccagtcttgagtcacctgtcagcacaccagcaggcaaggtaggagttrtgaaaggatgagggaggggaacaggaatactttgaactggcagtagaggatagaaagccctaagagagggggtaatggaaatatgactagatgctgtgacaaacagagcaggaagactactaagtaggctgtttttcattccaga[450 bp omitted]tggacgccaccatgagaagagagcaagttatggccacagcatggtggtagacccctggggaacagtggtggcccgctgctctgaggggccaggcctctgccttgcccgaatagacctcarctatctgcgacagttgcgccgacacctgcctgtgttccagcaccgcaggcctgasctctatggcaatctgggtcacccactgtcttaagacttgacttctgtgagtttagacctgcccctcccacccccaccctgccactatgagctagtgctcatgtgacttggaggcaggatccaggcacagctcccctcacttggagaaccttgactctcttgatggaacacagatgggctgcttgggaaagaaactttcacctgagcttcacctgaggtcagactgcagtttcagaaaggtggaattttatatagtcattgtttatttcatggaaactgaagttctgctgagggctgagcagcactggcattgaaaaatataataatcataaagtctgtgtctggacatcgcctttgggaactagaaggggagttggtattgtaccagctggactaagctccagttctagacctcctggctcattcaacatgcctccctacctaaataaaagtgcaacactcagtgcatgtcccagccccattctcccaagcatgggagtgggcgtaggagtggaggagggggaaggaaaaaggaattacttcacttacacctatgatgccctttgcccaagccagaagaaagcaaaggggaaaagggctgcagggtacattatttattttcacttgaacatggaaagaaagtgtcacactcccccttcccctttatagggggagtgtattttaatcagcaacctcttctccatccaccctgtgtatgtgtgtacacatataccaccacagttgggaggcatgactaggctgacccagtcttatctgttcctcctttgaagagggtttgacaaatgggaaaaaggaaggagccacatcaggcagaggtttcaagccatggaatggaggaaaggcggcagagaggagcagcaccagaggccaggagagagtggaaagggccacagcttgtttttaaaaaattctataatttggaagagggtggcgattaattttcaaaatacacttcagagtcccactttccacatagctcccttactcacagccctttggttttttagacaaaatttaagagctctcataaagccagaagtattgataactccttagtgcatccaaaaaaaagtgttcacatcaatcccttacaaagactatgtgctgtagactttgcttcttcctatacatttgtcttacggctcagtggtaaggtagctgtagagacacattacggggtaaatggaaaagggaaataaaggggaagcccaggcacatgggtgcagggaggggtggggaataccacttccactttcttttgtctttttctttaaaaaaaaaaaaaaaaaggcaggggtgtgattggttggaagggtagagaacaaaccccagaacagtgtaagctccagaggtgggtgatgggaacagtccccaaagtgagaagagggaataggtcagggcaawgcttgcagcatcaagttcctcaggagtttctgtcggcccagctcatagtcctcctcgtctacatttaccagcagcttgatggcttcatggcccacagcttgcttgagggagtctgtgatgaagacacctttaagtgcctctaataaagagccattgatgtagtcacgccagaatgcatcgaggtaggtgagctcagagaacttgatgtcacagatgatggagcccaggtcccgggacttgaggatggtgttggcctggttaaagcgctcaaactggcgctcaagtgggtcctgcttgttagagaagacattgccctgcagagcagtctcatgctggcagtattcagcccgaacccgcagtctgatgtctgttggaaacagaagatacagagcagaagaggttacagtaagggatgagtttacaagccaagcttgaaaactgaaaagcacaacagaataaaaaagtagggaatatcacctgacagcttctctacctcttccccaggactatttctatgtatctctgaaatccttgcctgaatgcaggaggttcccttaaacgggacatgccgaggtcagcactgttcccattactcacaggtagcaacttgtttataggagatattttcctaattaccaggcatagaagttcattttaatactcgacttggctcatcctacaataaggatgtcataacaacatccctgtgatgtagtattaactaacaagagttgaaatgtaccctgccacaatcataaagagcagttcttccaccagacaccaaaccattcagcctcactttgcaatggcaatcaaagtgaatctcacactgaatagcataaactgcccagtgtcccagcagttctttatattctccttcaagtctgctccatctctggaacccttgaacttcctcaccacatgtctgcttctccttgggatctggtgtcactgacttccggcgttttcgctggctcccaagtgtggctctccctcgggctggccgcttgctacacatctgaggacccgaagtggggcaacacaccacaggatagtggggaggcactgaccagaaagtaaaagggaagaaaacacagtagggtaaaggcagaaattcaaacacttctgttggaatgaggaaggaatcatttagacttagcactaaaagcagtggaaaaatgtgacttgaaaagacatgtgagaccaggtgcagtggctcacgcctgtaatcccagcactttgggaggccaaggcgggtggatcatgaggtcaggagatcgagaccatcctggctaacacggtgaaaccccgtctctaaaaatacaaaaaattagctgggcgtgctggcgggcgcctgtagtcccagctactcaggaggctgaggcaggagaatggcgtgcacctgggaagtggggcttgcagtgaaccgagattgcgccactgcactccagcctgggcgacagagggagactctgtctcaaaaaaaaaaaaaaaaaagacaagacatgtgagagcaaatacaggacctaggagaaatgtcacctcgcctgattttttttttttatggggcaagatgtgggcgcacagcatcctttcatttaagctggcaaagcccagaatgtgatgggatcagtgtccttttacttgatgatggaaagcagggggagttaatgtcttctcacctgttttagagggctggggaggccttggttctggatcactgagggctctgggggtcacatagcgaattgatgtctcctccagatacttgtctacaagatcagggcacactgtaggaggagaagtaatcattcaggaaaatatacacccttcccttctgtcagtccaaacccccagtgggcctcacaacttactctaagtactccccaggatcaatgtgtcctcccctttggacgcctatgctgctccttcctggcctcccacaactcttccctgattccagcccctaatacttcctcaccagcccgtctcctcttgagggtgacgtagggcagcaggtcgtggcgagtgatgatgcgcagcagctgcagcacctggcgaaagttactttcatcacagcggccctggcgctccagtgccaataagaagtcacgtccatttcggatgagtccacgctcgtggtcatcaatgacatcaacaaagaggaaagaaagcacgcgcacatctctgtgtgtcagatgagtgcccacgatgtcaaacatgcggtgcaggctgtacagcccrtgttcctgctcaccatgctcttctggccacacctggcttgcccgccgctttaggcccgccatgctgggggctcaggtacgcaatgctttccagaatccctgctcagcagctgcaatccccaccgtactgaaagggcagggaaagaaccgatgagacactcaagggcaggaactagtctcatgcattcccatattcccagttgctaacaatgcctggcacagtatagtgctttatacatgtttattaaatttttgaagtgtttgtttaaaaataaacactggccaggcacaggggctcacacctgtaatcccagcattttgggaggccaaggcaggaggatcacttgagcccaggcgtttaagaccagcctgggcaacatagggagacccgtttctacaaaaaaagaaaaaattagctgggcttggtggtacacgcctgtagtcccagctgcacaggaggctgaggtgggaggaaggcttgaggccaggagttcaagatcagcctggtcaacatagcaagaccccatctctacaaaaaagaaaaaaattagcaaggcatggtggcatgtgcctgtagtccctgctactcaggaggctgaggcaggaggatcacttgagcccaggagttcaaggctgcagtgagccataatcctgcactgtagcctgggtgacagagtgagtcccccatctcggaaaaaaaagaactagtttaaattctgactgtatcactgaaaggctgtgtagctgtgtgaccgtaagcaagtcacttaactccagattctcagtgctgtcatctataaacagggatgaatgaatatacacctcagagttgttaagaatccaatgagaaaatcacgggtaacccttatataaatggttgtgaaacatttcaaagatacaagcatccttggcctttgcagcccagaatcatccctccacatttttcctacaatccaaccacatcaagaaatgataactgctcagaaagtttatcaatatttaccaaaactcatggatttaaaataaacattaagtttctacaataagcattcttgtaattctatgccatttgtactcccttgatcttcaccctatttggcaatatcaactttttttttttgagatggagtctcactttgtcacccaggctggagtgcagtggtgcaatctcggctcactgcaacctccgcctcccaggttcaagcaattctcgtgcctcagcctcccaagtagctgggattacaggcacgcaccaccacgtcttgctaatttttgtatttttagtagagatgggtttttaccatgatggtcaggctggtcttgaactcctgacctcaggtgatccacccacctcggcctcccaaagtgctgggattacaggcgtgagccaccgtacctggccttggcaataccaccttctaagctttcctcatggatgtcatttaccaatcccctatcaatgaccaatcacagctccacattcgttatatagtttggctcttgattcacaaagttcctccatcgttatgggctacaggtaataccaatgacgcagccattaatcaattcccaaattcaacaactttgactcaagtcactcatacttactgctccaccagacagtaccatcctatactgtgcactctctggtcacactctccaatcacacaatcaatcctaaattcctgttaatgctacttctagatatttcttaaatctatcctacctttccacctccactgccatggttcagattacaataatctctcacctggactactgtaactttaaaagttctctgcaacaccaatcttaacctacctaaatccatccactgccacatctagttcagttagctgtctgaagtccacaactgaccaagtcactttcctgcttcagacccattgattgccccatcgttatctataagaacactccaaactcttttttttttttttttttttgagacagagtcactctgtcgcccaggctgcagtgcagtggcgcgatcttggctcactgcaacctccgcctcccaggttcaagcgattctcctgcctcagcttcccgagtagctgggactacaggcacccaccaccacgcccagctactttttgtatttttagtagagacggggtttcaccatattggccagactggtctcgaactcctgaccttgtgatccgcctgcctcggcctccgaaagtgctgagattacaggtgtgagccaccacgcctggccgaacactccaaattctttacacacacatcaagccttctaagatcaggcctaccttcccaacctcatttcccatcacatccgctttttattctctaacattatcagtttgtttatagttcacatacatcatgcaatttctctataccttcttcaggctcttctctttgcctgaatgcccctctcccttctctattccacacccccatcatcactctttttcagatggctaactcctactcattctttaagagtcagctcagatgccatcttcaaaatgcattttctacacccccatgcagagataagtagtcctcttctgtgcgcttatggaacactatgcatatctcctttacaccatttatcaccatgtactaaaattatttgtgtatttattatcccattagatcctactcaactcatggagagatatattcatctttatatccctagtgcctagtaatggacagagcctcaaatatagtgggagcaacccactgttgaactgaacttaatctccaagagatcacctcaagcaattccaattaagaaacaaattcacaaaagtccaagagaggaccccattaaaaacagatacaggtaattcagttaccatgcatatattctaactagccatagcctcctctgcaatgtccagaactacccacaccataccacaccactctaccctactcaacaattaaacaggttgctctgtccattttatacaaaaaggaactgaggctagactaggaaacaataaaataataagcttctttggaaaaacaaagctgatagagaaagctgaagagtaagtaggaactggtcctttcttcctcagatgaaaaactaaaatgaaagcacagagaaactcattcccttaagaaaaggggaggtacactctgggatcacttaaccctataccatgggttctgatatgtagacaggaaatgtaatccatatatagttttgagagcccagatgccccacccaaagcatgggaaatagctattcaactatagactggtattccttgcctcttcctctcgattcacctgttgctgttactgggtacaaatgaaggtgctaaaggaaaataagttattgctcatagcaggcaacatgagaaaactgagcctcctcagagcccctgcaacttctctttgttccctatcccacctgttcccttgggccagctgttgattgtgaggctctcagataaagcagattgggtaggtttcacattaaaccaaccagaagagctggttgctccacagttccctaatttaaagtgtgcttaaaccccaggaaatgaagaaacactgtccccacataccctcgcaatggaaaataaggcaaaatacaggaaagcactgtggtcctaattatgtatcaatggatgtaattctataagct

SEQ ID NO: 94365 - DNA, 48732 bp, Homo sapiens
  misc_feature (1)...(48732): n = A,T,C or G
ctcgggcaatgtgggtgctggcaacagctgcaaccatgtctaaggctggttctaggaggtgtgcagagagatgggcacaaggcaggcgtgggctgacaagggcattccgaaggaaagtgctgcagtctggaatgtcacctcccctgctctgtgctgggtgctgctcctggtgaggaaaggccacagcaaaccggtcagtgggggcatgggagtccctgtggggcacgtcacaggccccacctggacgacccatctgactccatcgtgggtcctctgagcctgccccagcacagctgccttgccccagggccctcaagtagcctcacaaatcctgcctgggtttaacagtctaataatcaagaaactcctgaccgggtgaggtggctcacacctgtaatcccaccactttgggaggccaaggccggccgatcacttgaggccaggcgttcaagaccagcctgggcaacatggtgaaaccccatctctactaaacatacaaaactagtagggcatggtggtgcacgcctgtaatcccagctacaggctgaggtgggaggatcccttgaatccagaaggcagaggttgcagtgagccgagatcgcgccactgcactccagcctgggcaacagagcgagactccgtctcaaaaaagaaacagaccttctcacacccaataaatagagagatggggaaggatgagaagagagtggtctcagaaaaggaagtaaagtggctctaagagcaggagagctgcttattttcacagataaatgaacttaaagaggcaccgagtttttttttttattttatttaaaaaaattttttttgatacatattagatgtacttattttgggggtacatgtgataatttgatataatcaaatcagggtaattggggtatctgtcaccttttctttttctaatactaggaacatttgaatcattctctgttgtggtaatcagatccaacaccaggtagtgggggtgatgaagtccggcagagtcaaaggaatgagaaaaagacagtttgagagagaaagtgggaccaggggaccatcgcgagtgtggaggctgtgaaggcccctgggcactgggagcccaggctatttattggtgctcaaagaggtggtgaggatgtggaggttgaaaggaaatagtgtatcaagtgaacgagaaacatacggctgcttgagataatgggagtgctagaagcaaggagccagcaagtctagcagacatgcaagtcctgcctgagcttctctcccaacactcagcttttctcccaacaattctcttctagctatttggaaatgtacaatcaattaatgttatctatagtcatcccactgatctattgaacactagatcttatttcctcaaagtggcactgaaattttgtcatgtttcagagtgttggaaaagaatggtggtctcccattattggtggcaatataaatcggcacaacctttgtggagaaaaatttggaaatctcaaaattacaaatgcaagtgccctatggtgcagcgattctacttatagttgattctatgcagatgctggtgaaattgtattccagtattggctgtaacttaagcaaaagatgagaggaaggaaggatccaccttttttttttttttttttttttaagagagtgagtcttgctctgtcacctaggctggagtagggtggaacaatctcagctcactgcaatctccgcctcctgggttcaagcgattctcttgcctcagcctcccgagtagctggggttacaggcatgtgccaccacacctaggtaatttttgtatttttagtagagatggggtttcaccatgttggccaggcagatctcgaactcctgacatcaggtgatccacccacttcggcctcccaaaatgctgggattacaggcatgagccacctcacttggccaggatccactttggatgtagaaacccatcaataaggaattggttcaaccatggtgcatttatttgcaaggaagagagggaggagagaagggaggaaggcaggctggctttttatggtattattatgaaatcaccagattacattgttaagtgaaaaaggcaaagtggagaccccggagctacataagctaccacttgtgctaaaggggaaaaatataatatttgcttttctctgcatgggaagtttttgttgttgtttctttgtttttgagacaaacaaaatgctctgtcacccaggctggagtgcagtggtgtgatctcagctcactgcaagctctgcctcctgggttcatgccattctctcctgcctcctgggttcatgccattctcttgcctcagcctcccgagtagctgggactacaggcgccccccaccacgaccggctaatttatcgtattttttagtagagacgggggtttcaccatgttagccaggatggtctccatctcctgacctcgtgatccgccctccttggcctcccagagtgctgggattacaggcgtgagccaccgcgcccggccaacctggaaaattttgcaaggaaatacagaaatgggtaacctcaggggaacactgagtacataggctgagggtcaggaatgggagacttttatcttgtaatgtttggatgtttgaattatgtgaatgtattacctgttttaaaaatagatattttaaaaacacacacattggggcaatcaggaatgtatggggtgtggttctgttccacaactccaaggaggtagacaggcatgttttacaccagttcaagatgtacatttatgttttatgtacttttcggtaaattgtatttattccacaattgaaaagaacaaaaaccctagcgactcatggagtgctgccgtgtgccagggtgggcctggccccagtcccttggaaccctcagaaggaagaagtccagacaggttctctgggcccttccttgctgggcaagcactgaggtgggagtggagcatggaccccctcagtctggcgcggtgcgaggctggcctggctggcagcgcctcccggcggcactgttgccctgtccgcagctgtagcgtctcctgtttcctgggcgcctctaytccattgttggccgagggggtcaggacccgccgccttctgcattattgatggtcctgtaaggcgggcacctcggggagtagagcctgtagcccctgcgagagcagagccgggtggtgcactgcacagaaggtcaccgcgggaggccaaatccccggggaggggaaaggacctgggcgtcgggaagcccgtctcctttgggccagccatgggcaggaaccagcgcaaagcgccccagcgcctggagaggcccgggaggccggcctcaggggagcaggagtcggggtcggccagcgcggatggcgcgcccagccgggaacgccgttccgaccgcgggcaggcggmcagggcgaaaccggcggccgagcctgccaccgccgggggccagggaacccctggtggccgcaggaagcccactgcagaggggaacggcggctgcagacgcccaggggctgggctgtccccgaaagcccaggagaggcaaagcaacgcgcagcgtcagggacgcgggcccaggggcggccgcggggggcgcctggaggagggaagcctctccggaggagaagagctgggcggccgccgtaggaggaagcggaaagataaggggccctcggctcggcggggccgccggacgcccaggagcctcaatggggacacgtcgggtggggacggaggcagctcctgtccggacagcgaaacccgcgaggcccaggagagcggcagccagcgcggcacagcccgggagctgcggcccacgccggagcctacggacatgggctcggaagggacaaaaaccgggccggagtcagcgctggagccaagcagcgacggcctggacagcgactggccccamgcagatacccggggccgggaagggtcgtcggggacggggcccctgggagccagcgagcattccggcggggactccgactcgagtccgctggggaccggacctggacggggctctcgggcagctatggcctccaggaccttcgaggacagctcgcgggctcctcgggacactgggccggccaaggacgcgagcgacaaccgggcgcagcggggcgccgagccagaaacaatgcaggcctcgacggcccgggctccgcgccaccaggtcggaaaggcggtggggcaggtgccagcggcggcaggcgagggcgaagcgggagccgcagcaggacggggccggaggacccagccccgctggcggccctcctggtggtccgcaggctcctcgcgaggcccccgccaggcgccgcttcccgagccgtgggcccccgccgcgctggcctcaaggagcggctcctgagtgtagcgcgagccctgggcctcctgcgctggctgcggcggcggctgcggcatggcgcggccccagagggcgaggggcagggtaccgggccacgggcgagcgaggggtggggccgccggaaaccggacgaggggcggggtcatgggagaggaagcaaggggcggggccgcgggaaagcggatgaagggcggggccacgagcgaggggacgagggtcggggccgcgggaaagcggacgaagggcggggccacgagcgagggtacgaggggcggggctgcgggaaagcggacgaggggcggggtcacgagagaggtgacgagggccgggaccaccagagagggtacgaggggtggggccgtgagcccgggctgcggcaccgtctagcgttgcgcctggctggcttagcagggctggggggtatgccgagggcttcccctggtggccgctccccgcaggtcccgacaagcccagtccccggcgacccttttgatcaggaggacgagactccagatcccaagttcgcggtcgtgttccccaggatccacagggcagggcgggcgtcgagcagccgcagctctgaagaagcgtccgcagatgcccccacgggggaaggccgaggttggcctcgtgcaggggtgggggggcacagtgaggggtgcaggacgagtggggaaggggtgtccgggcttcgtcgcggctccctccttgccccgactgcacccgacgggccttccctcgacgagagcggctccagcagtgaggcggagttggagaccctcaatgacgagcccccggtgcgctgggcgcagggctcaggcccccacgagggtcctaggcttggcgccgccgtgctgctaccccgactctccttggagacccgcctgcagcaggagggagacccgggcctccgtgggtccctgagggagctgtgggaaccsgaggatgaggacgaggcggtgctggagagggacctggagctgagcctccggccgggcctggaggcgccacccttccccggtgccaagggcaggagcctcggagacggcctggaagacatggaggacctggcgcggttgcggttagcgggcgcggtgccaaagctgccatccccagctcacagctcctcatatccaccctgccctcatctttatgaattgcgtgtagacccttattgaatccttagaaggatgggcttgaaccctcctggcaggaaggggcaggtaaggggcaacaggtgctacgtccccaggaccgcctttctaattagtacaaagcttccttctgggtcagagccagccctccttgtagcctgcgcattacttgacagctcagcccccattttatggatcaggctctgggaagttgaatgacttgccagggtccctgcagtgggtggcagaactaacccacaacctcctgcagccacaacttgtcatgcctccaccctgttgtccctacaggctggtgtgtgacagctctgtgctgctgtgcctcaagaagagatttcacctgggccgyatctatgtatggggagccacggggacggacagtgggcggggatccccttttctctggggacagagggctccctggcacccctggagattctccttcctcttcctccccgggctaggcggtgaaccctctctggagccctgcagagtgggactgaggggctgggctctgtttgcattccccctgctccctccacactctgatgagagcttgttttcctccccagacctttggggggcctgtcttgcttgttctgaacccccaccggtccttgcctcttttttcacctgaggtccaggcaagctaccaccccaggaaggccctcagcaccactccgtatgtgactctgccccactgaccctctgctcacctcccaggcagcccagtccctgcatgtccccttgactgaggtcccggggcctgtgagcacctctgctacacctcggagggtcccaggtccccatgtctggcaaccttctcatctccctcagacacatctttgccatygtggcatcagcctatgacctggctcagaatactgggcaggacccatgcatcctcctgtggtgagtggtggccttcctgggtggctgaacccatgggccacactgagggttgatggggcggggcctgaggtcttcactggaagccaytggtatgctccactgctgggctacagttctggactcctcagggccgagctcctggctgaaatcatcacatgagcccctggaatgtggcatcttggggactttttcttttctgtcgggtctctccatgccctgggactatctttccacatttatgggggtctctccaggctagctgtcacttctgggtggcacatcccacttcctgggttcactggggtggtcctaygtgcccctccctggagaccctaccaaccaacacatccttagctcctcccactgcagtgggcacagtggctcagggaagacggaagccgccaaaaagatcatgcagttcctaagcagcctggagcaggatcagacggggaaccgrgagtgtcaggtgagggccaggctggaggtacctcatgggttgagctggccgtctgtcttcctccaggggacagctgaccatgtccaagggactatctttctcctttcagccaggagaggggtggtctccaggcctctggcgtctcctggggtcagctgcaggcactgccctttctgatgggactgacgcctccctggacctgcccctagctgggatgcctgctggtgggggctactgctgccyagggatgcttgaacacccctccctgtacagktggaggatrtgctgcctatactcagcagctttggccatgccaagaccatcctcaatgccaatgccagccgcttcggccaggtcttctgcctytacctacagcagtgagtggcagggttgcagggggcacctacaatcactyacccttcctgggtccttgggctgcttccctggggtccagaccctggtagggcttcttctgcacggggcccctgggtgttctgcatcctgggcactcacacccatcttctgtgcccacagaggggtcatcgtgggagcctctgtgtctcattatctacttgagacctccagggtggtgtttcaggtaaaggcagcccttctatccacccctgcccagttcccagagtaggaagggcagagggtgtcactgtcggggtgtggcctctaagcccctagggcactgagcccctaagccagtcctgtccccaaggcccaggctgagcggagcttccatgttttttacragctgctggcagggctggactccatagagcgggagcggctctccctgcagggaccggagacttactactacctcaaccaggtcgggggagcccttgtggtgcggcggggaggcctgcccagaggaggatctcggcccggaggtctgaggagtagccggagtagagggaggctatggggtggcaggccccgctccctcacccctgctgtgctctgcagggccaggcctgcaggctgcaaggcaaggaggatgcccaggactttgaggggctgctgaaggcactgcaggggctcggcttgtgcccagaggagttgaatgccgtctgggctgtgctggccgccatcctgcagctgggcaacatctgcttctcctcctcagaggtgggcttccccgtgggcaggggccatctggggtgctgggtctgtagaatcagggcagtggtaatgacgccaaatgctggtgtgtaggagactacagagtgctgggctgccctgaaaagtgggtagatccccactgtgtagatgagaaagctgagacatagagcttctccactctcccaatgtctgtgcctctaagctgccacccctaagaacatctggcattagatgagcagctatggtcaggcmtggtgggtcacacctgtgatcccagcactttgggaggccgaggcaggaggatcgtgtgaagccaggagtttgagaccagcctaggcaacatagagaaaccccgtctctattaaaaaaaaaaaaaaaaaaaaaargggttggcggtggtggctcacacctgtaatcctagcactttgggaggccgaggtggrtggatcacttgagcccaggaattctagagcagcctgggcaacatggcaaaatcttgtctctacaaaaaatatgaacagattaggccaaggcgagcagatcacttgaagtcaggagtttgagaccagcctggccaacatgctgaaaccctgtctctactaaaaatacaaaaattagctgggtgtggtgacacgtgcctggrtgtggtggcacatcccagctacttagagaagctgaggcaggagaattgcttgaacccgggaggtggaggtggcagtgacctgagrttgcgccactgtactccatccagcctaggtgacagagcgagactccgtctcagaaaaaaaaaamaaaacaaaacagactgggcgtggtggctcatgcctgtaatcccagcacactgggaggcctagatgggcggatcacctgaggtcaggagttcgagaccagcctgaccartatggtgaaaccccgtctctactaaaaatacaaaattagccaggtgtggtggcacatgcctataatcccagctacttaggaggctgagacaggagaattgcttgaacctgggaggtggaggttgcagtgagccaagaytatgccattgcactccagcctgagcaacaagagcgagactcagtctcagaagaaaaaaaaaaaaaaaaagattagctgggcatggtggcatgtgcctgtaatcccagctactggggaggctgaggtggaagaattacctgatcctgggaggtggaggctgcagtgagccttgatcgtgccactgcattcaggcctgggtaacagagtgagaccctgtctcaaaaaaaaaaaaaaaagaaaaaaaaaaaatcaaacgagcagctgttatgtacctgggtactgtgtaaatcactttgcatttgttttctaatttagtttgcaagacarccccctaggaagggttactgcttcccctttagcagtgaggccgtggggcgcaggaaggaaggagcctggccagaactgtccgccagcaaagagggaaagtaggactcgaactcagggccctgaaaaccatagcctcgctcctaatggcccagatctcctcrtgtgacatatctcccctttggtgacagggccacttaccaggcaaagcccggcctgccctgcctggggagtgtgtccattcctgaarcagagatctccctgtccctccctctctgtgtagcgagagtcccaggaggtggctgctgtgtctagctgggctgagatccacacagcagcccgactgctgcgggtaccaccagagtgcctggagggggctgtcaccaggagggtcacggtgagcccgagggtcctggggagaggggcctggcctggctgacccacaggctgagtaagcaccatgagggctgcaggcctgacacaccagctgtgcctcctctgccctccaggagacgccctatggccaggtctcgcgatccctgccygtggaaagtgcckttgatgccaggtggccctagagacgggtgagagtcagagcagggcccgaggcacggctctatgtggctcacccacccgccatgcctacagggacgccctggccaaggcactgtattcccgcctcttccaccggcttctgaggagaaccaatgcacggctggcaccaccaggggagggaggcagcattggcaccgtcactgtcgtggatgcctacggctttgaggtcaccccttggggtggggcccaggaaagggggcacccatataattccgatggatttctgggacccccacagctccagctctccctgggggcactcgcgaggtgcttgtctgtctggcagggcgctttcagrgctccttctgcatctgctgggctgagcctgctggggtggggtgcagggatggagaggtaaaggagtggggctgcctctgaggatttagaatctctcaaggactagggctgtctgcgcgccttggagttctcgcttccactcacctccagaggacgatgcccctcaccccacacccacgttcatccaagcatggtctctgctcccttttctggtcctgggctgggcagcctgggccgggagtgctcctggcttctctgggatggctggagcccaccacaagccccagccctggcccgtgctgtcctcctgctgggaggagttgcttagtgcagcagacagagcagaggctctgagtggtcctgccactcactagctgtgtggccttgggcaagtggatgaacctttctgaggtccagcgttcccgtctgtaaaacagaattcccagcaggacctaccttgtgagtttcagaggcttaacggagatagtccatgagagagctgtgtgctccagggcagccgttctgtcccactctggccggtcctgcctttggcatggcctgtcctccgtggccttgtagagacgcaggagtctcaaaggcagtggaagacagaggccccagggtgggcccgcctgtagccccacttcccccacgtcaggaggaaagggaagagggagagtcccccagtctctctcagttggcagaggctctgcacccctttacagaggatcctgccgcctcaggacagccaggagggggctggagggagaggaggtggcccctgccctcagtccctggacgggcactattcatggccccctgttctgtcccacamtccagtgtgtccttgtgaccgtgccctccctgaggctggtggtgatggtggcctgtgtgtgcatccaagctcctgtgtgtgtgtttcaaggggcacaaagctgcatgaagcttcctaagagagtgctgagggagcacttcctataggaggaaggctggaaggcttcctggaggcagcagcctggagccctgtgcatgaggatgcgggactctgatagccaacctgctatttagtagggaaagtcgccttccaagccacaggatggccgtgacaagaggcccaaaggctcgcaggagtgctgcagcagagggcaggggtgtgggcagctagagggacctgtggctgggcagggctgaggtagcccgtgtgctgtgccggatcctttagacttgaccctgttggctacacagcatcagccytgggtattactcatccctgcgccctggccagaatgaaggaagcctctggggtggggggagggcacagccccatgtgcccacctcactgccacatgcccccaggccctgcgggtgaatggcctggagcaactgtgcaacaacctcgccagcgagcgcctacagctcttctccagccagatgctgctggcccaggaggaggtaagaggattgggcgtggacgtggcaggggccgctcaggcattgcccaggcagaggccatccttggtgaaggaaagttgggaactgagagctctgcctggaaggcccctttccatgaggtgtctcagtcttctgagcctcaatgtactattctataagatgggagggttatccctgctcctgcaaaatggccaaatgccggctgttcccaggaggagtgtcggcgggagttgctgtcctgggtgcctgtccctcagcctccgagggagtcctgcctagacctcctggtagatcagccccacagcctcctgagtatcctggacgcccagacatggctgtcccaggtaagggccaggatggtgaccccccacccagtgtcgggaaggagtggaggccctgggtgtccaggctgtagctggcagagcctcccagaggggacaaggttatgggatccagcgaccctgatcacagttcctcagcacagcctgggacagcagcagcgaaggggaagaaccctgggctcccgcagagctgggttcacatcttgtctcggggtgatcttgagcatgacatctggcctctgaggttcctcacgtacctgccacagaagggggacagtagtgcccgatgggcaaggtggcrgggactgcacgaggctcatgaagggcttctgcaggtccctcacaattgtggctaggtggccactgaggcctctgactggtcggggacaaaccccagggtaccatgtcccccattccacaaatgctttctgactgcctcctgcctgctcagacttaaatagcagcctcgtccctgtttcccgtttcagcgcgcgtccacatgcagtcacagcgtcyattcattcactgactccttaccgcgccagactgggctccacaagggcgggtgcccgtgtgaagggtttgagctctatctgyagcacgtgttaaggaaataatgaatgaatgaataactgtgccaggaactgtgctaaggataaaaggtgaacaaaattagacccagtctctcccctcttacagcccgcagtgcagcaggagagaaatgttcatttaaaaaaacaggccttggccaagctcagtggctcacgcctgtaatcccagaactttgggaggccaaggtgggtggatcccttgagcccaggagctcgagaccaacatgaaaaaaccctgtctctacagaaaatacaacaattagcctggtgtggtggtgtgagcctatagttagagctacttgggaggctgaggtggatggattgcttgagcccaggacgtcaaggatgcagtgagccatgatcatgccactgcactccagcctgggtgacagagtgagaagttgtttcaaactaattaattataaaaaaacaaaccaaaaacgcagagccaaatacaaaatcacccctgtgcggctccgtgggtgggcgtgtggggcagggagagttggggggcgtcatgagcctctaggagctgaggctggaatgtggagcaggagtttctgtggaagctcaatataacgtgatcctgaatatggggcaaccctcccccattttcccaattagtggttgagaatgaaaggtgagccaggcatgggaggctgaggcaggagaatcgcttgaacccaggaggcggaggttgcagtgagccgagatcgtgccactacactccagcctggggacagagcaagactccgtctcaaaaaaaaaaraaaagaaaagaaaagaaaatgggccaggcgcggtggctcacgcctgtaatcccagcactttgggaggccaaggtggacagatctcraggtcagcagatcgagaccatcctggctaacatggtgaaaccyggtctctactaaaaatacaaaaaattagccgggcgtgatagtgggcgcctgtagtcccagctactggggaggctgaggcaggagaatggcgtgagcctgggcgacagagcgagactccatctcaaaaaaaaaaaaaaagaaaaaagaaaatgaaaggtgaaaaacaatggtaaaatcrtcaaatgttattgtaatagttcgttgatcactgtcatattaatgcaatacatgtcttcatgtactatatattgatatataacaagtcacattaatatatgatatataatgttcatttattaatacttatacgtatgtaaagtcttgtactagataattaagagagtgttaatttctaaacgattgtttctcccagttcacatttcataatgttttgttaaaacttgtcacgagtgtctttgaggtcccaagatcacttttggaatcccccagcatggatttccagggctcagcaatatcacttaggtctatgttatgtgacatgtrccattttctgagtccgaggtgggtgctgagcctggaattgttaccccaaacccaagttctcatttacataatataggcargttcccccatgcacttgctattttatgttcattagctcagtaaaataacgtccaacyaaattactttttagttttatttttatattttaaaaaatagagatggggtctccctatgttgcccaggctggtctcaacctcctgggctcaagcaatcctcccaccgttgcctctcaaagtgctgggattacaggtgtgagctactgcacctgtccttgagttactgtgtgtgtttgtgtatgtgtgttttaactgactcctactatcattcccaactgagttactttttgaaagtgatttttttttttttttgagacrgagtctcgctgttgcccaggttggagtgcagtggcgtgatcttggcccactgcaagctccgcctcgcgggttgacrccattctactgcctcagccttccaagtagctgggactacaggcacccgccaccatgcttggctaatttttttttctttttttttgtatttttagtagagacggggtttcaccatgttagccaggatggttgatctcctgatcttgtgagccacccacctcagcctcccaaagtgctgggattacaggcacaagccaccgcgcctggcctgaaagtgatctttgaaagacttggttaaaagcacatgtagcccgggtgcggtggctcatctctgtaatcccagaactttgggaggctgaggcgggcagatcacgaggtcaggagatcgagaccacagtgtaaaccctgtctctactaaaaatacaaaaaatgagtcgagcgtggtggcgggcgcctgtagtcccagctannnnnnnnnnnnnnnnnnnnnnnnnnnnnnnnnnnnnnnnnnnnnnnnnnnnnnnnnnnnnnnnnnnnnnnnnnnnnnnnnnnnnnnnnaaaataataataataataataataataatgaaataaataaatacaagcgcatgtgattctgggactattctcccaggaatggttgctaaatctgtactaaagctcctcatctctatttctttttttttcttttttcttttttttttttgagacagagccttgctctgtcgcccaggctggagtgcagtggcgtgatctcagctcactgctgcaaactccgcctctcgggttcacgccattctcctgcctcagcctcccgagtagctgggaccgcaggtgcccgccaccacgcccggctaaytttttgtattttttagtaaagacggggtttcaccatgttagccaggatggtctcgatctcctgacctcgtgatccacctgcttcggcctcccaaagtgctgggattacaggcgtgagccaccgcgtccggcctaagagtgatctttgaaagacctgtttaaaagcacatgtgattgtgggaccattctcccaggaatgattgctaaatctgtactaaagtgccccatccccatttcttttttttttttgtttaagtacttacttattttagaaatggggtctcactctctcacgcaggctggagtgcagtgacaccatcatagcttactgcagcctcaagctcccagtcccaatcagtccttccacccagctaatgttacttttttcttttctttttttttttttttgagacttttttttttttggttcttgttgcccaggctggagtgcaatggtgcggtctcggctcactgcaacctccacctcccaggttcaaatgattctcctgcttcagcttcctgagtagctgggattacaggcatgagtcaccatgcccagctaatttttttgtatttttagtagagacagggtttcactatgttggccaggctggtcttgaactcctgacctcaggtgatccacctgccttggcctcaaagcgctgcggttacaggcatgagccaccgcgcctagccccacccagctaatttttaatttttttttttttttttgagatggagtctcgcactgtcacccaggctgtagtgcaatggtgccatcgtggctcactgcaacctccgcctcctgggttcaagtgattctcctgcctcagcctcctgagtagctgagattacaggcacctgccaccacgcccagctaattttttgtatttttagtagagttgggatttcactatgttggccaggctggtctcgaactcctgaccttgtgatctgcctgtctcggcctcccaaagtgctgagattacatgcgtgagccaccgcgcccagcccaatttttaaattttttgtagagatgggatctcactaggttgcccaggctgatctcgaactcctatcctcaaacgatccgaccacctcggcctcccaaagcgcttgttttggggaacaaagccaaacctacccttatagtcagtgtaggcagtactcgtgctcaccgggagagggcgccatccagaaggacagcctgtgcagaggcgtgaagggagctcatggctcctctcctaggccacggaccacaccttcctccagaagagccactatcaccatggtgaccaccccagctatgccaagccccggctgcccctgcccgtgttcaccgtgcgacattatgcagggactgtcacctaccaggtacctggcctcagggacagaccagggtgaatcagcgagggcagtgtcccctcccaagctgagtcacccgacagcggagaggagtgggtgtggggaggccccttgcaaggcttggacacctgtccctacctgagccatgggccctgcccagttctgagcacggtttactgagttctaggtgacaattatggggtcagggagtggaagccttgggaccctccagacaagtgggcagagcacaagcatgggacctgatgaccttggcagtttacttygccttctgagcctccrtttcctcacctgtaaaatgggtatggagacctaagctctggcgttgctgtgagggtgagatgtagtaacgtggagatggcctggcaggtgcctggcacatagtaggtgctcactgaatggacttcccttcccccttccgagttctatgcctaccaagaagctgcacgcgtgcctaccccaggaggagaggaactgggggtgggggagcgggggctggaataaagggaagggcagtagggagaatcagttctccctggaggagatggcacactttgcttggagaagaaaaactacaaactacccaggagttgcccccaaaaaagaaatacaaggagttcaagaaagctaggaaaatgtaaatcaaaatagatttaatatggagagacagacaacattcttgtctagtcaacctattgactagcataggttaaagccccagtggggagagtgtggtcttgctggggactggacctgtccatggggtggartggaaagtccagtggcagacccaaggctaggtaaagggctggaaacaccaaggcagcctttcaggtcacctggggagagggtagattcttctcctccatatccagcctcccctccttggttcctgttctcctccctttctccacttccctccccacctgcatggtctcttgcaggttcacaagtttttaaacagaaaccgggatcagctggaccctgctgtggtggagatgcttggccagagccagctccaggtgcccatctgcccttccaggcccccacccgctccatactctgtcccccaattctgtccttttccccctgggcgctcttgcccaagggttggccctcaagtccctggcaccttgggccatgggctgagcttgccagggtctggatgccgagggctggtccattctggctctcccgggctgcagggtggatgggcacgccccagcggccagctgactcagcccttcacccccacagctggtgggcagcctgttccaggaggcagagccccagtccaggggagggcgaggcagacccacgctggcctctcgcttccagcaggccctggaggacctcatagcccggctgggcaggtaagaacagcgcccgccacaccagaccccagggagttgtatggggctccagtctgtgcccgagtgacccctctttccctcatcaggagccatgtctatttcatccagtgcctcacccctaaccctggaaaggtgagctccccagcaactggcctcagggccctccccytccctgcacctccctccccacagctctaggccccttgactccagctgtctttggctctgtcttgtggccacagcttccaggcctctttgacgtgggacatgtgacagagcaactgcaccaggcagccatactggaggccgtgggcacccgcagtgccaacttccccgtgcgtgtgccctttgaggccttcctggccaggtggggcccakcacctcrgggcaggactgacaaggaggccaccgggagtgactggcagccccgggggtccttctgattggagatggactcactctgcccaggactgggcctagcacccaaccctccctctctctcctcgtcctctcatcctctctctctctctctttctctctccatctcrctctcttctaccattcaccatccctccaygcattcgtcatttcttctcctctctgcaaacctctcctgtgctgatgcctgggcaccagagatgaggtgggagcagtacctgccctrggcggggctcacggtctagtgcccacagcagctgtccagggagtgcaggctgaagcagtgagatggcaggggggacggagtgagaaaagagcctctcagaagggcaggaggggcggggaggggcggggtggcacatggagctgccaggaacyccagaggcagctctgttcccagagttcagaaacctccaagaaaagctggtggcattgtccgttttgttgtttgcctatctggcctttggctattgactggatggcatcttgggaatcctctgaagggctggagtttaccccaagcacagggacagagggagcaggtggagtcacttctygttgatgtccagctgagctgggctggtggctgcctcagaagggagggggcagctactaggagcagcagcctcaccccagggctctgtggacctccttagcctgtgatggccttggcaatggggatggcctggttgggggactgagcaaaaggcaggcagtagggatgggtgttcccagccttgagtcagatcctgagaagctccagggcggggcacgttctgtctctgccatctggaaacctaccagctacagcaattgtcacctccaacaagaacccctgagcccggaagctgggtgagaggaacctccaggtacaactctccacccagcacagaccaggtctgctgatctgtgccattccctgatgcactgtggcatcccgtgaccacagactgtcacccacatcccyagaacctgcacggtgcttgcttggtacagactaactactgagtgtccattaagccaaactggtaccaccatctggacctgtgaaatgtccttcaacactcccccacccaccccttcctgccacgcccctccctcccttccacgtccctccctcccacgcccctccctcccttccatgcccctcccttccacacccctccctccctccctcccacaaacttgtcttgagacctactgtgttgggtggcgaggagacgaaggccttgggaaccacattcctgttgctcccgtggcccagaaccagccctcatgcctcctgcgcacaccatgttcacctgttctccccctgagctccagcgcagagaccctccctgcccaagttcactgcagtgtctcagcccccagctgagcgcctggcatagagcaggcactttccaaattttttaatgatctagaaatgraataaatactgaggggctcagggtgtckyacagcaagtgtgaaagggcttgggtgcagtggctcacgcctgtaatcccagcactttgggaggccaaggcaggcagatcacctgaggtcaggagattgagaccagctgaccaatatagagaaaccccgtctctactaaaaatacaaaatcagctgggcgtggtgttgcatgccagtaatcccagctactcgggaggctgaggcaagaggatcacttgaacctgggaggtggagattgtggtgagctgagattgcaccattgcactccagcctggacaatgagaatgaaactctgtctcaaaaaaaaaaaccraaaaggccgggcgcrgtggctcacgcctgtaatcccagcactttgggaggccgaggcgggcagatcacgaggtcaggagatcgagaccatcctggctaacacggtgaaaccctgtctctactaaaaatacaaaaaattagccgggtgcggtggcgggcacctgtagtcccagctactagggaggctgaggcaggrgaatggcctgaacccgggaggcggagcttgcagtgagccgagatcgcgccactgtactcccgcctgggcaaaagagcgagactccgtcttaaaaaaaaaaaaaaaaagtgtaaaaggaggttctggctattctgatctcagctccatccttggagcagcttccaggccctggggtcagaagggcaggaagacctctctgaccgggagaagtgtggtgccgtcctgagccaggtgctgggggccgaatcacctctctatcaccttggagccaccaaggtgggtgtgtgtatccctgtgtgcagagggcagcatgaatgggaaaggagagrtgcattctgggcccaaagggacaaacccaggatttggggatccatccaagtggtgggagacagaagggctggacggcagggccagaagaacaaatggtttggctggaagggaggaggctgagaccagaggaggagagcaggaggggctggctcctggctcctgcctacagcccacccctctacccacaggtcctgctgcaggagcagggctggcagcggctggaggagctccgggaccagcagcgctcccaggccctggtcgacctgcaccgcagcttccacacctgcatctcccgccagcgcgtcctgccccggatgcaggctcgcatgcgtgggttccaggccaggtctgcaggcgttggagccagggctgaagtgggtggggtgaggccgtgggttcgtcctccaggtggtggggcagggttggggaaacatagggcctcaaggcaagtcatcctgccccagtgccatctcatcggcatgtgactctccttgacggcattaccccccatacccgtgcagcctctgcttgaataccccggccacaagaaactcattacctactgaggccacctgaacctgtggtcctgactcctttatcattctcttttctggtctgttttccacactgtgggaacaatctttgtttttttttttgagttggagttttgctcttgttacccaggctggagtgcagtggcgcgatctcagctcactgcaacctctgccccctgggttcaagtgattcgcctgcctcagcctyccgagtagctgggattacaggcttgtgccaccacactcagctaattttttttttgagatggagtttcactcttgttgcccaggctggagtgtaatggtgcgatctcgggtcactgcaacctccacctaacaggttcaagtgattctcctgcctcagcctcctgagtagctgggattacaggcatatgccaccacgcctggctaattttgtatttttagtagagacggggtttctccatgttggtcaggctggtctcgaactcccgacctcaggtgatccgcccgcctcagcctcccaaaatgctgggattacaggtgtgagccaccgtgcccagctacagtcatcttttcaaagcatgaatcatgttgttaaggacctgactacctccccagcccamtttaggccagacttttaccctgcagtgactttagacttctctttcctataacaccaccctcccacttctcacctaatcatctctttttcgccctcacagcctrtcttcacacattcctccaacagctgttggctgaccgtctgcctcatytacccttgggccagatgctggygacagagctggggatgccagagacggggcctcccaggctggttgggaagtcagattcagatggtagagcagccagtgatcttcccagagagtaactcgagggctgagaatgaagtgaagacagtgcagaacatcgggggagccaggcatctccactatctatttccaacacgttttcatcccgcaaacagaaactctggacccattaagcagtaactattscccccaagacccccagcccctggtaactttcagtctacttgagtctctatgaagttgcccattctagatacttcctgtaagttgactcatacaatatttccttttacgactggcttctttcacttaacataatgtttcaaagttcatccatgttgtagcatgtgtcagaaattcattcagttccaggcttgagggttaataattaattattattattattattattattattattatttgagatggagtcttgctctgttgcccaggctggaatgcagtggctcgatctcggctcactgcaacctctgcctgccaggttcaagcaattctcctgcctcagtctcctgagtaactgggattacaggcacccaccacccgccaccacgcccggctaatttttcatattttcagtagagacggggtttcaccatgttggccaggctggtcttgaactcctgtcttctgagtcgatccacccgcctcagcctctcaaastgctgggattacaggcgtgagccactgcacccggcctgttctagtctgtttacaaatctttggggtataggccaaggagtgaaagtgctggtaattctatcatatggtaattctatgtttaactttctgaggagctgccaaattgctttccatagtggctgcatcattttatgtttctaccagcaatgtacaagggttccagtttctctacatccttgccagtacttattcttttccatttttaaaatcatagccctgctagtgggtgtgaagtggcatctcattatggctttgatgtgcatttctctaggactaatgacgttgagcatctcagacattagtgccactcctttggagaaatgtctgtttctcctctgcccgtttttagtttttaattaattaattaatttttgagacagaatctcgctctgtcacccaggctggagtgcagtggcgccatctcagctcactgcaacctctgccccctggattcaagccattctcctgcctcagcctcccgagtagctgggattacaggcacctgccaccatgcccagttaatttttgtgtttttagtggagatggggttttactatgttggccaggctggtctcgaactcctgacctcaggtgatccacctcaggtgatcagcctcccaaagtactgggattacaggcatgagccactgcacccggcctttattttttataattattattttttattaaaaaaatttttttgagacagagtcttgctatatcatccaagttggagtgcagctgggtcacacctgtaatcccagctcctcaggaggctgaggcacgagaatcacttgaacctgggaggcggagattcaagtgagccgagatcgcgccattgcactccagcagcagcatgatctcagctcactgcaacctccagctactggtttcaagtgatttcgtgcctcagcctctggagtgctgggattacgggcataggccaccaagcccggctaattttgttgttgttgttgtttttcttttgagatggagtctcgctctgttgcccaggctggagtgcaatggcttggtctcagctcaatacaacctccgcctcctgggttcaagcgattctcctgcctcagcctatgaagtagctgggactacaggcacctgccaccatgctcagctaatttttgtatttttagtagagacagagtttcactatgttggccaggctggtcttgaactcctgacctcgtgatctgcccgcctcggtctcccaaagtgctgggattataggcgtgagccaccacgcctggccttttttgtatttttagtagagacggggattcaccgtgttggccaggctggtctcaagctcctggtctctagtgatcctcccacttgagcctcccaaggtacagggattacaggtgtcatacgggtatgagccattgcacccgaccagtggtgttactttttaataagttctgctgctcttttttttttttttgcaagatagggtctgactttgtcacccaggctaaagagcagtgacccagtcatagctcctacctcagcctcccaagtagctaggactacaaggacacgccgtcatgcctggctaatttaaaaaatcttttttgtagagatgaggtcttgctatgttgcccaggctggtcttgaactcctggtctcaagcaattctccttcctcagcctcttagagtgctgggattacaggcatgagctaccgtaccaagctaagggaaatgatttttttttttttttttttttttttggtcagtgtgcatatggggaactgatctgaacccaggtattctaggcccagggtcagagagtcagatcttaatccctcaggctaaacagtctctcaatttactcgttctccttcctcccttcctccctctctccctcctccctcctcctctctctctttctttccttccttcccttccttccttcctccctccctccctccctccctcccttcctgatggagtcttggtctgtcacccaggctggagtgcaatggcgcgatctcggctcacttgaatctccacctcccaggttcaagtgattctggtgcctcagcctcctgaggagctgggattacaggtgtgctgtaatttttgtatttttagtagacggggtttcaccatgttggccaggctggtcttgaactcctgacctcaagtgatccacccgccttggcctcccaaagtgctgggattacaggcatcagccaccgcacccgacccttgcttttcttttgaagtatcctattcttttcctgtcgtttctgtgaagcatccagggcttctctggtccaaagtcagtttttacatgaatgtcaggcttaagggattccagtgccaggcaggaagcataagtttggactcttcatttcgcccccgctctttcccggcctccaggaagcggtacctccggcggcgggcagctytgggacagctgaacaccatcctgctgstggcccagcccctgctccagaggcggcagagactgcaggtgcaggggcttgggtggggcggttcagggtagaagccaggctgcctgagctggccgagctggccaaatcccagcagcgttgaccctctcagcccggcctcgcacgggctgtggcttcagacacagtgctccttgaactcatcccttttccctccggccggggtaggccggggcccttgggaggtgctgtcttcctccatccctgcctactctccccagggcctggctcttccctcttgcctggggttcccatcccctccaggcctcccctgggccccgtccgctcccctcttttgcatgatgactcaaatctaaggtctataaagcgactcaaaggtcaatgcccacgtgctaccccctctctggcccctccctggctggactttgtcccctgggaccatttcttcccttcttcctgccctcttcccggtgccctggcagatgggcacagacgcccacagtgctaaggctggtgaggkccctggagggccaggggtggctggcccctcctgatstgttctcactcctttgctgagaacctcccaggggcaggaggggacagctgaacttcagagctggggaggtgcccccaggtgactcacatgggaggcatcagctcttcccacatctcttccaacagcttgggcgttggcagggctggcatagcagcgaaagggccttggagagagtgccaagcatggtaggtggcctggaaagtggggggttttacatggggctatgaacctgctgagactgggacagcttagagggctgccagggtgctaccgtgggtcttgtccctcagggccatgcattgcacctcctgagaagaggaccggggtgctcttggctcttggtttccctcagagggtctttggggctctgtttgttcgagtgtccagggtcagaatccttggtctttggctgggtgtggtggcacacacctgtaatcccagcactttgaggtcgaggtgtgaggattgcttgagcccaggaatttgagaccagcctgggcaacatgacaagaccccatctctacaaaaacaataaaaattagctggacacagtagcacatgcctatagtctcagctactcaggaggtttgaggtgggaggatcgcttgagctrgagcctcagaagtcaaggctgcagtgagccatgatggtaccactgcactctagcctgggtgacagagtgagaccctgcctcaaaaaaaaaaaaaaaaaaaaaatccgtggtctttggaagggatgtttataatcttggggttgagggtgtggggagggacactggtccctaggcccctcctgtggatcctgggtaaatgagtcccctctgccaggagctggggcgcttggagatcccggctgagctggccgtcatgctgaagacggcggaaagtgagtcttgttggtgtcctcttgttaggactccttctccagtccctttactgtggggtgtgtcygtcccttgtggttcctccctctgatgctccagactcccctgagctcatcacttgggtccctgtggacaggggctgatggctcgtggtgagggatggaggtggtcccagggccaggtaccacacctggatrctcctgggctgcctcccggtgcttgttcccaggccatcgggacgccctggctgggagcatcaccgagtgcctgccgcctgaggttcctgcccggcccagcctgactctcccagcagacattgacctgttccctttctccagcttcgtcgccatcggctttcaggtgggcgcccaggcctaagctcttcccrctggcctcaccgctctgagttagcacctgcctgacagatgctgcgtttttttccccgctgtcagctcttgccctcctycctccccagcctttggggctgtgagtagcgctgaattgctctgaaaataaccgttgaatgtaattgtctcaccatagagcgttactggagataacagttggtgttattgaatgggagacrttatttagatccacgatgccacacctttgttgtacctgcggtagtgccctgcttttgaagtcatgaccttaaagaatgtttattgacaagggaaattgtccagacttcagcagtaaatacaaatgcaggttcaaaactgcacatacaggttggacatggtggctcatgcttgtaatcccagcacttttgggaggccgaggtgggtggatcacctgaggtcaggagtttgagaccggcctggccaacatggtgaaaccccgtctctactaaaaatacaaaaattagccagacatgcgcctgtagtcccagctactcaggaggctgagacaggagaatcacttgaacctgggaggtggaggctgcagtgagctgagattgtgccactgcactccagcctgggcgacagacaagactctgcctcaaaaaaaaaaaaaggcattaagatgcatttctgtccagcccctctgcctctcccgaggtgcctgctccggtggggctcccctgggctgtctgatagctggtgagcatggactgagccctctccttccttgcaggaaccgtccctgcccaggccagggcagccaytggcgaagcccctaacccagctggatggagacaaccctcagcgtgccctggacatcaacaaagtggtgagtgacacattggagaagggacaggataggcgcctgggagccccgcacgtcctgtccttacccggctgtgtcggcagatgctgcggctcctgggggacggatccctggagtcctggcagaggcagatcatgggcrcatacctggtgcggcaggggcagtgcyggccagggctgcggaatgagctctttagccagctggtggcccagctatggcagaacccagatgaacagcagagccagcgtggctgggccctcatggctgttttgctcagcgcctttcccccactgcctgtcctacagaagccactgctcaagtaaggggcctgggaggtggggacctggcaggtggggtcgctggatcaccctgcctccactgcagcctgtgcccgccctgcaggttcgtgtctgaccaggcccccaggggcatggcagcgctgtgccagcacaagctgctgggggccttggagcagtcgcagctggcctcgggggccactcgggcccaccccccgacccagctggagtggctggccggatggcggcggggccgcatggcgctggatgtgttcaccttcagcggtgagggctgcctctggctgaggcctcccaggcctgaagtggggccagccctacccctttgccctccctggaaccccttcctgccccagtcttcctgctgccctgtcctcagtgaccctgatccccctcccctctgtcctgcttttgaaactctcatggggacagcagccccttcctgtcagggtggactctgctgtccctcactcttgcccccgccccccatgcccctgcagaggagtgctactcggccgaggtggagtcttggaccaccggggagcagctggctgggtggatcctgcagagcaggtatggggaccggggatgggggacagtgtggccaaagtgacccttgtcctataccctcctccttctccaagcccagtctcaggggccgggaggagaggtgccccggggtgggcaggggccagactgcagatggcgatggggagccgggggcagattaggaatgaggggcttgggagctcccacggcagattctaactcagcaggtcagaaaagaaatgcccatgctggagcccttgtggaagtggagggccgtgaggtgaggaggggagcagcccccactgctgagcaaacctgggtcccggaccaggcggatccagggccaccctcccttcctcagccccctgyccccttggcccaccctgtggtccttgcccccttctggatggccgcctgcctcactgactggtcccctcccacccagaggcctggaggcgcctccccggggctggtctgtgtcactgcactccagggacgcatggcaggacttggctggctgcgactttgtgctggacctgatcagccagactgaggacctgggggacccagctcgcccccgcagctaccccatcactcctcttggctcgtaggtgccacccagcacccctctccctggcctgctcctgccggggaaccccacagccaccctgccacactcaggggtttataggagctgccacaggcccagccctcccacccagcctcctcccaaccatggggtgacccccgcagcagcttctacctcttgccccagcctgggtgaccctcagccttggccacccccttagctggatcccgtttcctgcagagccgaggccattccccttgcccctggcattcaggccccctcactgcccccaggaccccctccaggtccagccccaacgctgcccagcagggaccacacaggtaaggctggagtgggcacatggaggttggcagagcatgggaagccccacgccccgggccatggctccaaccctctccctgccccacaggggaggtccagaggtcagggagcctggacggcttcctggaccagatcttccagccagtgatatcctccggcctcagcgtgagtcgggcacagcccccaaatgcccctgccccaaccccccggrgcctctsctgccccttccatttttctcagggctctcactctgacctgtgaccattgtccctttaggatctggaacaaagctgggctctgagcagccgcatgaagggagggggcgccattgggcccacacagcagggctaccccatgggtgagtgaggggctgattcctcacccagggcctccgggcccggcagcatggcaggcatggcctgggacccctctggcagtggcgatcgatgccctggccagcaccccggtgcccgatgctcttctctgtgcctggggctggagggaggtggcatgtgggcccaggcagggactgacagggagggcgtgttccctcagtgtacccaggaatgattcagatgcctgcataccagccaggcatggtccctgcacccatgcccatgatgccagcaatgggcacagtccctgccatgccaggtaagtctgggctgggggcaccagagtcccttctcaggagagcagccrccagctctgggactggaggagggagggtcctgctaggagtcccgagtgcacagtgggcagcgagcttcaaggctggccatggtgcccaccactctggccgcctgccgccctcacagccatggtggtgccgccgcagccaccgcttcccagcctggatgcagggcagctggccgtccagcagcagaactttatccagcagcaggcgctaatcctggtgagcgctggcagggccctggggccacctggtggaggagaggyctgtggctcggggatgagggtctgaactggctgctcctcctgcttcaggcccagcagatgacagcccaggccatgtccctgtccctggagcagcagaygcagcagcggcagcagcaggctcgggcctccgaggctgcgtcccaggcctcaccctcagccgtcacctccaagcccaggaagccycccacacccccggagaagccacagcgtgacctgggatcagagggtggctgcctgagggtgaggaggtgaccatattctcaggaagggatgtgagggtggggactgcaggggcaggggacatgggcagggtgagtaggcagacacagggaagaggctgctggcccaggactggggacccgaggggtgtggcgagtgtggcacccaggctggctgagctgccactcatttctgcttctgccaggagacctccgaggaggctgaagacaggccctatcagcccaagagcttccagcagaaacggaactatttccagaggatgggtgagggcacttggggtggcaggaccgtgcagaaacatggccagtgcccctggcccgggccagggagggtggggtgtgctctgctccccggagttggtgcggcccatccaggagcccagctggsscagtatgggtaactttgaaggccatctggacacttgcagggcagccacagatcacagtgaggacgatgaagcccccggccaaggtccacatcccccagggggaagcgcaggaggaggaggaggaggaggaggaggaggaggagcaggaggagcaagaagtggaaacaagagcaggttgtggggagctgggcagggcctggggctccggtggctctgcacgcggttaacagtctttcctgtttcctggtcagtgccgtcccctcctcctccccccatcgtgaagaagccattgaagcaaggtggggccaaagctccaaaagaggctgaggctgagccagccaaggagacagcggccaagggccatggccaagggccagcccaaggcagggggactgtggtgcgcagctcagactccaagcccaagcggccacaacccagcagggaaattggcaacatcatccgcatgtaccagagccgcccgggccccgtgcctgtgcccgtgcagccatccaggtgggcccccacggggaggtggccagggctgtcccgctcctcggggaatcaccctatgaacttagtgacctcttgcttctcccacgaggcctcccaaagctttcctgaggaaaatcgaccccaaggacgaggctctggccaagctgggtatcaacggtgcccactcgtccccgccggtgagcaccccagcctgtctcccccagagtgtgtgctgcygcactggggagctcaaggctctctggggcgaacttggccttgtgctgtgactcagcccgtgtactttctccgtatccccccagatgctgtcccccagcccaggaaagggccccccgccagctgtggctcctcgacccaaggccccgctacagcttgggccctctagctccatcaaggaaaagcaggggccccttctggacctgtttggccagaagctgcctattgcccacacacccccacctccaccagcgccaccactgcctctgcccgaggacccagggaccctttcagcagagcgtcgttgtaaggaaccacatttctcctgcgccgtgggcttcactggggcagaggcagggttcgcacagactctcggtgcccagggctgaaggcatttctgcgtggctgaggccagctgttcgggcttctggactttggagccatacgtagctggggagtcccagcttccgcgttcccacccagggcagggcctgggcatctttggggctgtcatcgagaggctgtcacacacagggtgttgtccctgacacatacccgacagctctgtgaggaagttacgatgagctctggctgacatggtcatagaagacccacgagcctcacggacgccagggaaagtttagggcccaaaatggaggcaggagatggtgccatggaaggagtaaggcagctggaggttgggagagccgggcccttggaaggctcgtggggatgaaggtcttccctcccgtgcccccatcactctggctctgcagcccctcactgaggctcctcaccccctcctctctgccaggcttgacacagcccgtggaggaccagggggtctccacmcagctactygcgccctctggcagcgtgtgcttctcctacaccggcacrccctggaagttgttcctaygcaaggaggtgggcatgagggtggggccttggcctggcctctttgggctggcagggaggcggcaggctttgtgcatcccagcctgggaccccagcatcccctccccacagcccaccatctcaaggctgattttccaggcctgggagggcagaggcttgctgggaagaggcaccagacccaccgatctttgcccttctgtgccctcctccaggtgttctacccacgggagaacttcagccatccctactacctgaggctcctctgtgagcaggtgagagctggcccacctgccagcctgagacatctgcagagacagcatccttcgtgccctttgtctaatggctgggccaggttaacaccacrtagggcatgttggcagccagcactggggggcacttctgtgtgcccagacctgccttcattgaaccttcacaacattcctgagaagtagggaccatggccaggtgcggtggctcatgcctgtaatcccagcactttgggaggccaaggcaggtggatcatgaggtcaggagttcgagaccagtctggccaacatggtgaaactccatgtctattaaaaatacaaaaatcaggcgtggtggcacgcacctgtaaccccagctacttgggaggctgaggcaggagaattgcttgaacccgggaggcagaggttgtagtgagccgagattgtgccactgcactcccgcctgggtgacagagcgagactgtgtytcaacaacaacaagaagtagggaccattattcatctagttttatagataaagtttaaaagcaaagtgygtacagtgcacaacacaggctctagcacacagtaggtacttaataaatggttgtcactttgccacctctgaacgctcccaggagtgagcctctgttccccctaattctgcagtagcaccygccccctgccccgaacaatcttgtatctgggctgatccragggcagttaccacrrggtctctgggcagtgagtgaaaagggagggctrgcagttgcaggggaggggacaggtgagacgtgtgaatggaggtggcccaagccctccatccctccctgccccacctaggccctctgctgagcacacaggccatgggggccagggcgccctccatcggcctcctcaggttttccttcatgcatgtggatggctgctctgggggtgggctctgtctcaggacctggtggtgaccacctcgctctgcccccagatcctacgggacaccttctccgagtcctgtatccggatttcccagaatgagcggcrgaaaatgaaagacctgctgggtatgggtccagggaccatggagttgggagcttgagtgctgggggccgcgcctgccctgaaggagggagcagcatgggagcaaactctagagccccctctgtgtgagcagagggcagcctgggtccttcctgcccacaggaggcttggaggtggacctggattctctcaccaccaccgaagacagcgtcaagaagcgcatcgtggtggccgctcgggacaactgggccaattacttctcccgcttctttcctgtctcggtcagtggcgctggrgtagggagtagggatgccaggcccccagcctggatcctggggtgcatgggcacagaccacaagcaggagagcnggggagcagacgccaggggaaggacaaagcccagccactggccctgggcagctccagggcatcttgggcagtagcaggacccaggagactgcccgagacccaccaccttcctgtagggcgagagtggcagcgacgtgcagctgttagccgtgtcccaccgtgggctgcgactgctcaaggtgacccaaggcccyggcctccgccccraccagctgaagattctctgctcatacaggtgcgctrgcccacgaccctgggctagaggtgggggcaggtggcaaggtgaccycagttcatgcccgatccctgcgcagcttygcggaggtgctgggtgtggartgccggggcggctccaccctggagctgtcactgaagagcgagcagctggtgctgcacacagcccgggcaagggccmtcgaggcgctggttgagctattcctgaaygascttaagaaggtaagtgtggggcacgggttgagaggccgggcagacagccctcaccgatgctgcatctccctgtccgtcttccctgtgggggcaggggctgggagtttgggccaaatccctgaagtctggggtgctaggtggaggggsaggccagcagggggagcaggtgggcaggcaggacagggaggcacaggcagacttgctgctccaggccctcgcctgcttgcccacaggactccggctatgtcatcgccctgcgcagctacatcactgacaactgcagcctcctcagcttccaccgtggggacctcatcaagctgctgccggtggccaccctggagccaggtatcgccwgaggccggcaggggctcacacagggagggcatccacttggcagaggctgcccrggggcagagggtccagtgggtgagccacatccctgggtgccttccaggctggcagtttggctctgccgggggccgttccrgactctttcctgccgacatagtgcagccggctgccgctcccgacttttccttctccaaggagcagaggagtggctggcacaagggtcagctgtccaacggggaaccagggctggctcggtgggacagggcctcagaggtgaggaagatgggagagggacaagcagaggcaaggcctgcctgagactgaggaaggaaaggggtttgaccactcccgaggctgccatgcggtgggaccaccctgctgtccgtctcctgtggctgcccctctgcccsctcctgatggmtcgccttgtctctccagcaagactgtgcactccttgcaggcaggggctgggctggrtgctgctcttgtgtcccacgtggtacttagttcaaggctgccccagcagatgcttaataaacagctcttcactttcctggcttctggtcttgctcctttggtgtctggctggggagggatggggctggggcaggacccctgggacagggcactggacactcaggtggcaccaggtttcttgtgmtcccagcgccctgcccacccttggagccaggcacacagtgacgactcggaggcyaccagcctgtcctctgtggcctatgcctttctgcccgactcccacagctacaccatgcaggaattcgcccggcgttacttccggaggtcccaggccttgtgagtgcactgggccaacccctgtgcctgtctgtcctcagtcttcctgagagagagcaccctgctcagagccactgggctgtgctcttagcactctccctgcctggctggctgggatganggcaggasggccaaacaagctgggcngtctccctctgccccccacaggctgrkccagactgatggaggtgccgcargaaaggacacggacagcctggtgcagtacaccaaggtgggagagaggcagggaggggtctggcccgtagatctgccctctgacccccacggccccccagacccatggcctcctctctttggccacaggctcccatccaggagtcgctcctcagcctcagtgatgatgtgagcaagctggctgtagccagcttcctgggtgagtggccacaggcatcctgggtccccatgtctgcagtgccatgaacctgggtgtctggtccccttatctccttgagctctgcctggctctgtcccagtctgccaactccgggaagctcactggtggttcctggaccccagggccctcacccgcttctactcccactcaagggttgtgggttgtgtggagtctggggttggaaggcagtccatgggtccagaggatgctatgtgctgtgtggggccttggatacccaggagcctcagtttccccatgagtcgagctgcaaccagctgccctggctggcatctatgcattttgagagtgaggcatcagatggcaggtgaaggccctgcacagcaacagcatgagccggggccagccccagcacagccccagctatgtgccctgtttcttatcgtgcctgcagccctgatgcggtttatgggtgaccagtccaagccccggggcaaggatgagatggatctgctctatgaactgctgaaggtaagcctgggctgtgcgacccccagcgcctgtgcctgtcctcctgtctgggcctgaaggagatccccttctcttggtcactgtccttcaaatcattccaaagtatttactgagcacccattgcgtgcagsggggtgtggctgtgaagccaacaggctaagtctctgcagtgcttacaatgagataacttatgtgtctgggagtgagaggycactggagagtaagaatgcagggaaggggctgctgcagtggagaaggctttgtggcagaagccttcctacagggagggaaggagtgagcacggggtgacagagaagggcaggcaacagttcagatgtggggggaagcctcggcaccatcacgcaccgggaccagygtggctgagcctagtgagctgcagggagaacggaggatgaggatggggagcggatggtgggtccaggccaccacaggccttgtagccatcattggcctctgatttttggagagatgggaaaccaccagaggattctggagagagactcggcttacatttcacagggtcactcggctgttgtttgagattctgggtgtctaagtttaaaagcaaaaggaagttattgcagtggtcccaggtgagggatggtgctggcagcaagggagaagcagaagattgagccagcagagtgtgctgaccaattgcatgtgggctacgggaaggaggacaactactgtcttcaaggagcaggtcttggctggtggaggaaatctgttttggacamgtgaggtctgaaatcccagacttcccagtggaggagtctggggttcaagggagaaggctggaggcaggcaccaggagtcatcaaatgggaccagctgaggacacggggagaagggcagacagagagaggttcaagggcacagcaccgctcagaggtcagggagttaaggtggagccagcagagatgagtaagagatcagagaagcaggggccgggcgcggcggctcccgcctgtaaccccagcactttgggaggccgaggcaggtggatcacctgaggtaggagttgcagaccagcccggccaacatggtgaaaccccgtctctactaaaaacacaaaaattagctgggcrtggtggagcacacctgtagtactcggaaggttgaggcaggagaatcgctagaacccaggagggtggaggttgcagtgagccaagatggcaccactgcactccagcctgggygacagggcaagactgtctcaaaaaaataaaaaataaatgaaaaggccgggcacggaggcccacatctgtaatcccagcactttgggaggccaaggcgggtggatcacctgaggtcaggagttcgagattaaacctggccaacgtagtgaaaccccatctctgctaaaaatacaaaagttagctgggygtggtggcacgcgcctattaatacttgggaggctgaggcaggagaattgcttgaacctgggaarcagattgcagtgagctgagatcatgccattgcattccagcctgtgtgacagagggagacgggagcagcgaagaaagtaactgagtagccagtgcagtgatgtcttaagctgagagagacatcttgagccagccccagcccatggcctagcagggtttctccagggcttcagaccccaggctcaccgctgccatccctcaccccacctgcccttcctgtccccacagctgtgccagcaggagaagctgagggatgagatttactgccaggttatcaagcaggtcacrggacacccccggccgtgagtggggaccggtggggtggggtggcttctgggggcagctgggcactgtggcctggccagcytgaagcccgagcgctctgccctgcagggaacactgcactcgaggctggagcttcctcagccttctcacaggcttcttccccccgtcgaccaggctgatgccctacctgaccaagtttctgcaggattcaggccccagccaaggtgcccgtgggaaggggagatggaggagaggcaggggtttctaggactgggaacttggtgggcttggggagacmtggccatctcataaccccaggctggcttctctgcagagctggcccggagcagccaggagcacctccagcgcacagtcaaatatggggggcgccggcggatgcccccaccgggtgaaatgaaggctttcctggtactgggggtggcggatgggcattgtgggacaccctggggtggggagtgtctcctacaggagaccactggccgactgaccctgcaacctgccttggcagaaaggacaagcgattcgcctgcttcttattcacctgccggggggtgtggattataggacraatatccagactttcacagtgagcttgggggccaccaagggaggaggccttgggcatcagttctgggtcccccagcctccctccccctcatcacagtctgtccacatgcccaggtagcagcagaagtgcaggaggagctgtgccggcaaatgggtatcacggagcctcaggaagtgcaggaattcgccctcttcctcatcaaagagaagagtaagcttggggacggagcctcacggtggggccactcccctgcccaggggtgaggtggtttggtttctgctggggtggcagggcmgggtgtgtgtggtctgagcagcagtggacctaggctccccatgcaggccagctggtgcggcccctgcagcccgccgaatacctcaacagcgtggtagtggaccaggacgtgagcctgcacagccggcggctccactgggagaccccactgcacttcgataactccacctacatcagcacccactacagccaggtcagcctgcctgcctccgagctgctgctgcagtttgagggcgcggcttcctgcctgggcgacctccaagcccctctccccacaagggtgtgggtctgtggtggctggggggtgacagtggcaaaaggaggcttgagcctctagagccaccaactgatggggggctttggaccaccgctgccctcctcaccgtgctccccgcacaggtgctgtgggactaccttcaggggaagctgccagtcagcgccaaggcagacgcgcagctcgccaggctggccgccctgcagcacctcagcaaggccaacaggaataccccctcagggtgagtggaggcacctcccgcccctaagcccctccccttctctaaggtcaaggccatttgactggtacccttcctggccctaaatggactggccaggagcagcggggcctgtgracatctgtcctctccaccccaccccgagctcctctggtgcaggaccctcacctcattcatgtrtatggatgtctagtcttgcccacaataggcactggttatttggcacgtgctgtatgcccagccctgtaccaggtggtcaggggccaaactgaccctggtcacacatcctaggcaggacctgctagcttacgtgccaaagcagctgcaacggcaggtgaacacggcctccatcaagaacctgatgggtcaggagctgagacggctggaaggacacagcccccaggaagcacagatcagcttcattggtgggtctgggactaggggaccgctgggtgggggctggaggccaagagggaaggaatgcaggtagaggggcgaggaggggtctgcgcctgccctgtccctctcakctgacctgggggaccaagcagagcaggttccagggccccagcagtcagatttcctgcctgcaccctctccacccgcagaggccatgagccagctgcccctcttcggctacaccgtctatggggtgctgcgagtgagcatgcaggccctgtccggacccactctcctggggctcaaccgccagcatctcatcctcatggaccccagctcccaggtgggcacagctcttgcctcagcactggcctagggacccttgggctgttccatcacccacaatgacccctccccggagaggagaccagccctgctctctgctgcccccagagcctgtactgccgcattgccctgaagagcctgcagcggctccacctgctaagccctctggaggagaaggggccccctggcctggaagtcaactatggctcagctgacaayccccagaccatctggtttgagctgccacaggtgagtggccaggcctctggccaccttgcraaggtggatgtgagggccttgccccagcatggcgtgcrgtgggagcccaggcccaggccgatgcccactgctccggagtgctgtgggccggggcagaggcgaggggctggctggggagccctcttgtaacaggcctttctctgggcaggcccaggagctgctatacaccactgtcttcctgatagacagcagtgcctcttgcactgagtggcccagcatcaactgagaggagtgcaggccggggagagaagaggatgaggcctcccccggcccaagtctcacccacatggtctgccttggatgctatcagatcactgttytagaacctgcctcagcacagcccagccggcccacatgcaggccatgaggcaggggctgctatcacgtcaccagcaggcaaaraaaacagccagaccctctccaggacggcctggggccaaagcgggctgcaggaactcggctggggcacctgaggttgcccagtctgagggagatgcccacccgaccccaggctccgcccaggccccacattagcacaagcccaggcatgggagaaacagctgctgaggaaataaaactccctggagaaaagggctgkgtgcacgcctgcatgccccacaacaacacaactttattcctctcccaaacatctgtcaggcctggccttcctgagcaggagctgagcaggaacagggcctggctgcctctcctctgccacagctctgacctgggcaaggctggaagctggcatcgtaatggatgggggagtgggtggaggatctgagggtcccctgggtaggttccgataccttggacaggtgggcctcatcctgacttaraactcggggaggggccactcttccttccccttcttccagcagcagctccaccaccctccaccttctgtcctcgacatgtgtcccagaaaacccagccatgaggaccgctctgagaagggtctataggctttgcaagyagaaagaaaggtgggctgacctctgacctggattcagggggtgtctggggtcatccccaaagccaagtatggttggaaaggagaaggactgagaaaagacgatggccctggcatcagcaggtgaggcccaggatgacccatgctagaatctgggggaggacgcgggccctgcccagccagcagttggtcatctctgggggccacacaggccatgccagtcagcttcgctctcgcaccgggcccggccatggaagaagtgcctgatgaggttctgggcctcttctttcactacagattcagggtgggggcatgaggaggtgagcgttagcctcctccctgtagaccaccctcccaagtgcctcctggccctggcaatgccagcgctcaccgctccttccaggagaggtcttctgagtcagcaagtgtgagaggtggcgggcaaagcctttaaacaactcctggaagggagagggagaagagaagcagagagcaggacccttggtggccgggcgcagtggctcacgcctgtaatcccagcactttgggaggccgaggcgggcggatcatgaggtcaggagatcgagaccatcctggctaacacggtgaaaccctgactctactaaaaataccaaaaattagccaggcgtggtggcgggtgcctgtagtcccagctactcgggaggctgaggcaggagaatggcgtgaacccgggaggcggaggttgcagtgagctgaaatcgcaccactgcactccagcctgggcgacagagataaaaaaaaaaaaaaaagagagcaggaccctgccctgacccccagagcaacccacggccatgacccaacggcaaggcaggccccagggaggacgggcgtggggctggccctaggcccactgtgttctggggctcaaactccctgcctcccacccccactacacccacataccccaggcatgggagaaggcagagcccactcactccccctaccttggaagcaaacttgccctccttgtagaaaggggtgaggcacttgaccacaacatttgcagcctccttcaaggagacgccaggagcggagagctggaaggggtcttgagccgtgggattcaaggtgccctgttcgctggccgagacgctgcccttgacctcagctacgacggagggcttggctgaggggcgtggcctcttctgaggctggctctctgggttctcctgagaagggccacagcagagggtcactcctgagctcccttccactggcctgctcccctcctccagaagactgggtccccgcaccagctgcctctctccagcccagcccatctgctgccaggtgtggaaagaaagctgattttccctgaccccttgagcagggcacaacagctcctggcctcgcccacagcccttctctcctccccaacagactcatccctgccggcacctgctgggatcgaggccgcttgcccttccatgtgtcctttgcaggggtgggctggacttcaggggtgccctggtctctgggcgggcaggtgctggtagagggaagagcaggcatcacagcactgggtcctggtggctccctcatcccaggaggcctaggagagcccatctcaggggtgagctctgagcttcagacgcccagtgagcaaaggggatgctgccgtgtaggttccagaagattctatgactacctgtacccttaccttggcctctccctgaggcactcctcagtctggggaggggcaggcgaatgtcccccggctccatcttcctcccctgtgtacttctctggggccatcgggggtccctgaaccccctcacaggaggggcaggcaccttctgcctctggggctgatgccagcagagctgggctttccacccttcggcagaagaagcgggcgatgctctgagaatccttgtgggccgctgtggctaggagctgctgtttcttgctagcccggcccttggcaagggaactgcccccagaggaactttttgccttcttctcaggggagggccccccatagtgagcgctgcctccagggacctcccctctgggcccagggaggggctcactcccatcctcatccaggaggccacagggccggctcgggggctcgtgctcgcctccccgctcgggctggggggcttgctccctgatccgagtcgtctccatcagttccgtggccgtctggaacgggcaggagcctttggggaaaccagctcccacccgcttgggtttgagctgtaaatgtgagcaggaggagaggaggttcagcccactaggcccccttgagggcaccgctggctggagcagtcactcacattgggacggggctctcaggagtgtgggagggaagaggcaggcaggaccctggtggggagccaggccttggcaagaggtgcacccctgagggcagaggggaagtgaagcctttcctggtcacaggtctggaggccactgggccacagctcaccgagtacacatgggaggctggtggaatgtcatactcattgggctccgggggctcagcttgggcactgcagctcttggcactgcctcccatgtcatagggctgcccatccttggaggctctgtggatatcggccacctgggcagggataggcagggaggctgtggcacccgccagctcctcctgacatgccccacctagccctccttttctactaggcactacaagtgggtttctgtggccagtggccacaggcaactgaccactgggcaagttttaggcctcccatcctcacagggttggctagaaacatgtccagccagtggagaatggagctctacccccataaactgtctctggggtgggctggggagggtgagttctgggctgcctgagcccagagagctggcagacagcttctgcctcagagtatggaggggcccctgcaacgaccctgggtccgcctgcaccaggcccaccttcttcagcacgctggccttgtagaggttggccaccttggcgttccggaatgtctcatgttccagctccacggccttggcccggaggtcagctctgtgggtgcaaggtaacaggcacaaggtatcaggtgggcctgggcttctccctgctgagctcttgcgggactccaggcctggtggggtaggccttgggcacagggattctgattagggctctctgagcaccctgtggcttactgtccctcagcagctgctggtagcacctaagttgtagccatgcctggccctggtggggttgtaggggcagtcccctggagtaggagaggtacaatctggggagaggtggcccaaacaggccagggttgacagggtcctgcagtctccaagggaacgagagcttggagtgctcctcagcccagtgatcgtggaactcactcatcagcggtacgtgttgactggcggttgctgctcagcgcctcctccagaagccgcaggcagtgctcccgtgcctggcacaggacagtgagactggtcgcatggcctcgcggctgggagagggccccggggggtggctgaggagctgcccgtctcttaccttcacagtcagcctggggatcctcctgctagaagcctctttcaggggacagttctcatctgtgggggggggggggtggtccttggtcctttcgctccaccttctgcgctctgaggtcccccacagcccggatgagaatcctccctccatgccccgggaagagcccacaagcctccaggaacatttctgtactgacctgggggtacaaattcttctatcttggggtctttgccctggaggacaacatgaaggacccatgaggcgtcctgccctgccgcaggacagtcccatccagcaccagagaaggggctgagaggtgcgagcagggggccaccaggggccccacacaggccactgagtgcctcccctcaccttgcgcagctgcatctgcttctgatagaagaggttccactcccgcttgtgggcctcatctctgccttcatccccgctgcctccagaaccttcgtcatacctagggacaggccaggcgtgagtggccctggcctgggctctgccctccccatgtgtgctgctgctagaacggcaatgtccctgatgtcctaccagctcaaggggggattgcggcatcgtgccacctctggtctggccctggcgccaagggaatgccaggcaattccagcgggttggagccctggcttctcggccccttacctgctgaagtccccgtagcccttgcggcctccctcgtacagctcggggtcaaagccgttcccctgggagggcccgatgcaggtcttgctccagctgctgctgcgctccaaggcctccagccgcctccgcacggccgtggggttctggcagtggtcgcagcctttggcgcaggcaggcagcgcatccccgaagtacttggcaatggcggcatggcggcacctggagcaggcagcaccgcagaggtgaggggcggagagcccagtcggccagcgtctgttcacccgagcccgaatcgctagctgagcgagcactgccgcgtccggcaccatgccgggagccccacacccctcatctcatccaagctgcaccaggcatcgtttggctctccccactacacagatgaggacgataaggtgaaccaactttcccaaggtcacgtaacacatgggggtctcccgggaagcaggatgtgaaccccactctgtccagttactcctctgctcctcccctctgtcctctggcaatgggatgtagatgctggctctgccatgaagggtgtcttttgggtgacacacttcacctcctaaagcccatgcattcccgtcagtaagatggtgcagaaaggcacagccctcacggactgagcgaagatggctgaggtgatgtctgaagtgcattacagtacagtcatgccccatggaatgactgcacagccaatggtggtcccctacgattctaacactgtatttctactgtactttttctatgcttatgtgtgcttagatatgtgaataccactgtgttacaactgcatacggtactcaggacagtaacgtgatgtacaggtttgtggtctaggagcaacaagctgtagcgcatggcctgggtgtgtaggaggctgtgccgcttgatatttttttccttctcttccctggaattgctgtttgatttccctaagtatactctgtgaccgcacaatgacaagttaaatttctcaaaacgtatttgcattgctaaggcaggcacggctgtgtagtaatatgtcccatcatcaacccgtgagggtgtcacaggtggggcctttagccagggagacgcagcctcgcctggagtcctcctctcgtcttcctctgtctcaaccctgctgcagccctcctggggtgagcggcctctgcccatgctgggagcagggagcagcctctggctggcccacgaggctctgtcgcatctctgttccctctgcatgggggtggctgtcgacccttggggcagctgcagaggccgcaagaggggccatagctctctcaggctccttataaacagccattcctgccaccaggaacgtggcacagggtagggaagcccaagaggagatgctggaacacaggcagggctgtctggggtgccacatcccagggacaagaatagctggcattaactgctctaactagaactcctcccagtgtgagcactgctgcggctgcaagaagccctttgaggggctgcgaccccaaggcgcaggctcaaggatgcaaggctgattgcaacaccccggtaaggaagcagggcctggctgactttcttttagctgagtgaatgcagctctgaagcctgacctgggctgggacagccgaggcggccaccagagggcgctcctgcccccactctgctccaatgagtaaatgcaacaaatggttcatccccaggagtccgtgcgcccgcacagcggccgcctgtccagcctctgggaggctctggcatccgagtggtgtgaccacatggctggcttcctccccctgccctcctcaggccctgactcactggggttttgtgctcggactcaaagagctccattgacagcggggctggggtcggtttctctccacacagcctagcctgctgggaggcacaaccaggcaaatgtcacagggcccggcccctggactctggagccctgccctgacagctgggccaggagtgcggtcacagccccagcagaaggccctcacctcacaaggaacatgaggcgccttgccgggcgcgcaggccactcccaggtcactcagga

SEQ ID NO: 94366 - DNA, 13676 bp, Homo sapiens
  misc_feature (1)...(13676): n = A,T,C or G
agagactcaggagttgagagtctaatttttggacctgctgatggttaagtcatagtgagtcagtgttaacgcgcaaagcgtttgacgagtccaatgtgcttccatactaagcagcaccaggtttcttttgctaaaattgaactcctgtgaaaaattcagagtgactaagttcattcaacaaagaccgtgggagcccgaggctggtaaacaatgagtccatcccgcatcccaggggactctggtggcagtgcagttttgccgagaggagttttaatttaaaaaaatgcaatcaggagaccagcaggtcctggaatgagtcaccctcagtgcatctgcggactcatcagacaccccaggccggcttcgggtggggaatgcactagaacgaagtgacacctttgactaaacgaggcctcccccgagtactcagagtggcccagacccctctcctcagggggctagcaggcttcagctctcatttgaaagggccgatatcaagcagagttgtgctgaggccagaaacccccacgggcaggtcctcccagggctgggagtgggcatgccgtggggccggcgctgccaggacaggagggtggccacgagctccagctccacaatgccaggccgaccctgccgtggggctggggctgggacttgctgtgctctgttggcagcagctgttcctcaggggtttccaggctcttggagatcagggacactcatttctcttgatcatggctgatacaagcatccctctctgtgtcaggtcctctccatggagaaagcatttctaggtgtttgggctggtgcccgcagcctgtgcctgtcctgggaggcagggcccatccacaggtgcccatcaacacagcttccccaacgcctgggcagcacaccggatccctgatgtctagggaagagtcttctaggtccccagaccccacccctcctgcccttgatcaagagaccagttcactactcagatgcacgtctccttggtgccttgaccattcatgtgacctttttggcatcacagatcaagtgtctgcagatgggcccagggcctgtaggtcagacattgccctttttccccagcctcaagcacaggggacacagggtgggctaggccagagcgccacctcctcagagaggcccctgggctccccactgagcatgatgagcctgggtgaggggaggcgcctgctgcggttgccccgggtggaggccgcatgtccggtgtcccttggtcattgctggtcttcgcctgggggcgggctggtcaggagaccgattgggtaacactcctgatttcggcttctctgaaacatgagaggctgcagtgctggagccactgcccagggtccctacctgcacccctgcctggcttgtcacatgctctgtgtccagcctggtcatgcctgtccttttccccacctcccctccgtaggcaaggtgcccggcgacgactgcccgctggtgtggggccagtgctcccactgcttccacatgcattgcatcctcaagtggctgcacgcacagcaggtgcagcagcactgccccatgtgccgccaggaatggaagttcaaggagtgaggcccgacctggctctcgctggaggggcatcctgagactccttcctcatgctggcgccgatggctgctggggacagcgcccctgagctgcaacaaggtggaaacaagggctggagctgcgtttgttttgccatcactatgttgacacttttatccaataagtgaaaactcattaaactactcaaatcttgctggaggcctctgggtgcctgtgttctcggcatatagatgtggtctcggtgtgttttgatatgaaaactctcatgaataaacatctccgtgaaacgccaaggccctcgtcaaaccctgagtcatgactgggaggagaaggagcaggatcagacggtagagcctggggcatgctcttcaggcatgctcttgcctgctggattgccggcggcggccctgggaccctccctcaggctggctctgagggaccctggctgtgcaaagctggcggccactgcttgtggcgcctccagactgaaggccaccatctctgagtgggcgtccattgttctcactgggactgtctgcagcggggctgggcctcccacagtgtagggatcagtgtcctgacactgggaagtgtgtccacacgtctgaggcttcccttcctagggaaaggtggccctgggaggctcctttgtgtgcctctgctccccacaatcgtggtgggaaggggccgctgggggagtggcagccccggcatctcaggctgcttctggacagagcacaggctgtgtctccagtaacctagggagcccttggcattcatggggccagtgacccgtgcccagtgtctcttgacccttcctcacagcaacctgaggagtagaccaggcctcacctgaaatctgtgtcagggttctctagagagacaggactctatatgaagagtatatatgaagagtttattgggagtattgactcacgtgatcacaaggtgaagtcccacaataagccatgtgcaaggtgaggagcaaggaagccagtctgagtcccaaaacaaaagtagagaagccgatagtgcagccttcatcctgtggccaaaggctgcagagcccctggcaagccactggtgtaggtccgagagtccaaaagctgaagaacctggaggccgacgtgcgagggcgggaagcatccagcatgggagaaagatggaggccagattcagccagtctagtctttccacgttcctctgcctgcttgtatcctggctgtgctggcagccgattaggtggtgcccacctggattgagggtgggtctgcctctcccagcccactgactcaaatgggaatctcctctggcaacaccctcacagacacacccagtgataatactttgcatccttcaatccagtcaagctgacactcagcattcaccatcacacctgggaagcatggaacccagaaacaagtgccagggctccagtgccagtgcctgtcctgggaagatacccaagagaagacatgaccaggaccttgggggagcatgaaatggtgagggcacagtgagcttgaaggctgatgtcacctgccaggagagcggctggcagtcctgcctggtgccccccaaggggcagagctggcagagaggggcctccaatcgaaggccaggagtcgtggagctccagtgccttggtgtggctggccttcttgcccccctcccagaggaccccgccagtaacagccctgctggtggaaccttccccagtgggcatgaaagaaatgagggccccacaagccacatggactctgatgcctggagccaagaataccccttagggtggtagaaaccgcccccggggcactgtgcagtgtggctggctctccagcatcaggagtactggggattgcctgggggacgactcctagggctgggcgcccgtgggccctcccctgctgccactgcggcccacgcaagccgggcctgaagggcgcgagcggcatgggtggggagcttgagggggcgttgggctcccaccaagcgccagatccttgcgcgcctccagctcgcccgcgcggctggttcctttgggatgcggaggtgcgacggctcctccgcgcgcgcccgctgcaccccagcccgcccgccgcccctcccggccctccgcagcctcggcccgccctcgccgcagatataaggcggcccaggcggtggctgctccgagcccggacgccgccgcccaccagtcagccggcgtccccatggcccggtccgcgacactggcggccgccgccctggcgctgtgcctgctgctggcgccgcctggcctcgcgtggtacaagccagcggcggggcacagctcctactcggtgggccgcgccgcggggctgctgtccggcctccgcaggtccccgtacgcgcggcgctcccagccctacagaggggcggaacccccgggcggggccggcgcctccccggagctgcaactgcaccccaggctgcggagcctcgtgagtccggcgtgccggggactgatggggggcggcggcaggacgtgggtgggggtgcggcggcccctcagcctttgcttgcctgccccccaggctgtgtgcgtccaggacgtcgccccaaacctgcagaggtgcgagcggctccccgacggccgcgggacctaccagtgcaaggcgaacgtcttcctgtccctgcgcgcagccgactgcctcgccgcctgagcccggacctctcctggcaccgctgggggccccccgcccccaccgtcccactcggtgaccccaggcccctccggcgcgggatggcgccccaggtctcccctactccgctcaccccgcagttaatggcaaacgaataaataaatgaggcggcctcggagtgaggggtgctggaggactggcagccaggccacgaggggaacgggacctggaaatccccaagcctgggtatgagaaggcagccgagtgtgcggcggcagggcaaggttggcctgggccgcccagaggtcttcagacccaggggcgaagctggccacgacccagccccgcggtgaagccgcgcctagccttggtgctccctgggggaagtgcagggccacggctggcccggttcccagtgtcctcccccagcccttcgctccccaactcgagagccaaatctgtgagggcatgggctggagcccctggctgccttcctcttgcccccatcccttctggccaggccaagtccgagggtgcaggggcaaggaggagagttgggggcctgagccctggctccagaggcccagagcatgcctccccagagctgaaggtgggagatgggtaggttctccctccgccgttgggtgtgactccggaactggcttgggctctggcctccaatgctgctacggggccaggcccacctccgggcccaggcagcagcactgcagggcctttctaccctccccaagcctggggcccaggcagcccctgtccagcaccaatctgtctatggggaactggctggtccctctgctcaggggaccccgcagtccagggttctgagtgggagcattggcaccaccccactcctgaaagcgggggcctggcaggatgaggatggcctgtgccccccacaccttggcccctggctcggagagcagggtgacaggctgccttcctgggctgtggagagcctcgcgtgcacctcgcctccagctcctgtgctgggtcgtgaggtcgacctcacaacagcagaggacaggcccatggggtgccacatgggccaggtgctgtagggcagaggccattctggagaggaatgtggggctgaaaaaagtactgatcataagcctcattttgaatgcggcgagaccaggcaatctatggcctccctagacacctcccggaggctgcagtaagaacctcttcggcctctgggctgctccaggcgggccgtgacaggggtgtgggagacagagatcccatggcccctggaggggccaaggggcaaggagcctcagctctggctctcctccttattctagcatcgcctgctacagggggtggccccaggctttggagggctggaggcctgggtttcactcactgccaggctgcccgctgcactcccggctgctgggtgcatggtgggggcagggccaagagggtctccttgctgagtggttccctggtccttcccagcagggctgggagccccgcgcagcactgccaccaggctttattcggttgtaccaaagagatttccgtcagccatgtacaaacagaacagagtccataaggagagtggcgaagctgccgggaaggaaggcaagcgtgttttcctggagccaggcgctgggtggcaggacaccgtgttggggggtgcccagtgggaggtggtgtggtctacacccagagaactaaaggggtgaccgcagtcactgctccctaaagccctctgctctgcacctcccgccacagctgggtgggcagtcagtgtggcctctgtccaggtggtgggggcatccggggaccaggtgggggcgcacgcaggagcggtgcgtttcaggctgcaggtgccgtctgcccgtctcacttccggcctctccactgtgctggacaccctctctgagcagctttgctggaaagagcggagagcctgctgcaaaccaggcaccttgtaggcaggcaaggaggcagagtcctcaccagcccttscagagccaggccagttagagagggcrgccctgcagagtcctatgtccaaacgcagaaggcrcagaagcagagcagggggagggccggccagggcctctgccaggttagaagtcaccatcgcgctcccccaggggctgtgccgcctgctgcctggcagcctccaggaaggccagctccttggcwtccttcttctggtttcgcgcctcatactccaacctgrgagggcagggtaagtctagcagagagygcccatgaggcggctccgagggggagggcasggtaagtctagcggagagcgcccatgaggcggctccgaggtgcccccacccaactgcacctgttggtgatgatccgctggacgatgaggtctgtggtgaggttgctgccactgtcaatctgacggaagatgccccttctcttgggctcctgggggtccagagaggaggagcgggatgaaggtccctgctgacctccccaagacccatctgatgccctgccccagagggagaccagcgcccagggtcccatgggagtggtgcagtcggagcagctgcgccaccatgcccgtttcccaggcaggcacagtgagtcattaaatggctgggaggtgccaatggcaacccctgtgcccagcaagggccagcatgacccacctggtatgggtcggagccatccctgtmagggataatttctgtcttgccgtgacacaccaggtccacctggagaaggagtggggtcaggagccctccccggggaggcagcggccgtcgccacccacagcccagcacaggccccgggggttgggagagctgaccctgccctttcctcagcccaggtacctcctgggccccgcctaggagcccacagccagcctgcattcccagcccatgcaggaacagaggtgaacagagggaacgaggtgagcccatgcggassctcaccttgaagtgacttaggagctctgctgtgaccgcgtacggggctccaatcaccacttctgacacgtactgtggggacagtgggggcagaaagacttgctcggtccctgctactggwaagccagggccacagggtggtgagagacggctcagacatggggcggggctgccagtgagtagcagggatgggctgggcaggctggggacccctggggctcctccatgagacaagaaggaacagcatctggagacctgaccacccctcytcatgcctcaacaaacaggtatgggcaggtgccacagaactcggggtgctgggtgcagctctgccagtgacccaagcccccctgccctggctcagggaggcmcttagtaggggggatgttgtgggaatgtctccccatccttgggctggctcctggcccccactcacccggcaggccagcacgctcagagtccgttcatgcagattcatgatggggtagttcttccccttgtagtgattgacctcctgcggccagagtgcggctagctcagcccggagactttttggggggacagggtgtgcccctcccggctgtccctcatgggaagaagtcggggaggttgctcgcccttgtggggatgccccagacaggacagccctggaccccagaagcctacgatcaccccccagggtctcctgtgacttcacctggggccccttcccagagaccacctgcacctaacagcaacgcttagggcccctcgagggcccatcagctgcccaggggcccagggagcaagaaggcagtgacctggtcaaagtgtaagcccgcgatgatgtagggcctctctgccagcctgtgcaccttctccaggaagtccacatgcccgatgtctgcacccaggttaagaagcagtcgggatggggatgacagggagcagctccctgacagctcatgcccaagggcctccccgccatcctccctgctgacagctgctcccctgcaaaccagccagcccagtctgggggccccaaggagtcaagtgaggcccccgggtcccaccccatgtggcacatgtaggggagcagcagaggcccagaggatacggaacaggtcgaaggcaccagccacatagatgactgtctcccctggctggggctccttcccagaagcaaactggatgatcttctgagatgtctgcaggaactgggataccccggtccaggggttccgcccaccagggcactgcaagccaagagagggagcaggttggcgggggaggcctcccaggtgctgccctcaccaggtcaccaaaccctcagctgtcacctgccagcaatcccatttccagccagtcatctcgggcaggggacacactgccaggccaggtggcaggtgggactgtggcgccaccccacaaccacagcaggcaccgcagcagacaccacttcagcccagcaagcgaccaccaggaggaggcaaggagccctgtggcaggtgcacacagcccttgggagggacctggtaccctgagaccactgtctggtcacctgggagcagccttctgaggaaagtatgtccccggcgggtatcgggtgagggggctacaatgggagagagggccaggccacttggttagaggccacctgtccacaggcaaatccttgctcctccaagcagtggctgccgtgaccggccagccggtgccaccacccgcctgccctccctcccagcatccaccagtgagccaaacctggcagtcagtgcctggtcagtgccagggacagagggaggagggtgaggctctgggctggcctttccccaagggatggctgggacaggtggccgggggagccccctgcagctgcgtgctcagctctccctgcacagccgcactcaccttgccaaaactgtctgcatactcccggtactcagaggacatctcctgcacagaaggtcagagcagggctgaggggcctgccctcccggcgtggccaccccagaaccggctggggatggggagcagtgggcaggaggaccctgagagggcagggaggtgcccctcctttcccctggagacctcgacccaggggcctcggggattccgccgccgactcacctggctgctgtgatgggctttggttaccagcagcatgcggcccacgaggtctgtggtggacaccccttgcgtgcgcttgcattctctgggggacacagtgggagtggggtctcatcctgggacactcgcaaggctctgcctcctgctaccaccactagggacactagcagccctgctgtggcagaacccacggctgccccaaagactgagggtccccttcctgtgcaaggccataacagaaaacctgggttgggaacatggggaaggcctccacgcttttattgactgaagggagtggcaggagcacagaaaaggacccttgctggggcccaggtgtgcaatgccagggagaggatgggcactggggtagcagctctgcttcctgcctccctcacacccacgtcctgcccgctgagcatctgcagctgagtgaattctcagctgcagcatctcatgcgggagccactggcctcatgtccctgacgtctggtaattcagatatagtgccagctccccagcagtgccagccacgtcccccgagctcaacagctgccacctcacaaagctgtgcctttggagccctggggccatgggtctgcagcaccaaatggcaagggcctccaggccaccccacaatggcacctccatccctcgagttcccagtcctgggcgtgaggaacatggcccagggcctggacgctcccctcacgggctcccggtaaatagcaaagcacgagccaggagggagccccgtgtccagctccctggatggccaggcccgcggtggagactcacctgtacctcccagcctgctttacttcctcataggtgtcccggccatctacagtcagggtgatgtcatctaagcagtgacacacaaggacaaggatccttaacccaaagccaccagaaccttcagagcccaggaccctctcggcccctggcctgccctagtgtccgcgtgcccatttctaggtgggggcccggaaatgtctcagatcctcaaagggcggaggccccctgttcccggatgtcccaccagcagatctgatcctgagccacctgatgtccccaggcccccaggtcccagccccgccactcactgccgtgaacacagaagtcacagttgtatttgtccagggtctctagtgtagtgacgtagggagccgctggcaccacctcgtccacccatttgatggcctgcaccatcttgtatctctcctcctgagtgaacaccgggggccccttgtgcttggcgatctcctctaggaaaaggacaacggggagactggggaccccagcccacccggcccctccagtaggaggccccttcccagcacccagctgtagccacacaagagggccggtgggggcaggctgtctctctaccctggcccttagcccactagtgctggccaactgggtggctctcttccctgcgagggtctcaggcaaaggcagagattccttctgacgagcaggtgctcagcccctgaaggcttgggagcctcgctggcagtggtggggagcaggtgccccttctctttagctgggacaggaaatgcaagatgggaaaggcattaggccatcctcagctggggctgggctgggtgagcctacagtgccctcccctacagctgtgccctggcaaggtggccccaggcctgcaggctttcagtcaacagtcgcaacccacaggagggctggggggccgcgggtgggcgaggccatctgtgcttaccatcggtgtgcacgcctacgatgaggtagtcacccatggcccgtgcctggcgcagctggttggagtggccgtaatgcaccatgtcatagctgtggagacagagagagtgggtggtccctgtgccaagggtggggaccaggtgtccctgtgggttaggggcagagctttgctcctctgaggactccttaggaagcgctctgagaagctgctgctgggagccctgggactgggattcggaggatgtaggtgctcagctctccaccccactggctcctgggcctgacggtgggacccctgtgccagatctagaaagggtggcaggggcagagatgtcaaggcctggctgggtctagaggactggtgggtgcaggacagactggagcccactgaaagctgcagggccacgtgtcctatcccctcaccaaatatcaactgccctgggcagtcactttaaaataagccgatgttaactcttggggtagggttggatcctagactaccttgagacaagcaaacagtccctggggctaacccaaaacaaatccaaccacaaaataaaaccctgggaatcactggccctgaaaatcctgtctctcctcccttacggcctcaagctcagcaggcttaacgctaagggtgaacagccactgccttgccacctggctcgagagttttcattcacaaatctaggtctgctaacacgtgaactctcaagcccaaagctacacagccctgccaccaactgggcctcgctgccctggcttcttcgccacttctttacagcagcggcccatcccctcaagtggacaaagctgtccctgcctctccagggagaggtgtgaccctggcagcccacacagtgcacagagttgctccactgcacaccactgcttcctcccagcacccctgccacagtgcgcggagcccggcagacatgctgggtaaaatctggcgggcccatgtacccactggacaggctggaggggaggagggggcagaggctgggccaggggagcacagtctggaatggggctggggcctggtcagggcaaggtcaaagtccactgacacaaagccacattccttttcccagaggtgactcggacacagaagacaaggccctgcttgctctcctgggaagggctaatcagatagaggcgcttgcttcctggattccatccggcaggcacgtgaaagggtcagaggtagcaaattatcagtaacggtcgtcttcctttcacttgttgacaacccgaaacttttcttaaaacaatgccctctgactggccagggaagaccgatcgcattctagccccgcggaggaggacccgggagcccgcgggcttcaccgcgggtcccggacaggcaggtcgcacccgatgcccacctacagggacgctcgcccggaggccaggggaacccctggaccggagccgggcaagctggttgctggtggttacggagaagcagggaggccgtggctccagatctcagcgcggtggctgcaccggagaggtcggcgtgaccgggcggggcctccgccagaggtagacggggtcgcccacggcagggcgcggagcctctgnnnnnnnnnnnnnnnnnnnnnnnnnnnnnnnnnnnnnnnnnnnnnnnnnnnnnnnnnnnnnnnnnnnnnnnnnnnnnnnnnnnnnnnnnnnnnnnnnnnnnnnnnnnnnnnnnnnnnnnnnnnnnnnnnnnnnnnnnnnnnnnnnnnnnnnnnnnnnnnnnnnnnnnnnnnnnnnnnnnnnnnnnnnnnnnnnnnnnnnnnnnnnnnnnnnnnnnnnnnnccccgcgctcaccagccatcgcaccacaccctcacggcgcgcctgccccccgggcccggctgctctgcgccgcctgcagccccgcgcccgttccggatcatggccccgcagcggcgcgcggagcagcctggcagctcccggcgactccgagcgccgccgcccgccccgccagcgcacgctcagcggccgtcacgcgggcctcacccgctgcgcacggccaatgggtcggcgctcggcccgagcccagcccccgcttcccccgccccgcctcccgccctccgccccgagccccaccccccgaaggccgcgccccaccgcacctccgcgcacggccaatggcgtgagcccctgacagagtcccgccccctccaaacgcacagccaatggcgtgtgccgcgctttccgagccccgccccccgacccacacctggcctctccgcaccgcccacacctggcgctcggctggcggggcagtgcggcgtggggaccgtcccaccgccgccacctccgggaacctccacggggcgctgtcccaaccaggggagttttttttcttattttttggcacaataatctacagttgtcccctgtccaaccaagggagttttaagccacgaccgagctgccaggcggcagacctgagcccggggagcccgcgccgaccactcggggacaccggaagccagtgcagaaacgtttaatagaaataaaaaggtctgcatagagccgaggctcggagccacccctctgccgcacatccagtacagagaggattctataaagttcacactttttcattaagtagtagtagaaatacggtgaggccctgagactg

SEQ ID NO: 94367 - DNA, 66922 bp, Homo sapiens
caaatgcatctgcccctagggggtgatggggaaccgccacacagggtgctgccaggctgggcctctttccacagagtctggtgcgagccccgtgcttagggacgccctccctcctcgaccaccaagtccagcgcccgccctcaggagcactggccacaggcctcatccgtggctggggccaaggccgaggggtctgaggatggactgggggtggcttacgctccatcttgctctctcgatgctgccaggcgtagaagttgagcagctcttttcggctgcgcttccgtctctccctctccagcacccgcaagctggctgcctcagtccgggggagcacaggccgccggccccggcgggtcaccttcacccagccctcctcgtcagggaccccctcctcctccttggccttagcttcttcctgcaaggaaggtgatcccatcctccggtgggacctcctgcagcctccagcagcgcgccctccacaccctcctcccaaagtcagaactgccctgagcccccgcaggggagggctgctcccctcctcccagcacagtgttggggctaaggatggcggggagggcacggacctgccggcactgcctccttctccactgtaggacatgtggagactacatgtgtcacccagccaggcagcccaggatccagcagggaaacagggagcctggcctctacagagtggccaaggacaggccaccaccgccctccctctggggcgccaccttcccacagccacacgggcgatgcggggctcggccgaccccgcggggcctctacctcagcgatcttctggtcatatgcctccatgaacgtgtccacttccaccctcagggcctcagggtcgggcacagagtctgcgtagtcactgatccactctgaggaaaagggagccagggaaacggggcttcctcaggcctggcatttgggccccaccccagggcctgccaggcaaattgggaccttttcccacagggcccggggcacaggcgctaaggagatcccaggggctgcaagctgcgccctcgctctgcctgcccagtatgcctgtgccgctctgtgccaggggctcaggctaatgactccctggggacccagacacagccccatggtcctcctgcccaggcctccacatgctgctctcagggagcatggacttggcttgtgacattcagacactgtccccatagagtgtcctgccaacccggagcccagaaaggaggcgccagacccctcccgcagtactaactgtgaatgccactcttcacagggtggctctctgtggacaccagcagggggcccttcagggccaaggccgctgacaccccacttggcttctggaacaccacgtaggctacctggaaaccctgaagagagagagatgtcagaggttgggggctccttcccacgtctggcacaaggtctccaggcctgccctcagcctaggtggtagctacaccaggggagatggtgctaggctattcctgagccatgaagagaaccacaggccatcccataatccaggtcagaggcagccacacttccagtaatcctgcttctgcgggaagtgacggctgttcccaactcctccccaggaagaggggatacagaggcttcttttcttccagtcacgggagggatgcggtgaaacacaggggtcgccctgggccagggcaggtttttggaagccaggcctgggcgcacacaccatgccagatgccactgtgtggggaggaggtgtgggctccagggccactgggaaagctgtgaacaacagtgctcctggagacccggcccccaagcctggggaaggagctccctcagtggggaagcaggaggggagccggggaaggccctgcaggtggccagcagagacggtccgtgagctttaacacgggacagaaaaagccaggcaggaagtgcaaggatgtggcaaatctggcaaagaatcgcaggctttgtcacccagacagtctcttacaccacacacggtgaggatgggctcaggaccagagaatgctctgatgtcccactgccagctcccccaacacactggggacagtgccccacccccctcactctagtggaaccccgggcttggcggctcaccggaactggcttgggatgaaaaaacttcgaccttgactcctttgggctctcagccaggtccggcttctcctgcaactctacagactggacgaggccacaggtggacaggaggcgggacaggctctcctgccgcagggagagggaagccaagtgtgagcatccgcagggccatcccaaagcctccctgcaccatgggtggcgctgccaggggtccagcgccgctgaaggactcagccacagccacatctgcccaagccgggagactgtgggcaccatggcctccgacctgttccccagggacaatatggaggttgatattcctgctcttttttttttttgagttggagtattgctctgtagcccaggctggagtcctgcaacctccaccttcgggttgcaagtgattctcatgcctcagtctcccgagcagctgggattacaagcgcccaccaccaccacacgtggctaatttttgtattttgagaagagacagggttctgccacgttggccaggctggtcttgaactcctgacctcaggtgatccgcccgcctcggcctcccaaaatgctgggattacaggcgtgagccactgtgcccggcatattcctgctctctcactggagacaggtggggacattcttgctgttattctgatttcctatgacaagttttactacctgaatcagcagtagtgaccctatgctatgacagttgggatggtggttgtctgtggtggaggcagcgggggttctgggatgtgctgctgtgtctccacctgggcgctgactacacagctatgttctgtctctgggatgcagcgagctggacatctgccactggggcccttcccggcacacatgctgcacttcaaaaaaggtcagaactcgcaccccctcttctacatgcttctttttttctctaagtttagaggaatcttttacaaattagggtttcttttttgaaaacaaatccagcaattcccttggccaggggcggtggctcacgcatgtaatcccagcacgttgggaggctgaagggggcggattacttcaggtcagcagttcgagaccagcctggccaacatggtgaaaccttgtctatactaacaatacaaaaatgagccgggcatggtggtgggcgcctgtaattccagctgcttgggaggctgcggcaggagaatcacttgaacccgggaagcggaggttgcagtgagttgtgaacgctgtgctccagcctgagcaacagagggagactctgtctcaaaataaataaataaattaaataaataaataaataaataaataaatccagcaattcccttagcttagtttttgtaaaaaaaaaaaaaaaaaaaaaaaattaacagttgtgtttggatagaattagaggcactttttattttcttatactttcctacttttaaattatggacatgtacaatctggaagaaaacacgtaattcagacaactttgggtaatatgtaaaaatgccttgggctacttaggattgtacttttttctcttttttttgagtcagagtctcactctgttgcccaggctggagtgcagtggcgcgatcttggctcactgcaacctacacctcccgggttcaagggattctcatgcctcagcttccctagtagccaggactacccacacatgccatcatgcctggctcattttttattttttagtagagacgggatttcaccatgttggctaggctggtctggaactcctcccttcaggtgatccgcccgcctcagcctcccaaagtgctgggattacaggcatgagccaccgtgcctggcaggattatacttttaaagacatctttaaaaagccagtttcctgactggagatcacggtagccctcctgacactctcctctggggctcccattagctgtgtccgtctcaccaccaaggacttggtggaggccatgggagcccccaccttgagcccacaggtctcctcccagacagacactagctcacctctgtgcagtatgggggcacattgaggacaaaaagagtcctcttctgaggccaggtggacttggtgccttgtcgaacgccgtgtgctctcacatagaggtagtgagaagcctgttgcttttcagagaacttgattggaatagctggaaaggaaatgggaggggagggatggccaggctaccctgagctgaggccagcgagacactcacacaacttcctttctccacatccctgtctagtcctatctgttcatcgatccatccatcccttcaccaaccccccttaccctactctttggcaaagcctgtgcgggctctaagagtctgcccaggagggcctcccaaggcggtgcagggagagagaagataaatgggcaatgattacagatgggggcgcaatgagagggaagctcgaaccctgcggctcttggagtcaacgccaaaatcctaaccatggctggaagccccgtgagaccctgcctgtcactgtgacctcttctcgtaccatcttcccccagcaccttggattctctgttcccccgggtacaccagggcctcacacatgctggcctctctacctggcgtgtcaccctcttccctcccgctcacctcaggtttagctcaaacctcgcttcctcaggagagccttagcatcacctccgcccctcctgccagctcagatcccactgcctgtgccttcacagcttctcttaacagtctggaggctatattgatgagattctttggttaatcgctggcacacccatgactgtaatcctcataaagctaggaactgcttctatttttctcacacctccgtcacagtaccggttggcatagagctgcggtccctgaactcaggaagctcagttgcaataacggagaagacaattaacaagtaagcatacagcaaacttgtatcaatcgtgaaggaaacattacagggtgatggggtggcagaggtcttctttccataggccatcacggatggcctctttgaggaagcaacattaaagctcaggccagaacgccactgtgcaacaaaccggcacagcacgtgcaaaaacccagaggggggaaaaagcatgttccctcagaggaacagaaagagctttaggtcggcaccagccagaccacgtggcccacacaggttaagaagtctggtttttgttttagaagctacctgataaagccactggagggaatgcagtaggtgtggcgcctatcgtgggcgcggcagacatgatcgaatctaaatgtccttaaaagaacattctggcacgtgggtggagaacagaagcaggggcaagaggagaaggagggcaaccgagtaggagggcctataacagcccaggtaagagctgatgggggatggactaggagcagaggcgatgagaaggggatgggctcacctggacgagcgggtgtggacggaaatgggtttgtcctgggtgagagtgtggacagaggcgggctcacccaagggaagcgtggaccaagttgggctcgccccgggagagtgagcaggcagaagggcgccgcctgggtcctcgggaccccggagcctcaagacctgcggagcctggggccacgggccaccggggctcacacccaaccgtgcggccgctcctggggacccccggccgtcgccaacccccaaacacctcccggcgatgcctgaccgcccccggtctcgcgtcccggagcccctcacctgcgtagcccagtgggctggggatacggtcctccgggtcccgcgcggcgcacttcctcctgcgcgccaccatcttgccacccgggagcgcgggggccgccgggagttgcggttcggcgccggcgcgagcgcgttttcgtggcgcctgccccgccccctcactccaagcccgcctccccggccccgcccgccatggcccaaccttcatccgctcagagataaatcagcgcgcgaaagtgggagcgaatgtcagagttgaccccggccagtcacgagtgcgaactcagctttccactcatgcattcacacgttgaataggcagtgtgagagaaatccaggatggctgctaggttttcagtctgagcaactaagaggatggtgttgccattgactgagatgggaagactgcaggagaggggcctgcttgggggtgaaaatggagtagatcagttctctgtgagccgtggtgagatgcccattaggccactcaggggacatgtcaggtgggcacttagatatgagactgaacagactgaacatcagagatgtcaggcctggagcaatacacacgggactggccatggataggttattgacagttacgagaggagccgggtgcggtgattcatgcctgtaatcccagcaatttgggaggccgaggggggcggatcacttgaggtcaggagttccagaccagcctggccaacatggtgaaaccccgtgtctactaggtacaaaaagtagccgggcgtggtagtgcatgcctgtaattccagctactcgggaggctgaggcaggagaatcgcttgaacccaggaggcggagattgcagttagccaagatcgccccactgcaatccagcctgggcaacagagcgagactctgtctcaaaaaaaaaagaaagagaaaaaaaaagaaagttatgagagggtgtgatcgccaagggagcaagtgtagataggggagaaatgaagtccaaggactccacttttctggactccaaagggcctctcagactgtgtacccgccagcccttgatgtatctactatttctcttttcccagtgtacagttgcttcttggaaatgctgtcggcccctttggggaaagattaggagcctactactgcaaatatttgtggtctggaggggacccagcctccctttcagtcagtgacctctggttctgaggcctagcttaggcctggaaactggatgaggggttgggattttccatcagcagctgccattactgtcctgttcgctcgttttttgtttttgatctttctttgcttagcgcagtcaagcagtgttggggcttccgtggcccctgggaataccgtggtctactagcattcaccagagactcctgtgcgcccaggatccctggcagccactctggccttgctcctgttctgacagtcacatcaaccgaatctctgctctctggaatcctatctcctgctgacctttccgagcccggctccagtcctatttgccctcttctaccctggcctcagaggacggccatgccgattgcccattgatgcctagaccccccactagtcaaagcagtctctggtgaaccctccagaaatacggtcatctggcttctcagatgttgcataataaatctgtgcctgcacatccccctccccgaggcctttggctccttctcagtgccctgccaccatcgttctgttatctccctctcatgtattgcttccacgcttcaaggagccatctcgatggatatcaggactggccacacaacatcacttttttttttttttttttgagatggagtctcgctgtgtcgccaggctggagtgcagtggcgcgatctccgctcactgcaacctccgcctcctgggttcaagcaattctcctgcatcagcctcctgagtagctgggattacaggtgtgcaccaccatgaccagctaaatttcttatttttgatagacacagagcttcgccatattggccaggatagtctcgatctcttggccttgtgatccgcccacctcggcttcccaaagtgctgggattacaggcataagccttttttttttttttttttttttttttttgagacggagtctcactctgctgacacccaggctggagtgcagtgctgccatctcagcttactgcaacctccacctcccgggttcaagcaattctcctgcctcagcctcccaagtagctgggattacaggcatgtgccaccacacccagctacttttttgtatttttagtagagacagggtttaccatgttggccaggctggtcttgatctcctgacctcagatgatctgcccacctcggcctcccaaagtgctgagattacaggtgtgagccactgcacccagcctagaattcaagactcttgagcccatctatccagacgttccctgccctaggtgacagtgtccgctccttcacttctgtgctccttgactggagcacagcacttagcacagccgttcatctgccctgattcaaactccacagttctcatcaggttctaggcctttatcagcacaatgtgacctgtctttaaacacgtctctggaagcccctcctgattttcaccttgggctataagttgataaatggctgtcctgaggcctgttgttttcttccttcagcccaytgatgccactcgatcaattaactccactttctttataattaccactgcccatgtatttcatgggtcaggaatttgggcaatgctctgctaggagattttgtttctccctgtggcactgactgagggcatttgatggtattcagctggcatatgggctgcactaaaggttccaagtcacttcactcacatcgcagcatctcagcagatgagtccggcatctcagcagggatggctggtgatagagtttgagtatttgtctccgcccaaatcgcatgttaaattgtaatccccagtgctagaggtggggcctggtgggaagtgtttggatcatgggggcctcatggcttggcgccgtctttgcgtctttgcgatcgcgagttctcgcgagatctgtttgtttaaaaatgggtggctgcttcaccccccactttgttggtcaggctttcaccatgtgaagtgacccctcacacttcgccttccaccgtgagtcaaagctccctgaggcctccccagaagcagatgcagccatgcttcccgtacagcctgcagaaccaattcaacgtcttggctttataaattccccagtctcaggtatttcttcatagcagtgcaagaatggccgaatatggctgggctcaagtgggacttgtcaactagagcacccacccatggatttcctagcatgtggtctcagtagtcaactttttttttttttcctgcttgctgggaggaggaggagggagaagcgacgggcttcattaggaacggtgagtttgcgactctgccgctaagtggcagctccagctcacccccccagctccctcccacaggccacggctgggcatggagaactggtgacttcagaggcccggagagaaaagacgggggagagcgaggggccgccgtgcctgaggtctgggggtgacagcagaggatggccaaggagtgcagggccaggttgccctgccctgtctaagagagtcttaccgaatatagaggttgaattgtgctccccaagagacatgttgaagtatgttttttttgagatgaagtctcacactgtctcccgggctggtgtgcagtgggcgatcttggcttgctgcagcctccacctcccgggttcaagtgattctcctgcctcagcctcccgagtagctgggactacaggcgtgcgccaccacgcctggctaatttttgtatttttttttttttttttgagatggagtcttgctctgttgcccaggctgaagtgcagtggcgcgatctcggctcactgagagctccgcctcccgggttcacgcaattctcctgcctcagcctcctgagtagctgggactacaggcgcccaccaccacgcctggctaattttttgtatttttagtagagacggggtttcaccatgttagccaggatgatctcgatctcctgacctcgtgatccacctgccttggcctcccaaagtgctggaattacaggcgtgagccaccgcgcccggcctaatttttgtatttttagtagagacgggggtttcacgtgttagccaggatggtctcgatctcctgayctcgtgatctgcccgcctcagcctcccaaagtgctaggattacaggcgtgagccaccgcgcccrgccatgttcaagtattaacctctcccttcccccaccactcttccattcctgtgaatgtgacctgaatatggaaacagggtctttgcaaatgtaatcaggtcctttcaactcaagataaaatcatcttggatttagggtgggctctttgtccaatggctggtgtccttataagatgcctaggagacacacacaggaaagagggccataggaagatggaggcagagatggcagtggtgaggctataagccaagggatgcctgtggccactggacgccggaggaagtgagggaggattcttccctagaaccttcagagggagcacagccctgccgacaccttggtgttggacttctcacctccagaaatcaatttctgttgtcttaagccacccagtttatattattttgttacagcagcctgggaaaaggaatacactgaataagaacccaagtgagcttattagaaagaatattgaggcctggcgcagtggctcacacttgtaatctcagcactttgggaggctgaggtgggtggatcgtttcagtccaggagtttgagaccagactgggcaacatgatgaaaccccgtctctaccaaaaatacaaaaattggctgagtgtggtgatgcacacctgtaatcccagctacttgggaggctgaggcaagagaatcccttgaacccgggaggtggaggtggcagtgggccgagattaagccattgcactccagcctgggtgacagaacaagactctgtctcaaaaaaggaaagaatgttaaacctcctcaagaggaggtaagcgattttaaacactctgaagccacgcaggggtaacccttttacaagccaagaggaggagaaggaaaaattgaagtcacttttttttttttttgagatggagtctcactctgtcacccaggctggagtgcaatggtgtgatctcggctcactgcaagctccgcctcccgggttcacaccattctcctgcctcagcctcctgagtagctgggactacaggcacccgccaccacgcccggctactttttgtatttttagtagagacagggtttcaccatgttggccatgatggtctcgatctcttgaccttgtgatccgcccgcctcggcctcccaaagtgctggtattacaggcataagccactgtgcccagcctcaatttttcttttttaatggttaaaaaatactttcaaatgtccacacagtaaaattcacttcttttggtatatagttcaaatgcatagagtcctatcaccatgaccacagtcaagatagggaacatcccgtcactcccagaactcccgtgctgccgctggcaaccactgctctgttctcccgttgcttttccagcgagtcctgaaagtggaatcgtgcgagtccaggttctttcactgagcatcgtgatttgaggttcacccacattgttgtatggttccttttcattgctgagaaatgttccactgtctggatggagtgtggtctatttatctattcaccaagtaaaggatgtgggcgatttccaggtttcgacgattatgaataagctgctgtaacattcacgcacaggtgtttgtatgaatggaagttttcacttctcttgggtgaatacctgggagtggggtttctgggtcccgatcgggtttctagtggtctgtaagtcagacttgctaagagttttcgttggggagacgcacacaggtaaggtcagctctcagggtcctttctgcaatgcggggatgtcgaggtcacctgacagaggggcaaatgccagctggtcgcccaacctgctcttgtccgttccttttccctcagaagctaatagaggaaagtaaacctgttgtttcactctcatttccttttattttcattaatattaggaaatgccaagattagtgaaagaatgaaaagatgagtcaaggccaggcatggtggctcacacccgtaatcccagcattttgggaggccgaggcgggcagatcacgaggtcgagagatcgagaccatcctggccaacatggtgaaaccctgtctctactaaaaatataaaaagtagctaggcgtggtggcgcgcacctataatcctagctactcaagagtctggggcaggagaatctcttgaactcaggaggcggaggttacagtggcctgagatcacgccaccatactccagcctgggcaacagagcgagactctgtctcacacagacacacacacacacacacacacacacacaaaagatgaatcaaaacagcctagaaaaggcttcagtgatcctcagactggatgatcgaatcccgaataatggggaatcaacagtaatggcctagtaacacttttaaaaagtcttctttctttttttaagagatggggtctcactgtgttgcccaggctagtctcaaacttccaggctcaaccaatcctcctaccttggcttcctaaagtgctaatattacaggtttgagccactcagcccagccccaaatccttattatatcctatttgtttgctttgcatggaagtttatacttacttccatcccacccttaacataactgcagagggaatttcttttttttttttttgagacaagattttgttctgtcagccaggctggggtgcagtggtgcgatcttggctcactgcaagatccgcctcccaggttcatgccattctcctgcctcagcctcctgagtagctgggactacaggcccccaccatcacccccggctaatttatttttgtatttttagtagcgacgggttttcaccatgttagccaagatggtctcgatctcctgacctcgtgatccacccgcctcagcctcccaaagtgctgggattacaggcgtgagccaccgcgcccggcccagcagagggaatttctaaaggcaaagactctgctcctgaattaggagaaggcgtggcagcttcacctcttactgcctggggtcaggcagttctctgcagagccattctcaaggaggtgtcttagcttgacttgccccaaaatagatgaggagccccatctgccccatctaattaccctgagccctacttctgcctaaatgcagccctggctgagctcaggctgagaagtcccaggatctacagtcagcaagcaaaagaaaaccaggagagccgacagtgtcattgcagtccaagtccaagttcaaaggcaggagaagaccagtatcccagctcagctcacagtcaggcagatggagtgaattctatcttactttttctttttcttttcttttctttttttttgagaaggagtcttgctctttcacccaggaatatgctttaggcaatgcatagtatttcactggagcttgaatcttcctgagtgctttaactggtatttgtctgtagtgacttaccaaaagcaagcttgtagatggtcctagaatttaaaactaagaagccaatctccaggccatctgctgagggtgattaggatactgaggaggtccgaggagctaagtgatggcacccagagtataccgctggagtgcagtggtgcaatatgggctcactgcaacctccgcctcccgggttcaagcaattctccctgcctcagcctcctgagtagctggaattacagatgcctgccaccatgcccggctaatttttgtatttttagtagagacgtggtttcaccatgttggccaggctggtcttgaactcctgacctcaggtgatccacccgccttggcctcccaaagtgctgggattacaggagtgagccaccacaccgggcctttttttttttttttttttttttaagagacagacttttgccctgtagtccaggctagagtgcagtggtgtgaacgtggctcactgtagcctcgatatcccaggctcaaatgatcctcttgcctcagcctcctgagtagctgggactacaagtgtgccacgtctcaattttttttttttttatgtttttgtagagatgaggtctcgccacgttgcccaggctggtctgcaactcctgggttcaagcgatcctcctgcctcagcctcctgcgtggtcgggactactggcatgcgtcaccacactctgtcttttgttcccatcaggctttcaatggattggacaaggcgcatccacactggggagggccatctgttttactcagtctactgatgcaaatgcttatctcttctggaaacaccttcacagacagacccagaatcatgttgaaccaaatactgggcacctcatggctccaacaggttgacacaaaaaatgaaccattgcagaaaacgaagaacagtcaccaactcccacccatgcagctggctcatttgctgggctgccctccccagcaggtggcacaggaatccctgccttggcagggaggaggcctggggtgtgtgcaggtgcccatgggaagtttctttgccatgaggaaagccagagtgaccccttgctgatcctgcaagggaagaagcaggagtttcctgacactaaccccagaggcagagcccacatccacattcggctcagcaggcactgtgcctgaggggcactgtgggcccacaaaaacgtcttaatttctattaaaaccagaaaaaaacatgtaactgatttataagcagcccagcctggttattttcatctttttagccatgcaggcataatatacaatttttacttttttttttttttttttttagtggacgaaggccccatgacagtcataatgtccagggctccctccagccagccgtgtctgcacggctgggcaccacttcctccggcctggctgctggcactgtttctggggcatgctgcaggactccaggccagggtggggaggagggtagcaccagccagggaccggctcccgtcagctgaaactctgtatctggtctggtctgctccaaggggtagacacaaattttgcagcattgttctcatctgtgccccgctgccaccttcttgagtgggggctgcttttcctcctagtcctggtgctttcaggcctggagatgggggtctgtgtcatccatgcgaaggagtttctctgaccttctcttgccctcctgtctgtggcccctcattctgccctgaggctggccatagaaactagaatctctcttcctcagggtgrgtcatagaaaccagaacccctttcccccaaaccagccatacaacctaaaatatgactctaacttcccctctgccctatctgtgcaaaaactggccataaagaaattctctggcctactttgtttgactgtagaccataagacccccattccaggccaggcgccgtggctcacgcctgtaatcccaacactttgggaggcttaggtgggtagacctgaggtcaggagttcaagaccagccaggccaacatgatgaaaccccatctctactaaaaccacaaaaattagccaggcgtggtggcatgcacctgtaatcccagctactcaggaggctgaggcaggagaatcgcttgaacccgggaggcggaggttgcaatgagccgagatcacgccactgcactccagtctgggccacagagcaagactgtctcaaaaaataataagacccgcattccagagactgtcctccccacactcagaaggaaggaactcagctcagagaggccaggaggaatctagccagacaggccctgctgggttccccactccatctgctagcattagatcagatcatttttgtccaatcctatgtctccacagctgcccatactgtgttgaacctcagcatgaaaatggacaatttcccctgtatctttgggtcttcattccgaagtctcctgtgacaggtaaaactataatcaaataaatgcgcatccctttctcctattcatctgccttttgagagttgattttccgtgaaccttcagagggcgaaggggaagttttcccttcacccctacatggtaaacctgagtaagtgttcccctgagttctgagcctctctagcaagtgaattgaacccaaagagagggctgtgggaaccccaatttacggctggttggtcagaagcaaacacaaaataggctaggcacggtggctcactcctgtaatcccagcactttgggaggctgaggtggatggatcccttgaggtcaggagttcaagaccagcctggccaacatggtgaaacaccatctctactaaaaatacaaaaattggtggggcatggtggtgcatgtctgtagtcccagctactggagaggctgaggcagaagattcgcttgaacctgggaggtggaggctgcagtgagccaagatcacaccattgcactccagcctgggcaacacagtgagaccctggaagaagaaagaagaagaagaagaggaaggaggaggaggaggaggaggaggagaaggagaaggagaaggaggagaaggagaagaaggagaaggagagactcaaaataacctgggcttgggatcagttttgggagtgtggctcaggtcttgtgggacgaagtcctcaacctgcgggacctgaggacatctccaggtagacagtgttgggactgagtggaagcagaggacacccgactggtgtctactacagaattgactctgcaggaagtccgtgcaggagtctcccccgcctgcagagactgcacttggatggtgcccgtgcccctggtggaagaaggaggaggaatgaggaggaaaggagacccttgggtgaccatggccaagggtgtgaggggcaggtgtgtcccccagctcactctggagactttttcctgggctttctaccacagctaaagtaaaatgaccatgaactgggtggcttaaaacaacagactttattctctcacagttccagaggccagaagtctaaaatgaaggtgtcacatcaagaaagggatccttcctcacctcttctagcttctggtggttcttggctgttatgaatcgagtatatgtgtccccccaaaattcatctgttgaaaccctaacccccagttaggtatggtattaggaggtgagatctttgggaggtaactagggttagatgaggtcatggggatagggccccctgatgccatgatgggatgagtgcccttataagaagagatgggggacgccaggtgcggtggctcatgtctgtaatcccagcactttgagaggctgaggtgtgagtggaggactgtccaggtgctgaggcaagagactgaaagcacaaactgtttcagtatgataaaaaaaaaacagaataagaataattatgatacaaattagatacagagatgatcatggacgttatcaatcatcagtataaacattattaatcattagcttttaatgttactctttgtagtattactaatataaccaaggaataactggcggatatagggtcaggtgctgaagggacattgtgagaagtgaccaagaaggcaagaggtgagccctctgtcacgcccgcataagggccgcttgagggctccttggtcaagcggtaacaccagtgcctgggaaggcactcgttcctcagcagaccgtgaaagggagtctccctttccttggaggagtcagggaacactctgctccaccaccttcttgtgggaggttggatatcgtccaggcctgcccgcagtcatccggaggcctaaacccctccctgtggtgctgtccttcaatgctcacgctccttgtccacttgcatgctcctcccgtactcctggttcctcttggaagttcttagaagatagcggtagaagaaatagtgaaagtcttaaagtctttgatctttttgataagtgcatagaagaaaacgccgacgtatgctgccttccctctctgcttcagctacctataagggaaaggctcactgtcctatgatcacgtgacttgctcgaccttatcaatcacttggacgactcaccctccttaccctgctccccttgtcttgtatgcaataaataacagtgcgcccagccatttggggtcactaccggtctccgtgtcttggtggtagtggtccccccgggcccagctgttttctctttatctctttgtcttgtgcctttatttcttacgatctctcatctccgcacatggggagaacacccgccaagccctgtagggctggaccctacatctggtggatcacttgaggtcagggttcgagaccagcctggccaacatggcgaaactccatctctactaaaaatgcaaaaaatgagccgggcatggtggggggtgcctgtaatcctagctactccggaggctgaggcaggagaatcatttgaactcaggaagcagaggctgcagtaaactgagatcatgccactgcactccagcctgtgtggcagagtaagactctatctccaaaaaaaaaaaaagagacaggggacatcatcaatctctctgcctctctctcttcacccccctctgccatgtgaggtccaaagtaagaaggcagccatccttaaaaccaggaagaggccctcaccagattgaaccgaaccttccagcaccttgatctcaaacttcccagtaccttgatctcaaacttcccagtctccagaactaggagaaacaaatatctgttgtttgagcctcccagtctaccacatcttctttagcagccacagcagacgaagacacctgcaatcgctgccattgccgggcttgtgggagcatcgctctgacctctgcttccgtcttcacatggctattgtccctctggggcagtctctgtgtccacctgttcctcttctaaggatgccagtcattggatgagggtgtgtgtgggcggcaagccacccaggtgccgaggcaagagactgagggcacgagctgttctagtgtaataaaatatataaaataataagagttatactagatatagatcatagatatgattatatgtgaatatcattaatcattggtttgtagcaattactctttattccaatattataataatccttgctctacaattataacctgggaaaaaccagaccgtacagagataggaactgaaggggcactgtgagaagtgaccagaagacaagagtgtgagccctctgtcacgcccggacagggccaccagagggctccttcatctagcggtaatgccagcgtctgggaagacgcccgttgccaagcggaccgtggtctagtggtagcatcagtgccaaggagaaacacctgctacttagcagaccgggaaagggagtctccctttccccggggtagtttagagaagactctgctccacacctcttgtggagggcctractgatcgcccacagttatccggaggcctaaccgtctccctgtgatgctgtgcttcagcggtcacactcctgtttcactttcatgttccactctgtacacctggctctgccctctagatagcagtagcaaattagtgaaagtattaaagtctttgatctttctgaaaagagcatagaagaaataatgacgtaagctgtcctctctctctccgcctcgactacctaacagggaagggccccctgtctggtggacacatgactcacgtgaccttgtcaatcattggagatgactcacactctttaccctgccccttttgctttgtatccaataaataacagtgcagccaggcatttggggccactaccgatctccccgtcttggtggtagtggtcccctgggcccagctgtcttttcgtttatctctttgtcttgtgtctttatttctaccatctctcgtctcctcacatggggagaaaaacccacagaccctgtaaggctggcccctacaggtgtgacctcatctgaacttgattacaactgcaaagaccctatttccaaataaggtcacattcatgggtaccaggtagccatgaatttcttgggggcgctttccaactcagagcacctgccgttccctaggcctcctccctggcccagcctcccccacctaccctcatccgctctctttgagctccgcgaacccggagccaccttcctagacccgctttgcttgatcatgattctgcatgtgagctgccctcctccccatcacctgccagctctcccccagcctgtgatggcaactggacccatttttacccatacacagtttcaaagcagactgaatgcagttaaaattctccagatacttcctttcaggtccacatccctctgtaagtgttcatcttagaaaccctgggtagagtctgagttttgttttgttttattttgttttgttggtttgtctttttttcttttctttttttttttttttttacatagagtctcaggctcaagtgcagtggtgtgatcatggctcactatagccctgacctccttggctcaagtgatcctcctgtctcagcctcctaaatagctggggttacaggcacctgccaccatgcccggctaattattattattattattttttgtagagacagcgtttcaccatgttggccaggctggtctcaaactcctaggctcaagagatccacctcctcagaatcccaaagtgctgggattacaggcatgagccaccatgcctggccttgatctttataccagctaattggcatacacacaagctcatgctatgaaatggtatttcacactgtgtgctgctttgccttgggctccctaaaacttcatcaccccccagcggactctcactgctgtggcctgtggccctactcaaggagctcaaggaggccactagccatttggagaaggaggtagttggggccctgaaagtttacaggacttcctcaaggccacagcaggtgtgtgagaaaaggaagatggccagcctgcctccacttctctttccaatctcccactttgcctgagctaagctcaagctcagggccacccacgtcttggaagggcttcctaccagctggtcttgtgagatgagagctgccctgcatatcatgcttgtcatcgccaaggaccccaagctccagttagctcaagtcctagagaatgtgccagctacatagagctatgcagagcgtggccctggggatgcgggatgttattgcccttgggwtgggaaggagagatgagagggagaattggctggatcttaaaattgtgttgcaccctttcaaacactctaccatcyttgcctctgtagttcaatattagtctgttcctatcttctaaacttgcaaatgaacttgcatggcaataaatctctgyacactcaaagccatgatttcctcagcaggtggatgcagaatgctcggagacctataataatcagcctttggcaacragcactttttcttctgactcattattgccgcgttttaagaggagaagggagcaactgctctcacggggctacagagacacggaaacacgctggggaggctgctctgtcaccaggaaagacaatggaatccatttaaaatgtcttattttcccttgctctgccaagcaaaagcatcagaaccctttggggaattcactttacaaggaaacaaaatgaggccccgcatctgcagcctggccctccccgccacctgcaccccttcctctgaggtccccggctctgcaggggccgagcgggcggcasccgctcctggtggtggcattgttgggacccgctcacaaaacacagttgttctctgcaatggctcatttccctttctgagactttttgtttrtttgtttgttttgagacagagtcttgctctattgcccaggctggagtgcaatggcacaatctgggctcattgcaacctccgcctcccgggttcaagcaattctcatgcctcagccccccgagtagctgggattacagttgtgcatcaccatgttgggtaatttatgtatttttagtagagacagggtttcactatgttggccaggctggtctcgaactcctgccctcaagcgatatgcatgcctcagcctcccaaagtgctgggattacaggcaggagaatcactggaacctgggaggcggaggttgcagtgggccgggatcatgccactgcactccagcctgtgtgacagagggagactctctctctcaaaaaaaaaaatttcctcttcctccaaggtttaaaaatcatataaatgtaccttcctctcaattatgctgtgaacttaaaactgtttccccaaaatagtcttttaaaaaaaatcaagaatacaataggcatggtctagaagaaaaatgtacaggttgcaggcaggagacaccaagcaaatcatttcatatctggaggccttcatttattgctccacaaggttaagagttcaactcacaccggggtctatgagctaacctttcaccagggcattctgttcaaaccttgggcctcacttcgtaaaagtccaggaaattactctccctttctgtttgcactcggcctcatgccatgggcctcstgggcaggtgcactgctgctccaccggtgctcaacacatttttgctaaaggaatggatgaccccagaaaacacatacaagctgggcacaatggcatgtgtctgtaatcccagctacttgggaggctggggtgggggatcgctcaacgccaggagttgaggctgcagtgggctgggatcgcacctatgaatagcccctgccctccaacctgggcaatgcagcaagaccctgtctctaaaaattaaaaaaagacaaaataataacaataaacatacgaataactatggccgggcacggtgaaaccccgtctctactacaaataccaaaaattagccacgtgtggtggcggctgcctgtagtcccagctactctggaggctgaagcaggagaatggcgtgaacccaggaggcagaactggagtgagccgagatggcgccactgcactctagcctgggcgacagagcaagactcccatcccagcactttggcaggccgaggcgggcagatcaccagctcagaagatcgagaccatcctggttaacacggtaaaaccccgtctctactaaaaaaaacaaaaaattagctgtgcatggtggcgggcgcctgtagtcccagctactccggaggctgaggcaggagaatggcatgaacccgggaggcggagcttgtagtgagccgagatcgcaccactgcactccagcctggccaacagagcaagactctgtctcaaaaaaataaaacaaacaaacaaaaaaaaagaaattgtaccagcttctgagaatcatcaaaggtagcagaggagggccaagtcaaagccacagagtgtagaagcctcaagatgaagttcaaagccatacagtcctaaggaatgctaggagtcggtaacacagcaagttaatatctttgggtagacacgtgcagctacagctgtggaataaatttcctcctgagagtgaaactctacagtgcacaccacctacagtrcattgaagcagacattatgcaaacacttcaagagaaaggacacttggtctcggaccagcgaagcccgtgggccctcggtgtgatagtctcaatgtatctgtaagaagagtaggtcagtggctggtcagcatcagataaaacagtcaacaaagccagctctggctgtgcccatagctcacggcaactcacttcctccagctgctcaggccaacacccgtgcgtcatccctgactcctcccactctcacaacacccagcagcaaatcctgttggctccacttcaaaatggattctgggcccagtgctgtggttcacccctataatctcagtactttgaggggccgaggagggtggatcacttgaggtcaggagtttgaaaccagcccggccaacatgatgaaaccccgtctctactaaaaatacaaaaacttagccgggtgtgatggtgggcgcctgtaatcccagctactcgggaggctgaggtaggagaatggcttgaacccaggaggcggaggttgcagtgagctgagatcgtgccattgcactccaccctgggcaacatgagtgaaactctgattcaataaataaataaccacatcgtttctatttgatgttctctctggatgtgtataatgaaatttccctttttcctaaggacacctgtcatattggaatatggcctagcctgatatcttgattttaacttgttcacctctgagaagaacctatctccaaataagatgacattctgaggtagtaggagttggaacttcaacatgtgaatttrgtggggagaacgagtcatgattcaatccattacagtcctaccgaattgtgagctaacaatgggtgttatttgaagctactgaatttggtgtaatggtgtgtgcctgtagtcccagctactcaggaggctgaggcaagaggatggcttgagcccaggagttcaaggctgcagtgagccatgactgctccacggcaccctagcctgggtgatcttgtctcaaaaacaaaacaaaacaaaccaccaccaccacccacaacaaaaaacagctgggcgccgtggctcacgcctgtaatcccagcaatttggacaccaaggtggacagatcacgaggtcaggagttcaagaccagcctggacaacatggtgaaaccccgtctctactaaaaaatacaaaaggccaggcgcagtggctcatgtctgtaatcccagcactttgggatgccaaggcgggcggatcatgaggtcaggagatcaagaccatcctggctaacatggtgaaaccccgtctctactaaaaatacaaaaaattagccaggcatggtggtgggtgcctgtaatcccagctactaggaggctgaggcaggagaatcacttgaaaactggaaggcggaggttgcagtggaccgagattgcactgctgcactccagcctgggcaacaagagtgaaactctgtctcaaaaaaaaaaaaaagggccaggcgcggtggctcatgccyctaatcccagcactttgggagaccaaggcgggcggatcatctaaggtcaggagttcgagattagcctggctaacatggtgaaatcccgtttctactaaatatacaaaattagctggatgtggtggcacatgcctgtcatctcagctactcgggaggctgaggcaggagaatcgcttgaacccaggaggcagaggttgcagcgagccaagatcacacgccgttgtactctagcctgggcaacagagcaagactccgtctcaacaacaacaacaacaacaaaaaagaattgtaccagcccctaagaatcaccacaggtagcagaggagggccaagtcaaagccacagagtgtagaagcctcagatgaagttcaaagccatacagtcctaaggaatgctaggagtcggtaacacagcaagttaatatctttgggtagacacgtgcagctaccgttgtggaataaatttcctcctgagagtgaaactctacagtgcacaccacctacagtgcattgaagcagacattatgcaaacacttcaagagaaaggacacttggtctcggacyagcgaagcccgtgggccctcggtgtgatagtctcaatgtatctgtaggaagagtaggtcagtggctggtcagcatcagataaaacagtcaacaaagccagctctggctgtgcccatagctcacggcaactcacttcctccagctgctcaggccaacacccgtgsgtcatccctgactcctcccactctcacaacacccagcagcaaatcctgttggctccacttcaaaatggattctgggcccagcactgtggttcacccctrtaatcycagtactctgaggggccgaggagggtggatcacttgaggtcaggagtttgaagcaagcctggccaacatgatgaaaccctgtctctactaaaaatacaaaaacttarccgggtgtggtggtgggtgcctgtaatcccagctactcgggaggctgaggtaggagaatggcttgaacccaggaggcggaggttgcagtgagctgagatcgtgccactgcactccagcctgggcaacaagagcgaaactctggctcaaaaaaaaaaaaaaaaagggccaggagcagtggctcctgcccctaatcccagcactttgggagaccaaggcgggctgatcacctaaggtcaggagttcgagatcagcctggctaacacggtgaaaccccgtctctactaaatatacaaaattagctggatgtggtggcgcatgcctgtcatcccagctactcgggaggctgaggcaggagaatcacttgaacccgggggcagaggttgcagtgagccaggatcgcgccactgcactccagcctggcaacagagtgaggctccatctcaaaaaaaaaaaaaaaaaaaaaagctgctaaatttgtagtaatttgttgcatagcatagaaaattaatatagcctccctaaatattatagttagtactgcctgcttttaagagtctctttcaatctatagattccccctgcatctctttattctctcaattttttattgaaaaatttgggatggttaatttgtatcacttcccatagtctggattttgctggttacattcttgtggtataggttaacaggtttcttttttcttcctataaattgatcattgcatctagagtgctaatcagattaagctttttatgtttttgttaagactctttcaaagtacacagctacaaggtgtttgtgtgtgtgtgtgtgtatgtgaatttgtgtattttttttaagataagatgcctcatgaaacayactgatacttctgattcaaattcaggagacaagatgttactcattctcttctatttcacatctgtaactccttttccctacaccaggaattcagttctctggccactggggatgatagaatttgaatatcacataattactaattgctttgtcccatgttcgaaaacattgttagaataaaaatttaacattaccagtccatatgatcactaaaaacagttccaaaaaattttattttagtattattattattatttttgagacggagtcttgctctgtcacccaggctggagtgcaatggtgcgatcttggttccctgcaacctctacctcctgggttcaagtgattctcctgccccagcttcccaagtagctgggattagaggtaccaaccaccacgcccagctaatttttgtattttagtagagatgaagttgcgccatgttggccaggctggtctcgaactcctgacctcaagccatccattcgcctcggcctcccatagtgctgagattacaggcctgagccaccatgcctggccaaaaaaaaaaaaaaaaaaaacaacattttaaagatatgcccacaccattttctccccctgtttatagctaaactttgtctatgttgttggcgaatgtaaccattacactccatactctcccttttactcctcatcttctcttggttctccatgtaaatgtatctttaatgttcacaccaggctaatgtcaatgtctttttagtctctttggttgtctgacgcttattttctcgtaattcctcaggaaagtctttgggaacaatattctctgggttcctgcacattggtgacaatctgctatttttttttctttgtaactcactctgtcacccggctgcagtgcagtggcacgacctgggctcactgcaacctccatcccctaagttcaagcaattctcctgcctcagccccctgagtagctgaaattacaagcgtgcgccaccacgcccagctgtttttgtatttttagtagagatgtggtttagccatgttggccaggctggtcttgaactcctgacctcaagtgatccgcctgccttggcctcccaaagtgctggaattacaggcatgagtcactgcatctggcttgacaactgctattttttttttttttttttgagacagagtcttgctctgtcgcccaggctggagtgcagtggcaccatctcagctcactgcaagctctgcctcccaggttcatggcattctcttgcctcagcctcccaagtagctgggactacaggcgcctgccaccacgtctggctaattttttgtatttttagtagagacggggtttcactgtattagccatgatggtctcgatctcctgacctcatgatctgcccacctcagcctcccaaagtgctgggattacaggcgtgagtcaccgcacccagccgacaactgctatttttatacttaaaagttagtttgaccaggccrggtgcggtggctcacgcttgtaatccaagcactttgggaggccaaggcaggctgaccacctgacgtcgagagttcgagaccagcctgaccaacatggagaaaccccgtctctactaaaaatacaaaattaaccgggcatggtggcatgtgcctataatcttagctactcgggaagctgaggcaggagaatcgcttgaacctgggaggcagaggttgtggtgagccaagatcaccccattgtactccagcctgggtgacaagagagaaactccrtctcaaaataaataaataaataataaataaaaagttagtttgaccagatataaaatcctggcttagctggtgtttgtcttgagtatcctaaatgtattattccagttttttctgacagaaagtattgctgtgtctctatcagttcaggctgccataatgaaaaccgtggactgagcagattttaaaaaccctaaatttaatttctcacagttctaaagatagaaggtccaagatcaaggtgccagcagggtcaggttcaggtgaggactctttccctggcttgcagactgctgccttcttgctgtttctccacgtgggggaggtgaggagagacggagatcttcttcttcctataaagccacagtcctattggattagggccccaccatgatgacttgattaaccttaattacctcctaaagaccgagtctccagatacaatcacactggggattggggcttcaacacctgaatttggggggggtggggggtcacacacaattcagtccatagcsctatgaaaaccttgaatggccatttttccccattatatgccacttgatctagatagcaagatgactagataactgtatcattccaggttctccagagaaacagaaccaackgtgtgtgtgtgtgtgtgtgtgtgtgtgtgtgtgtgtgtgtattatatatatatatagaaagagagagmcagagattgagatttattttgaggaactggctcacagattgtggggtctggcaagtctgaaatctgtaggcaggctgcaggctggacactcaggcaggatctctatgtcacagtcttgaacagacttgaagcagaatttcttcttctccaagaacctgtgcttttgttctctctctctctcttttttttttttttttttggagacagggtctcactctgtcacccaggctggagtgcaatggtgcaatcatggctcagtgcaaactcgatctcccaggctcaagtgatcctctcacctcagcttcctgagtagctgggactgcaggtgtgcaccaccatgccagctaatttttgtatttttttttagcgacagtgtctcactatgttgtccaggctggtcttgaacccctgggctcaagtgatccacccaccttggcctcccaaagtgttgggattacaggtgtgagccactgcactcggccctgttcttaaggtcttcacctcactggatgaagcccaccatgttaggaagggccatctctacttaatgtctactgattggaaactttgatcaaagctatcaaataccttcacagtcttaaaagaagaactttggacaaaataaatgtaacagtttatttgagcaaagaacaaattcatgaatcacgaagcaccaaaccaaaaggaaggtatgggctccactccagcaacacgagtagtgagcttatttttttatggtttattatttatttatttattttatttatttttgagacggagtttcactcttgtcgcccaggctagagtgcaatggtgcaatcttggctcactgcaacctccgcctcccaggttcaagcaattctcctgtctcagcctcccaagtagatgggattacaggcatgcgccaccacgcctggtggattttttgtatttttactagaggcagggtttcaacatgttggccaggctggtcttgaactcatgacctcaggtgatccacctgtctcagcctcccaaagtgctgggattacaggcagagcttgcagtgagctgagattgcgccactgcactccagcctgggcaacaaagcgagaacttgtctcaaaaaaaaaaaaaagttctaagaaatacaggggggaaacaaagaaaaagtagggaaaggacattacaaatacagctgatcctgggccgggtgcggtggctcacgcctgtaatcccagcactttgggaggccaaggtgggcggatcacaaggtcaggagatcgagaccatcctggctaacacggtgaaaccccttctctactaaaaaaaaaaaaaaaaaaaaaaaattagccaggcgtggtggcgggcgcctgtagtcccagctacgcgggaggctgaggcaggagaatggcgtgaacccgggaggcggagcttgcagtgagccgagatcgcgccactgcactccagcctggagaacacggtgagactctgtctccaaaaaaaaaaaaaaaaaaaaaatacagctgatccttaaatatataaaaagatgattaagccaatttataaaaagaaaaaaaattccaagcactgtaagatacaatttctcacctatcaaattgacacaatttcaaaagctggatactgtcatctgtcaaggccatagggaaggaggcaggcttgtctagtgcaggagggaggcagaataagacagtctggtgatgtggaaacatctagaaaatgacaaacgtgtttagcctttgccctggctctcccacctctgggaagttctctcatggttatctctgaccatgctagtcattggagcattgtctgtaaagcaaaacatgggcaagattccaatattctctctgtagaggatagacaaatacaaccgtggaatagtcacccagcagaagacttcacaagtataaaaaagagtgaggcagctttgtgatttttttttttttgacaaatataggagaagctcaggaatatattgctaaggtgcagaacagtgtacacagccaacctcctttttttctttttttttgagatggggtctcgctctgtcacccaggctgaagtgcagtggcgcaatctcggctcactgcaacctctgcctcccgggttctggtgactctcctgcctcagcctcccgagtagctgggattacaggcatgcgccaccacacccagctaatttttgtattttttattagagacaaggttttgccatgttggccaggctggtcttgaacccctgacctcaggtgatccgcctgcyttggcctcccaaaatgctggattacagrtgtgaaccaccacatccagccaaagaggaagtttcttaaagcaggtggtgaaaatagggtggacagggacagggtaaaaacaaagtagccctgttgggcgcggtggctcatgcccgtaatcccagcactttgggaggctgaggtgggcagatcacttgagctcaggagtttgagaccagcctgggcaacatggtgaaaccctgtctctaccaaaaatacaaaaattaggccagacacagtggctcacacctgtaatcccaacacttagggaggtggaggcgggcagatcacttgagatcaggagatcgagacaagcctggccaacggggtgaaacctcatctctactaaaaatacaaaaattagccaggcctggtggcacgcacctgtgatcccagctacttgcgaggctgaggcaggagaattgcttgaacctgagaggtggaggttgcagtgagccacaatcacaccactgcactccagcctgggcaacagagccaaactctgtctcaaaaataataaaataaaataaaataaaatagctcaatgaaaatgcaaatacagcatgtcaaattatatggaacacagctacaaattttttgaaaaagagcattaggcccatgtggcggctcattcctgtaatcccagcactctgagaggctaaggtggagggattgcttaagctcaggagttcaagactcaatctctacaaaaaagtcaaaaattagccaggtgtggtggtgcatgcctgtagtctcagctacttggatggctgaggtaggagaatcatttgagcccaggagatcaaggctacagtgagccgttattgtgccactgcagtcagcctgggcaatagaatgagaccctgtctcaaaagaaaaagaaaagaaatttagagcattaaatgcatgtgttgaagctgggtgtagtggcacatgcctgtagttccaactactctggagaccgaggtgggcggactgcttgagcccgggagtttgaggctgcagtgaactgtgattgtgccactgcacttcaggctgggtgacagagcaagaacttttctctaaaaagaaaaagaaactagccaggcccagtggctcacacttgtaatcccagcactatgggaggccaaagcaggcgaatcacttgaggtcaggagttcgagaccagcctgaccgacatggtgaagctccatctctactaaacatacaaaaattagctgggcttgatggcacatgcctgtaataccagctacttgggaggctgaggtgggaggattgcttgagcccaggaggcagaagttgcagagagctgagattgcaccactgcactccagcctgggcaacaacagagcgagactctgtctcaaaaaaggaacgagagagagagaaaggaaagaaagcaagaaagaacgaaggaaagaaagaaagaaaattgaatataaaaatgttttagataaatacatgactgggaaataaatttcttctttttttttttgagaaggagtttcactctygttgcccaggctggagtgcaatggtgctcaccgcaacttccgcctcccaggttcaagcaattctcctgcctcagcctcccgagtagctgggattacaggcatgcgccaccatgcccagctaattttgtatttttagtagagaaggggtttctccatgttgaggctggtctcgaactcctgacctcaggtgatccgcctgcctcggcctcccaaagtgctgggattacaggcatgcgccaccatgcccagctaattttgtatttttagtagagaaggggtttctccatgttgaggctggtctcgaactcctgacctcaggtgatccgcctgcctcggcctcccaaagtgctgggattacaggcatgcgccaccacgcccagctaattttgtatttttagtagagaaggggtttctccatgttgaggctggtctcgaactcctgacctcaggtgatccgcctgcctcggcctcccaaagtgctgggattacaggcatgagccaccgtgcctggccaaaatttatttttttaattaaagtaggccaggcacrgtgactcatgcctataatcacagagctttgggagggtgaggcaggaggactgcttgatgccaggagttggagaccagcctgggcaacgtagtcagacccccatctctacaaaaaaaaaaaaaattattgaaagattagctgggcatcgtggtccattcctgtagccctagctgcctgggagattgaggtgaggatcccttgaacccaggtgttcaaggctacagtgagcagggattgagccactgctctccagcctgagtgacagagcaagatcgtgtctcaaaaaaaaaaaaaaggtaaagcaaagcaaaacatgctcattaacactctcattaatgactgtacatttgttgtacttgagcgagttagaaaaacgccacactttgagatgaatttagagtcctttattagccggtgaccgagagacggctaacggtcaaaattctctcagccctgaggaagaggcttgattaacttttatatcttggtttaggaagtkggggggggggtctagttaaaagaattttacagaagttaagtagtcaaaaagttaaaaggataaatggttacaggaaagtgaacagttccaggtgcaggggctttaagactattacaaggtgatagacgcggggctttgggcgttatcaatcagatgaattcttggcgactgcggatacagcttgccacagtatcttatcagttaattgcattcttggatgtgctgggagtcagcttgcatgagttaagtgcttgaggaaggggctgccagtgaaagagtcaagatggagtttgtctggttctcttagctaagggagaaacaaggccaggtgaataaggaaaaaacaaggttgggcattacacattttggccgggggcggtggttcacatctataatcccagcaatttgggaggccgaggcaggtggatcacctgaggtcaggagtttgagaccagcctggccaatatggtgaaaccccatctctactaaaaatacaaacattagctgggcgtggtgcagggtgcctgtaatcccagctactcaggaggctgaggcaggaaaatcactggaacctgggaggcggaggttgtagtgagccgagatcgcgccactgcactccaacctgggcgacagagagagaytacgtctcaaaaaaataaataaatgactgtacgtttcacagtacacatatttgctaaccccctgtgtatgtttgtctttaaatctaatgttcttcacagtgaaaccctgtctctactaaattagccgggcgtggtggcacatacctgtaatcccagctactcgggaggccaaggcaggagaatcgattgaacctgggaggcggagaatgcagtgagcgagatcgcgccattgcattcaagcctgggcaacaacagtaaatgtccgtctcaccaaaaaaaataaataaacctaatgttcttggccatgtctgttccagggtccagtccagaataccacattgcatttagtgtcagtttttatttcaccgacrtagcttaggggccttgtcttgctgatgaaggaggaaytcctgggaaacctttgtctctcacaagtgtttatgtgaacacttcatacactcctgtgtctctggatgtggctaccatgttaacataaaaaaggggtgagaagataacatcttaagaattcccgccagaatcyatgccctccagaatccacgccctcccccacccccgcttgctgctgcttttgtgagcccttttagggagactgggagaggatgttcttagcagttctcagccacttcaacccgcagacattgattgaggccctactgtgtgcaaggtcctctggtagacgctatggggaaaaacaaagttgaatgagacctttttccactttttagggcagacatccagccagagaggcagccagacccaatggactgcaacaccacataggggtgagaggcaggtggcagcagcagtaatggagatggggagatgcatttcacctgggaggatcgtagagcgcttcctggagcaggtgattctgaactatgccttaaaagaagggtatgatttcaatggtaaaggcaaaggggaactgtgttctgggctgaaggagcagtgtaagcaaagatacagaagtgtgaaaactgggggcaggtgcatagaatgagcagcccaacattcctggagttaaatgtggtataaaagagagaggggctccagagaaggctttccatgctggggcaggaatccacctccctccagcaggcggtgagaagcagcggagactcccacacagggaagtaagatcggagctacagctgagctccaggggggtgctggtggcatggcacaaagtgatttctcttgtcttcttggggtgacgacgagctagccagcccagggggtgggaggyggggagggtcacaggaatgaaagtgaagagaggcaggtggggaaaggctgaggtgtgataacaggatgtgagtgtgaagatgaggatgggggcgggggggggcggtggaagtgggggactgaggccgcgaatctgctggacagagggrgtgggtgcctctgtgttgaaggggctggtagagccacagcaggttgagatggaggtcaggtccccacccctgagtcaggctggagcctggcgcccaggcataaatttggtgtcatcagtgaagagggtctgccaatgggtcctcagggcagaagaggaaagagaccaacccacctcataggggtcatgtcctcaatgcctctgttactccaggatctttgaccccttgtataacttgtaaaagggtccaggcccatagaaagccaaactgtttactgagctgatggactgtaccgtgcatggacctttctagaagcagttttgtcatctcccagyccctagcctccccagggccccaccactcagaataagggccaagctcctcggccccacatgcaaggcctgttgtaacctaatgccacaccaagctccagtccatcatccgcccttgcccactttttctagccattgacaaccttccctgcattgcggctccaccgggaagctcccttaacttctgcagcccaaggtcttctctgtctccaggggttggctcccctgtcccggtctagggagaactcgctgtaaagatctttccccaccttagcgtgctgtactgtagctcgccactcatgagcgctgctggactggagcccgagggaccacatcccatttactcccagagcttccaactagcaaatggtagtgaaggaacaggaagtcctgttttgagagcccccagctaaactgggcttccagtaccagagcagccagcaacctgccctaagcagaaaggtagggggctagacgtggatgtgtgcagtgcacctttcacaggatacttmttgtaactagtggacaacctcatgcctagtgtctgacctatgaccagaggcccctcacatgggaaaggccctagtggctctggtgagacccatgtctggtttatgctgcctgaccattgctctggcaccgggagcccggcctagggcagcccctggttgttctgatggaaagtgcaaattcaacccaccaccgcgggaggaaacaagtccaaagatttttaatacagaacctgggcaagggaagtgtaatgagactggagggaagtcctcgtccctggtcacgggaggcaggagtgaagagtcaggcagaaagagcacgtggcaactaacagcagatagaagggaatgatcatgggtcaataagtttgctgaccaaatgcctgactgttctttttaaaggaagcatcagaaaagcaggagtgcagtctgctaggcagaagagatgcctctaagcgttattttatttttgagtggttgtggtagtgggggtgggtgggtctcactatgttgcccagccctggtctcgaactcctggcctcaagcaatcttcctgccttggattacagacctgagcctattcccaccctgtcaggcctctgacttcttatctctgcagtcctttgggtgtggtgtagacctggaaactgccaagggtgactgtgtagggaccagccccacagggtcagtgggtttttctccccatgtgcagagacgagagattgtagaaataaagacacaagacaaagacataaaagacagctgggcccaggggaccactaccaccaagacgcagagaccggtagtggccccaaatgccaggctgtgctgatatttattggatacaagacaaaggggcagggtaaggagtgtgagccatctccaatgatagataagttcacgtgggtcacatgtccatgggacagggggcccttccccgcctggcacccaaggcaagagagaggagagagagacagcttacaccattatttctgcatatcagagacttttagtactttcactaatttgctactgctatctagagggcagagccaggtgtacagagtggaacatgaaagtgaaacaggagtgtgaccgctgaagcacagcatcacagggagacggttaggcctccggataactgtgggcaatcagtcaggccctccacaagaggtgtggagcagagtcttctctaaactaccccggggaaagggagactccctttcccggtctgctaagtagcaggtgtttctccttggcactgatgctaccgctagaccacggtccgcttggcaacgggcgtcttcccagacgctggcattaccgctagaccaaggagccctctggtggccctgtcygggcataacagaaggctcgcactcctgtcttccggtcacttctcgctatgtcccctcagctcctatccctgtatggcctgatttttcctaggttatgattgtagagtgaggattattataatattggaataaagagtaattgctacaaactaatgattaatgatattcatatataatcatatctatgatctatatctagtataactattcttattttatatattttattatactggtacggctcgtgccctcggtctcttgccttggcacctgggtggcttgccgcccacagactgagccctacttctggtaggaaaaatttgaatcttatcaaaatggatgccaaggcaacataaaattataagaaatcactatcagtacttggccaggcgtggkggctcacgcctataatcccagcactttgggaggccgaggcggagggatcacgaggtcaggagatcgagaccatcctggctaacacggtgaaactccgtctctactaaaaaaaatacaagaaaaattagccgggtgtggtggtgggtgcccgtagtcccagctactcgggaggctgaggcaggagaatggcgtgaatccgggaggcggaggtttaagtgagccgagatcgcgctacggcactccagcctgggctacaaagcgagactctgtttcaaaaaaaaaaaaaaaaaaaaaaaagagaattcactaccagtacttgttcttatttgtcctagacttgccactgtttcagactcaaagggtgcactttccctctttcattgtaggatttagtgcatgaatctgctcaccccaaacatcctcttcataacttggggttttcgatcctttccaggcagatattgtttataatccctcacctggagggttcctccacgtccccaatttatacattcatttgttcacctgtacaatttttttttttttgagacggactctcgctgtcgcccaggctggagtgcagtggtgcgatctcggctcactgctggctccgctcccccgggttcacgccattctccggcctcagcctccagagtagctgggactacaggcgcccaccacctcgcccggctaatttttcgtatttttagtagagacggggtttcaccatgttaaccaggatggtctcgatctcctgaccttgtgatccgcccaccttggcctcccaaaatgctgggattacaggcgtgagccaccgcgcccggcctgtacaacaattattaagactggcttgtgccaggctctgctgagaatcccaggacacggtggggacacggtggacgcaggctgtccgtcaagggggctagtaagccactaaacaaagggtagccttcagccctgcggcgcgggccagcgagcattcagaggcccaactcgctgtggttgctccccgggtctggtcccgcgcggacgtgggggcggccatcaggactgcccgggggttggcgccctgctgggttccaagccggtgggcgcggacagtgtggcgggaaggcsgggcctggcgggtgggggcgcggcctggcggtgggggtggaccttcctggggtggagcccgcggctgtgggagcagggcccgccggggctcgggcagggcggtgggaaggcggggccttctgagtgggggcggggactgctggagttgcggggcctgcctggggtagggcggggcaggacagcttggagatagggcccggaattgcgggcgtcactctgctcctgcgacctagccaggcgtgagggagtgacagcagcgcattcgcgggacgagagcgatgagtragaacgccgcaccaggtctgacggggaggccttgtgcgagcgtcccactgcccacccacctggttgggacagtagaagagggcgggatggagtggagggttcgccgaccgcgtcgccctcctgggtgtcgcagctccttcctcggcagtcccggggcatgagagcgcgaccggccaggagttgggggacccgggacacggccgcacgtggcctcccagggttccaggagcccctgagttagccgagcgtgcgcgtgggtgtcgggggtgcgcaagtctccagccttgcagagacggaggaggctgccagatgtgggggcggtgggggttcctggagtcccaccgcctgccctaaatttccactccgcccttgtcgcccagtgtgaccttgggcatgtactgcagctcccagtgcctcagtttcctgctctgtggagggagagtgacagtggtcccacctgctgcgtgtatgagggtttggcacccctctggcctttgggaaaggcttaggaaacgggctgtttctttactccggttttacaggaaaggaaactgaggctcaagacgttttagtaacttctccaaggttacccagccagcaagtgatggggtccaggcctgaccagcgcccccgccccagcacattctagaaggttctgccccagtttaaatggggtgcatgctctgaggcctgtcacagctttttccggcttagcttctctgtccctcctctgggagtctccactcccatgtctgactctctccccataaccttctggggcagctaagggtctgagtccctctggacatgagcccctggctcaagcacatcaggsagagataaggggctcagggagcaccagcttcatgggtgaatgaatgaaggaatgaaagacccggctgtgtctttcaggtctgatctcagagctgaagctggctgtgccctggggccacatcgcagccaaagcctggggctccctgcagggccctccagttctctgcctgcacggctggctggacaatgccarctccttcgacagactcatccctcttctcccgcaaggtgtgaggctggggctgaagggaaggccagggggaaagtgggcaggaaggtgaggggggaggtctgcaggggaatgaggagggcggggagacagctggcatagacacctcttcctaccctccaacccgcttctctctgtttcagacttttattacgttgccatggatttcggaggtcatgggctctcgtcccattacagcccaggtgtcccatattacctccagacttttgtgagtgagatccgaagagttgtggcaggtaagaaacagagtgtgtattttcggcggtgtggggggtgctctagggcaccccctcttatcactggaggcggggtaggatccaggaagcagcgctggcctgagagtggggcctgggctctggccccaggtctgccagcaattcacggsagatcttgggaaagttgaagagttcgcttcctccagtgggtcccccaagctagtstcctgggtggacaccccagatgctgggaagggatttcctgagcctggggactagaagcaagatcgtgggctgagcctgtgcccagccggaccttctggctccttgcatttccagccttgaaatggaatcgattctccattctgggccacagcttcggtgagtacagtggccaggagctgaccgggcccggagtagggctgggagggaaggataggagctgctgccccacccctttcccctgcacttatgagatctgcaaagagagatgagagggtcagtcagaggttgaccactgtaccctctgacctcaggcaactgccgcaagggacacagggatgagggaaatgtggtcttttgagtggtcaggtctgatgaaggggacatcatggcccagatgctgagcccccagccacccatatggtgccccccccccaactggtgggaagaagctttagggtatgcagctggggagggagtgagggaatgtcacccacagctcttttgtcccccaggtggcgtcgtgggcggaatggtgagtagatggctttgtctggccaactggggctcccttgggtggagtggggaggggagcacaaaggaggaaggagaaggtacctgggacagaaagtgcctcctcctgtcacagtgatagtccttataccaggaagttggtgtaaacggtggagactcctggtagagttcatgtttccacgcccccatacccggtcccaccgcaccctggagtccagccatcaccaaggtctggagctcagtgctgggtgcagacttaggggtggtgggggaaggcacaccatagatagaagattctcctctggcctcttggtcagcaccctccccccagcctaaaagatgtttcggggaactccagggtccccagggaaaggcgggagtgtcctttccttcttcmycctattcattctccccttttggcatcctcacagtttttctgtaccttccccgagatggtggataaacttatcttgctggacacgccgctctttctcctggaatcagatgtgagaagcgggctttcgtgcatgctgtcattagggaggacctgggccccgggcagcgctcccagccctgtctcctttggtggacactagggaagcacgaggaggcggcagagggtgggaaaggggagtcaggracccgctccccaacagatgacacscttctgctgcttatacccctagcagtggtcaggacaaggggtgtgggggaccccttggaaactggatgtgtggctcgggatctgcagaatgccaggctgatcacgcagtggcaggcagtggaagagggcagcggccatgggtggaagatgttctagggcacacagctgggccggcacactgcactcacacccagtcgaatgcctttgcactgtgtccacattgcaccaccacacatgacagccctaaatgtgaactgaaggaacaaggactgacccctctgaccaccactacccataaccagtactgtctctgcgtctgagtcctggcctggtttacctgctgggtgacccytggcaagttactttgcctctctgggccttagttcccgcacgtgtaaaatgaggttgggctcaatgacctggccagctctgacatcctgtcattttcttgccaaggtctcagcctatcagttgtgacacaagtctcatcagtttcagttttcttgtccatagaatgaccacagatcggccagatgcggtggctcacgcctgtaatcccagcactttgggaggccgaggctggcggatcacctgaggtcaggatttcgagaccagcctgaccaacatggagaaatcccgtctctactgaaagtacaaaattagctgggcgtggtggcacatgcctgtcatcccagctacttgggaggccgaggcaggagaatcgcttgaacccaggaggcggaggttgcagtgagccgagatygcgccattgcactccagcctgggcaacaagagggaaactccgtctccaaaaaaaaaaaaaaaaaaaaaaaaaaraatgacggcagatcccataaggataaggatcatgtccatctctgtcaccacatccccaatcctggcacctagtaagggctcagtaaatgttccttgcatgagctcagctagctcaggggctattataaggatccaatttacagatggcagacagcagacactcccttctttctgcatttcacccactgaattgacaagtgcagtgcccccaggggcttcctcctgggcgagtcaagaggggcatttggtcctcttgtcctgcattctcaggcatgggtagatgggagatgcccccctctgcagccccaggcagtgggcctgaggctgtcctcacagagtgagccacacatcatgggggagcttggaagccccagaaatgcgccctttctgccagtccctttctgccactgagaatgatggcattcgttgaaccagatgaaactgccaaccccagatggttcgtggcctccggaccctaatttcatgcctttgcaaagcacttggcagttgacagagattccccttcctctccatcatcccacctgatctcttcaactgtccctggccgcaggcaagaccaggctggctgtgactgaggcgaagcaaagactcgttcagaatcgtggggctgactagccagggctggggctgtgtgcccctttgccgagaggggctcagctgagagcagagggcagggctaggagggrcagagacctcgtctgcagcctggatccctgcccaccagccaactgtgcctccttaggaaatggagaacttgctgacctacaagcggagagccatagagcacgtgctgcaggtagaggcctcccaggagccctcgcacgtgttcagcctgaagcagctgctgcagaggtgggtgcccggtgtggacggggagctggtggggtccaggggaggacatcccgtgagacgtggagaagcttctttctccctctcacccaacaagcctgtttctccctggggtcacgctgagcaccaggcttcccagggtcttcagggacgttctctctttccctctgcccctgctccagccatgccccttacttccaataccctccccacacctctcacgcacccgcctctctcccaagcacatgctgcttccacgccttctctcccctctgggactccagcctgggctcccttacctggaattctcccctgtgcttgctcactggcttccccactccttggggcctcagctgggaaccctgccctgacacccccaggcaagctgtccctgccctgcaggtaaccacacygtccaataagagcctattgattcctctgtttcccgaggcmtgtgarcyccgcaacccccactatggctgatttggtcatctttgtgcctcctgcatctggcrgtgggcctggtaggtcagagctccacacatayytgttgtctgaaggaggagaagccccccactgccccaccacacgcacgcgcacacacacccacacacacacaccctgccgctgtaaacatgcmatygaaacacgggacacaggccaggcgcagtggctcacacctgtaatcccagcacattgggaagctgaggtgggaagatagcttgagcccaggagttagagaccagcctgagcgagatagcgagaccctgtatttaaaaaaaaaaaaaaaaaaaaaaaaaaattagctggtcgtggtggcacacgcctgtggtcccagctactcagcagccttagttgggaggagtgcttagccccaggaggtcgaggctgcagacagccatgatcatgccactgcactccagtctgggtgacaaastgagaccctgtctcaattagaatacaaggtccaggcacggtggctcatgcctgtaatcccagcactttggaaggcggaggtgggcagattacgaggtcaggagattgagaacatcatggctaagatggtgaaaccctgtgtctactaaaaaatacaaaaaattagccaagcgtggtggtggcgggcgcctgaatatctatccagaagaggcgttagacattctctagatgtaacgaagaatggcatgaacccgggagrcagagcttgcagtgaacccagattgcgccactgtactccagcctgggcaacagagcaagactctgtctcacaaagaaaaaaaaagaaaaaaaaatcasgagacacatgcacgctttgtgggtgacctcccttttgctgcccttgtctccatttttttgttgttgttgtgttttgtttttggagaccaaatctcgctctgttccccaggctagagtgcagtggcacaatctcagctcactgcaacctctgcctcctgggttcaagtgattctcatgcctcagcttcccaagtagctgggattacaggcacatgccaccaygtccagctaagttttgtatttttagtagagatgaggttttaccatgttggccaggctggtctcaaactcctgacctcagatgatccgcccatcttgtcctcccaaagtgctgggattacaggcatgagccaccgtcccccccggccctcctctcctttttatctgacctcctttttattggcctccaggcacccagcatccttctgtctccccccaggttactgaagagcaatagccacttgagtgaggagtgcggggagcttctcctgcaaagaggaaccacgaaggtggccacaggtaagggactctactgtccaaggccattttatatttgtcactattcttaccgaggatgtcaaggacttgccttagaccaggcaggatactaagcgctttgcaaacagcatctcactgaatccccctcctgcctcaccctcawcccatttagagcaggagaaaccaaggctcagcattgccaagcaacccgggtgaggccatacagttactgcacatcccagaaagccacgctctgggagagtttggtcaggtgtcttggactaaatgttggtgaatgtcacggccatgctctgctggatctggggtgggtgcccagcgccagaggcaggctgtgaggacgtcccaggggctgagtgacttgggagaggcttttcacaatggagaggtggagctggtatgtcttggtttcagagcagcttctggcacaagcgatttgtgtactttgctttttacccaggaattttttttctttcgttcttttttcttatgagacaaggtctcgctctgtcacctaggctggagtgcggtggcaccatcatggctcactgcagcctccacctcccgggctccagagatcgtcccacctcagcctcctgagtagctgggactacaggtgtgagctactgtgcctggcccaggaaatcttttgtaagggcctgctacaggcccggctcagtgaggctgcagtgagcaagagccgactgtccctctctcagtggggccagacctcccgcaccacaactccaggggctgctgtgcacaaatggcgccccctggagttgagtaaggaagagtctgggcagaggcctagattcttggaagagaagcagatgatacacaggtgaacaggcacatgagtggttagacattctctagatgtaatgaaggaaatacatggtgctctagaagagactcatggcggggcctgcttcagagcagtggtccaggaagcagctctcccagggtgagggaacagctggagggagatggtgtcgtcggatggaaaatgtgctaagytgggcaacacaactttgcttcctgacactgccagctcagtgatcttgggacagtcccttcccttttagactccccttgtttgctcaggtgacaaacaaggtcttgggttttttgcgctcattggaccaggtgaggtgggcatgtgccttccctttataaagtgctgagtgaggcagggggtcagaaactccagcacctgggggcgggggtgggggcgtgttgtggagttgagggtgcaggccgggagggaggctatgggctgtgtagggactttggagctggaggcagcccaccctggtaggcagctgggccggtgctaatcaagtgggaattcagtctcgtgtggccagaattaccagttgctcagctctgcagttgatctgctgaggtgagtatttttagttgtcttgagtccagaaatggacagcatcccccgagggtctaaggagcggcacctgtgggctgttttggcctcgggtcgccagtttgggaccagttgggycttcgtgatcatcttggctgaacctttatcttgcctccctggaaacccatcatggggaggggaggtcaaggaccccgggcccaggcttcctggacatgcctcacggatggctgacctagggagccccaggcacagaagtgagctaatctggaatgaggccggggaattcgattaggcccaggtcacaggaaacagtgaatgcaggatgctgaccaggcacccctatgtgggtgtcaggggggtgagggaacaggcaagagggagggctgagaaagaggtgaaccctgggtctgggggaagtggtcagctggctggaacgttgtgtgcagacaagccctctgcagcagttgtggccttttgggacccagcattaacctaaaagaagacagtacccagccagaaccccccacccagtgcctcaaggacaatgtaggttcctcccaaatgcttccctccaaccccagggcccctgagagttcacattctattctgaactgggataacttcccttccctgcccccatcatccaacctgattcctccagaatctggagcttaaacaaccaagacacattcccccacagttccggagttcagggtccaaggtcaaggcctcggcagggctggttccttctgagggctgtgagggagtatctgttcccacctctctggctgctgggagcctcaggagcccgttggcttgtgtgtgaggttctctgggtgggttacagagtgcgtgagaaggggagggctcgtggaggacgcagagtggggagggcagcgagcattgttggagaggctgcagctccacttcctcttttgaataggaaggtctgggtgggcctcatgagaaggtgacttttgagcaaagcagtgaaggtacgggagctgctccyayggactccaggaggagaaaggagctggcaggacaggcctggaggtgtgagctggtggtgcaggatggggagagagcagcagagatgagctctttatcttctcatctaagtttaagccccacaatactggctttctggaaaccatcttgaggtgttcccatgaaggagggaggggcccactctgcctggggtgccctaaggacagagggacagtctgtgtcagtctggcccctggccaagcgtattcacacatgcctgtaatcccagcactttgggagtccaggtgggaggactgtttgaggccaggagttcaagaccagcctgggcaatatagggagacacccccatctctacaaaaaattcaaaaataaacggcatggtggcacacctgtggtcccagctacttaggaggctgaagtgggagactcacatgagctcaggagtcggaggctgcaytgaaccttgattgtgccactgcactctagcaagaccctggctttttctttttttcytttttttgttgttgttgttttcaacagggtcttgctctgtcactcaggctggaatgcagtggygtgaccatggctcactgcagccttggcctcatgggctcaggcgatcctcctacctcagcctcttgagtagctgggaccacaagtgtgcagaccacacctggctaatttttgtatttttttgtagagatggagtttcgccatgttgcccaggctggtctcgaactcctgaactcaagcgatcctactgactcgacctcccaaaatggtaggattacaggtgtgagtcaccatgcccagccaaccctgtcttaaaaacaaaacaaaaatatctggcccctgaagccccgtgctgtgggggaggctcaaatctttctcataagctggactgcatacaggttgcagataataatttgtttaacttgtgcagtttaatcaaaaacatttggcatggggggaattttgaatagattgcccacattttattttttattatactctttttattttttggaggaagggcccaaggaccagagcagaagggctattattttaaatagaaagattttatgtaaaaatacagatttctagaccaggcacagtggctcatgcctgtaatcccagcgctttgggaggctgaggtgggtgaatcacctgatgttgggagttcgagaccaccctgaccaacatggagaaaccccgtctctactaaaaatacaaaagtagttgggcgtgatggcgcatgcctgtaatcccagctactggggaggctgaggcaagagaatcgcttgaacccgggaggtggaggttgcagtgagctgagatcataccattgcactctagcctgggcaacaagagtgaaacttcgtctcagaaaaaaaaaagacaagaaaaaacatgtcttttgtatggcttctggaatttgagtcatagttaaaaggtcatgcttgacactaatattattttgggtctagcactagcatttaaatatttactacattggatccttatctagtatacaaagtgaggtttgcatctgacttcatctttttccagatggctcctcaggtgcctaatgccatttttagacaagtctatctttaccctgttcatgtaaggggctgccttggtcagacagtgaatgcccatctgtacttgggtctgtctctgactgcctgtctatgatcttactgtaccacacattttaaactgaggcccgacacaggatttttttttttctttttttttgagacggggtcttgcttttgtcgtccaagctggagtataatggcacaatctcggctcaccgcaacctccacctcctgggttcaagtaattctcctgcctcagtctgccaagtagctgggattacaggtgcccaccaccatgcctggctaatttttgtatttttagtagagatggggttcaccatgttggccaggctggtctcgaactcctgacctcaggtgatccacctgtcttggcctcccaaagtattgggatttcaggtgtgagccaccgcacccggcctgaggattttcgcatctgacgggaccgtctcccttcatggctcttttacagagtttttctactagtcttttttcttttcctttttgagacagggtcttgctgtgttggccagactggattgcagtggcaggatctcggctcactgcagcctctgcctcctgggctcaaagaacccttccacttgagtcttcccagtagctgggactacaggagtgtgccaccatgctcggsgcgcgcgygtgtgtgtgtgtgtgtgtacacgcaacaaggccatttatttcacctgggtgcaggcgggccgagtccgaaaagagagcaaagggtgatgggatgactacgctacgttctcctacaaatggaccttgagagcttgtttggaggttctagcaggggagcgcagctactcgtatacccttgaccgaagaccggtcctcctctatcggggatggtcgtcctcttcgaccgagtgcacagtttcgggagggacgcacatggagcggtaaggaagggaggggacacccgcctagccgccagatcagcygaatcaaccctggcgatcaawggggtgacagatgtcgcagccagatcaccctcacatcttttttttttttttgagacggagtctcactctgtcacctgggctggaatgcagtggctcgatctcggctcactgcaacctctgcctcccgggtttaagcgattctcctgcctcagcctcccgagtaactgggattacaggcacctgccactacgcccagctaatttttgtatttttagtagagaccaggtttaaccatattgcccaggctggtcttgaactcctgacctcgtgattcgcctgcctcggcctcccaaagtgctgggattacaggcttgagccaccatgcctggccttggctarttttttagtttttttgtgtagagatggggtcctgctccattgcccacgctggtctcaagtgatcctcccacttcggcctcccaaagtgctggaattacaggtgcctgacctcctgctattcttacctgtgtaatttttccacgtgaacttgagaatcaggtggtttaggccccccaccaagaaaatcttgttggtatatcatatatgtatggttttttagtgktttttgtttgattttttgagacagagtcttgctctgtcgcctaggctggagtgcagtggcacgatctcagctcaccacaaccagtgacaccattggtacttatttgcttcttcctagtgactaaaggaatgaatgagtttctcagagactagagctccaccgtccacgaggctattagcctaagctcccgccctcattctgcaccggccctttggggtggccggtgagggcccatgtgggctgacaggtctgtggccaggtggctgtggtctagccctgctccagctggaccccaggacagggagtcctgggcagctgaggacgtcgggggcaggtgggagaaatgggccctggctgcaaaggcctggagggttccagcaaagtcacggagcgtcccctgaccctgatggacagcattgacgctgctgtctttgtgcttccgcctccaggtctggttctgaacagagaccagaggctcgcctgggtgagtaccactgcctccgggtcccccgccaaggtttgcctgttagcgtctttgtcgtttttgaaaattacaggccaggcgtggtggctcacgcctgtaatcccagctactcaggaggctgaggcaggacaatcgcttgaatgggaggcagaggttgcattgagccgagatagcaccactgcactgcagcctgggcgacagagcgagactccatctcaagaaaaaaaaaamaaaagaaattatatagctaacataatacttaatkattgtcaatttaaccgtttgtaagtatgcacttcagtggcattaaatacagtcgatggaggtgaggagaggagggagacatcccaggcactggctgctgcacagggaaaagctcgaagtcagctcggtgcatctgttgagagggggattcctgatagaggctgtgaagattaaagaggggaggggcaggatgacaaaggttctcaaaaaacagygtcccatctggaggcctgtgtcactggagcacttgtattaatagaaacttggccatctctgccagtgaggggctgtaggaccttgggcaaggtgcttaccctctctgagccttggttgtctcacgtgcaaaaagaaagtgctttcattcgctcagctggtttatgagcagcttggctaggggagccaagccctgggcctgcctttgaagggttgttgtcgagactaggtgaggtcatgtgtgttgagtggcctcgcacagtgctgtcgcttcaggtgctcatggcctgtgctattttgtgattgttaaaatatggtagaacattggacacatgtgagacactgtcattagaggtggggacgctctaactgcagggagaccgctgagagctgctgcccaggcccaggccaagagatgaggcttggaccagggcgtcagccaatggtctgggaatgttaacgtgtttgtctttgatccgtgtgggatttgttcttgagcatggtgtcagatagtgattcattttcttttctttttttcttttttgtgttttaaaagttcgatttttcggccgggcgcggtggctcacgcctgtagtcccagcactttgggaggccgaggcgggtggatcacaaggtcaggagatcgagaccatcctggctaacaaggtgaaaccccgtctctactaaaaatgcaaaaaattagccgggcgcggtggcaggcgcctgtagtcccagctactcgggaggctgaggcaggagaatggcgtgaacccgggaagcagagcttgcagtgagccgagattgcgccactgcagttcgcagtccggcctgggcgacagagcgagactccatgtcaaaaaaaaaataaataaataaaaaaaataaaagttcgatttttctttaattttattattattattattattattattgatacagagtctcgctcttgttgcaaaggctggagtgcaatggcactatctcagctcacggcaacctttgcctcccaggttcgagtgattctcctgtctcagcccccaagtagctgggattacaggcacccaccaccacacctggctaatttttgtgtttttagtggagatggggtttcaccatgttgtccaggctggtctcgaactcctgacctcaggtgatctgcctgcctcgacctcccaaagtgctgggattacaggcatgagccacagtgttcggtctatttgaattgtagagacagggtctccctctgtcacccggactggagtgccatggctcaattatggctcacacagcttcaacctcctgggctgaagtgatcttcccacctcagcctccggagtagctaggactacaggtgtgcgctaccacacccagctaaattttttacttttgtagagacaggtcktgccatgttgcccaggctggtcttgaatgcctgggctcaagctatcctcccgcctcagtttcccaaagtactgggattacaggtgtragccactrcasccagccatygtaattgtttttctagatgaacagctagttattccaataccagctgttgggtggtcctccctacccactaaggctcactcactggtggtttgtcccttgtgtgtgctgaccttcgtggtaggaatttattgccagatcctagtcaatctggcttttggagatgcccccttccctgtccttagggaccatgtcttatgtgacctgttctgtagtgggagctgtgatcacccataatgctggaaggaagatggttcccagggatggaaagacttcgttaggacataaactaaattgcagaagatacacattacaaaatggagctggcccaaaattctcttttattttttaagtttctggccagctaagttttaagtttctgcagttgctcatgcctgtaatcccagcactttgggatgccaaggcaggcagatcacttgaggccaggagttaaagaccagcctcgccaacatggtgaaaccctgtctctaccaaaaaatacaaaaattagccgggtgtggtggcacacacctgtagtcccagctactcaggaggctgaggcaggagaatcgctttaactcgggaggcggagattgcagtgagctgagatcgcccaggctggagtgcagtggtgggatctcagctcactgcaacctccacctcctgggatcaagggattgtcctgcctcaacctcccaagtagctgagattacaggcgccctccaccatgctgggttaattttttgtatttttcatagagacagggttttgccatgttgggcaggctggtttcgaactcctgacctcaggtgatgtgaatttttttttttttcttgyaaaggaacatttcacaarttttcgtatcacgcttgcacaggggccacgctaatcatctctttgttgttccaatttagcagtatatgtgctgctgaagcaaagcacctaccttctatttatttatttatttagagaccaagtcttactctgtcatccagggtggagtgcggtggcccgagtttggctgcctgcaacttctgcctcccgggttcaagcaattctcctgcctcagcctcctgagtagctgggattacaggcgcctgacaccatgcccagctaatttgttgtaattttagtagagatggggtttcaccacgtttgccaaactggtctcgaacttctgacctcaggcgatccacctgcctcagcttcccaaaatggtgggattacaggcgtgagtgactgtgcccagtctaattttcatatttttagtagagacagggtcaagtttgcctgttcaccttgtgcccaggaagcccctcctgtgtgcaggcccaaaaagcttggtcacacccygctgtgagatgtggcagctgacatatgagaacacgcaggccttgggaacagtatgggaacccctgtttcagggaaggcacttcaggtcattttagtctgagaagcagaaaatagctggagggccagggtggaaacagggcagtgagttttcactggtgtgtgtgtgttcatagcaakttgtgtgtgtgtgtgtgtgtgtgtgtgtgttcatggcaattttatattcacaatggtgcaggagtatygggtgtaacttaggggagctggtccttacgggagcttcccggaattaatccactcagctgcatttatgaagcttctcctctgtactccacgtgctgagaactagggatagagaaaatgctgagagctcctgcccttggagtccccagatcagagcagcacagtgcaatggaagcaaagcctcacmgaacttgacatttctctagcagctatattaaaacaggcccaaggctgggtgtggtggctcacacctgtaatcccagaactttgggagtccgaggcagacagatcacctgaggtcaggagttcaagaccagcctgaccaacatggtgaaaccctgtcgctactaaaaatacaaaattaggcctggtggcgcatgcctgtaatcccagctactcggtaggctgaggcaggagaatcgcttgaacccaggaggmgggaggttgcggtaaactgagatcgcgccattgcattccagcccgggcaccaagagcaaaactcggtctcaaataaataaggctctaacaattgttctcatattttaacatccacaatgtgattcaagatgtaatcaacataaagcttgattgcattattttgcatgctaagttttccaaatccagcttcgtgtcacacctacagcacatctcactcaagctggccacatcccygccatccagacgtaaaacagtcacaagacagggcwggcagggccgcggaggaggcyggcwggggccatcacggagtgcccatcctgcactgtggtcccagcaagtttcttyctcctggcaagaagcctgtcccaggctggcaggggacagcgtgaggtgcagcctatggactgggaaaggggtgtggaagggccacacctaagtcctaaaatccaggcccaraagtggcccaactcacttctctgmctttaatcwcacaggcatacccggtggcaaaggagtatgggaaatggagtcaggctgggtagccacgagcccaggaagaagggagracagacttggagagggcaggagtctctggccaccaggggctaaagagccttcgatgaggcagtgatgtggggtcctgggctcagacccagggtgggtggctaaggtgccctcgccaggacttagccaccccaacagagatgggtttcgtgcccacgagagtgcctgtgccttgtgacgagaattcaccatgtttttgtctctgcaggcagagaacagcattgacttcrtcagcagggagctgtgtgcgcattccatcaggaagctgcaggcccatgtcctgttgatcaagtaagtctggacccatccccttcagycacccgccaaggagacatgggcgccaggaatctcbgggagggggccctggcatgaggctccaagttctctgcgtgtcgaccacatcgctaagrctcaagatcttttttgggaagcccccctggcagcagggtcatggaaggaggaaggtcagaggaggggagggctcrggcagcaggggatgggccggggctgtcccatgcctttccacaggtgtcagcggggggcatgcccaggtaaggctccataaccagtgagcccagtctcggctgactgcaacctctgyctcctggattcaaacgattctcctgcctcagcctcccgagtagctgggactacaggygcccgccaccaggcctggcttatttttgtatttttagtagagacgaggtttcgccatgttggccaggctgctctccatctcctgacctcatgatccgccygcctcggcctcccagtgttgggattacaggcgtgagccaccgtgcgtggcccaccatagacgatttttaagccataaaaagaaacgaagcactgacacgggctccagcatggatgagcctttaaaacatcgcgctaagtggacgaattcagacacaaccgtctacgtgttgtatggctgcattcacgttcaagtcaagtccaaatagggcacactgcagagacaaagccaggtcatggttgctcaggaccggaagcctgttgggggcggggggcggggggtggggtggggtgtgtgtgtgtccgcgtaagctcagaggttcgcgatttctttgggggcgatgaaaatgtcctgtaattgtgacgatggtctcacaactcaatgtattaaaaaccacagaattgtagactatcaacgggaggattgtgaagacataaattctctctcagagcaagtatgggctccagcgcctgttcagatcccagctctgcttttcagggctgactgtgaccaagtcctgaactccctgtgccccagaaaggctgtkccttcagcattcacttgtgcctggcttgtgccagctgagcatgagctgagattaactgagcctcaaatccaacccagggtcaagggacccagctgtgggagttggggtagcccaggctttggtttctcctcagaggcctgaacccagggcaggatgggggcaccgctgggaggcggttctaagatgaaccccaacaacccccaactcctcactttccagagcagtccacggatattttgattcaagacagaattactctgasaaggagtccctgtcgttcatgatagacacgatgaaatccaccctcaaagaggtaagacggggctcaggcagctggtgtccagccactgtcgcccactctggtcccacctcacccatctcttctcatgcactgggaagaccctgggtctgcccccaggcccaacaagtgaccaccaggatcwatcaggcctcatgctccactgtggtcagtccctagaggcctagggacacatgtaatcagaattaaggaaacagagacctttggtggggaacccctgccaggttcaagctactctcgtgcctcagcctcctgagtagctgggattacaggcacctgccaccatgcccagctaatttttatattttatatttttaagagatggggtttcaccatgttggccaggctggtctcaaactcctgacctcaggtgatccgcccaccttggcctcccgaagtgctggttttgtagatgggagccaccatacccggcctagtcgcacattttacaggctcccaaaccacagcagaatacccgactgcctcatccctctgcacccatcatgacagtgggcgtgctggctgtaggcagaggtggcttttcccccaggttcctgggagcacgtgktgttttatggtcacctacccrggaacactgaccctggggcctctgcaggtttcttggcattgtcacaaagggaagaagcccacctgtggctggccggctgccaggtcagagccaaggcaggcaaggccttcctgtctggcttttttttttttttttttgagatggagtgtcgctctgttgcccaggctggagggcagtggcccgatctcggctcactccaagttccacctcccgggttcatgccattctcctgcctcagcctcccgagtagctgggactacaggcgcccgccaccacgcccggctaattttttgtatttttagtagagacggggtttcactgtcttaaccaggatgstcttgatctcctgacctcgtgatccgcccaccttggcctcccgcctgccttggcctcccaaagtgctgggaatacaggcgtgagccactgcgcccggccctgtctggcttcttgaaggcagacacaagtctgcaggctgttcacgcccccatctcattatcttttctcacgggtacctcttctgatacaatcacagcaaccctggcctyggccccgccctgtccctgccatgcaacttcacaactcagctrgcctagacccctgggaggcctccaagtccctagggttagacacctcctggggtgctatggactgtcggggctccaaggagccgagtgtgggggaaactcactgtgggaggcgctcctgacctgcagggagctggaakgctgtgggagggccctgaccccrgggcccatggagctccctaggctcctctggccacacctcaccacccaccccctcccctctccagcrgttccagtttgtggaagtcccaggcaatcactgtgtccacatgagcgaaccccagcacgtsgccagtatcatcagctccttcttacagygcacacacaygctcccagcccagctgtagctctgggcctggaactatgaagacctagtgctcccagactcaacaytgggactctgagttcctgagccccacaacaaggccagggatggtggggacaggcctcactagtcttgaggcccagcctaggatggtagtcaggggaaggagcgagattccaacttcaacatctgtgacctcaagrgggagacagagtctgggttcsagggctgctktctcctggctaataataaatmtccagccagctggaggaaggaagggcrggctgggcccacctagcctttccctgctgcccaactggatggaaaataaaaggttyttktwttctcactgcttttgaggcttttttgttgccagcaagggcttttgcattgagggaaaaggaagcacagaacggattcatccagggtcctcaagggtgtggaggcaagaggtgggaaggacaagtcctcctctmggcacgcctgggtctccaggactgctgaagcacaagacccgaggrgtggcctggtccttcmctcctggcctgtgtggactctgatggggctgttggacgcgrtggccttcaacctggggcccgttggccagagctcggcctctcagagaccgctgcaggccctgyctcacctcatgtkcctcctggccctgcacctccagccatycactgmggctctcacrgctcagtasggtcggaatttgcgctgggcccgcagcagctcgatcctctgcttgtcctcctcaaacttcttgcgcagctgcgctagatctgggggtgagaggaggcgcggggcagggtcagacagcgcgccccggggaagctggcttgctcatgccccacccctcctcccagttactgtgggggtggggctatgtctcccccaccagcccatccccctcccagctctgctgtgggggcagggtctggatcttgtcaggaaacagaaccgacggcaggccaggccgagtccaagggcaaggccaaagtgggagatgctggcacccccagcctggagatgaagccctagcgacaaagcaaaggtacccgcccccacccccatccctgcacagggggaaggaaggagtcttgagcgctcggcctggagaaccctgagaatcagtaaaggcaccccagcccttgtgctggtgaatgcagatggcaaccctggtcagtgggaggctgatggcactgagggggaagctgagggtctagagcgagcacgagcgggagccaggagggccagccaggcagggaaagcaccagtgactgggcgggcggctcagggcctgccgcagagcccgtccctgtgccctagccagggccaggagaaccctcccctgggcccacagggaagctgttctgtagacagggacaccaggcagtggggcaggaggctcagccgcagcaccaggagtgggccacaggcgatcgggcccacaggcatgggagggtcctgtgcggggccacctgacagacacacacacacacacacccaccaccaacccaacacacatactctgcagcaccttctctgcacccacagtgggttcagaagccccctctgcacttgaacgcgttagctggaggctgacgagcgccagcactaagtgcacagggacccagaggtgggcactgatgacctagggtccccacccactgagcaaatgcatctgcccctggggggtgatggggaaccgccacacagggtgctgccaggctgggcctctttccacagagtctggtgcgagccccgtgcttagggacgccctccctcctcgaccaccaagtccagcgcccgccctcaggagcactggccacaggcctcatccgtggctggggccaaggccgaggggtctgaggatggactcggggtggcttacgctccatcttgctctctcgatgctgccaggcgtagttgagcagctctttttggctgcgcttccgtctctccctctccagcacccgcaagctggctgcctcagtccgggggagcacaggccgccggccccggcgggtcaccttcacccagccctcctcgtcagggaccccctcctcctccttggccttagcttcttcctgcaaggaaggtgatcccatcgtccggtgggcgcctgggacctcccgcagcctccagcagcgcgccctccacgccctcctcccaaagtcagaactgccctgagcccccgcaggggagggctgctcccctcctcccagcacagtgttggggctaaggagggcggggagggcacggacctgctggcgctgcctccttctccactgtagaccatgtggagactacatgtgtcacccaaccaggcagcccaggatccagcagggaaacagggagcctggcctctacagagtggccaaggacaggacaccaccgccctccctctggggcgccaccttcccacagccacacgggcgatgcggggctcggctgaccccgcggggcctctaacctcagcgatcttctggtcatatgcctccatgaacgtgtccacttccaccctcagggcctcagggtcgggcacagagtctgcgtagtcactgatccattctgaggaaaagggagccagggaaacggggcttcctcaggcctggcatttgggccccaccccagggcctgccaggcaaattgggaccttttcccacagggcccggggcacaggcgctaaggagatcccaggggctgcaagctgcgccctcgctctgcctgcccagtatgcctgtgccgctctgtgccaggggctcaggctaatgactccctggggacccagacacagccccatggtcctcctgcccaggcctccacatgctgctctcagggagcatggacttggcttgtgacattcagacactgtccccatagagtgtcctgccaacccggagcccagaaaggaggcgccagacccctcccgcagtactaactgtgaatgccactcttcacagggtggctctctgtggacaccagcagggggcccttcagggccaaggccgctgacaccccacttggcttctggaacaccacgtaggctacctggaaaccctgaagagagagagatgtcagaggttgggggctccttcccacgtctggcacaaggtctccaggcctgccctcagcctaggtggtagctacaccaggggagacggtgctaggctattcctgagccatgaagagaaccacaggccatcccataatccaggtcaggggcagccacacttccagtgatcctgcttcttcgcgaagtgacagctgttcccaactcctccccaggaagagaggatacagaggcttcctttcttccagtcacgggagggatgcggtgaaacgcaggggtcgccctgggccacggcaggtttttggaagccaggcctgggcacacacaccatgccagatgccactgtgtggggaggaggtgtgggctccagggccactgggaaagctgtgaacaacagtgctcctggagacccggcccccaagcctggggaaggagctccctcagtggggaagcaggaggggagccggggaaggccctgcaggtggccagcagagacggtccgtgagctttaacacgggacagaaaaagccaggcaggaagtgcaaggatgtggcaaatctgggaaggaatcgcaggctttgtcacccggacagtctcctacaccacacacagtgaggatgggctcaggaccagagaatgctctgacgtcccactgccagctcccctaccacactggggacagtgccccaccacccccctcactctagtggaacccagtgcttggcggctcaccggaactggctttggatgaaaaaacttcgaccttgactcccagccagctccagcttctccttcaactctacagactggacaaggccacaggtggactggaggcaggacaggctctcctgctgcagggagagggaagccaagtgtgagcatccgcagggccatcccaaagcctccctccaccatgggtggcgctgccagggatccagcgccgctgaaggactcagagccacagccacatctgcccaagccgggagactgtgggcaccatggcctccgacctgttccccagggacaatatggaggtcgatattcctgctctttttttttaatttttttgagttggagtattgctctgtaaccctggctagagtgctatagagtgatctcggctcactgcaacctccatctccaggtttcaagtgattctcgtgcctcagtctcccgagcagccaggattacaggcacccaccaccatacccagctaatttttgtattttgagtagagacagggttctgccatgttggccaggctggtcttgaactcctgacctcaggtgatctgcccgcctcggcctcccaaaatgctgggattacaggcgtgagccactgtgcccggcacattcctgctctctctcattggagacaggtggggacattcttgctgttattctgatttcctatgacaagttttactacctgaatcagcagtagcgaccctatgctgtgacagttgggatggtggttgtctctggtggaggcagtgggggttcgggggttctgggatgtgctgctgtgtctccacctgggtgctgactacacagctatgttctgtctctgggatgcagcgagctggacacttgcgactggggcccttcccggcacacatgctgcacttcaaaaaaggtcagaactcacaccccctcttctatatgcttctttttttctctaagtttagaggaatcttttacaaattagggtttcttttttgaaaacaaatccagcaattcccttggccaggggcggtggctcacgcatgtaatcccagcacgttgggaggctgaagggggcggattacttcaggtcaggagttcgagaccagcctggccaacatggtgaaaccttgtctatactaacaatacaaaaacgagccgggcatggtggtgggcgcctgtaattccagctgctcgggatgctgtggcaggagaatcgcttgaacccaggaagtggaggttgcagtgagtcgtgatcgctgtgctccagcctgagcaagagagagactctgtctcaaaaaaaaaaaaaaaaaaaaaaaaaagaacaaagaaaaaagaaaagaaaatccagcaattccctttagtttctgtaaaaaaaaaaaaaaagaaaagaaaaattaacagttgtgtttggatagaattagaggcacttttattttcttatactttcctacttttaaattatggacatgtacaatctggaagaaaacatgtaattcaaacaactttgggtaatatgcaaaaaagccttgggctacttaggattatacttttttttttcttttgagagtctcactctgttgcccaggctggagtgcagtggcacgatcttcgctcactgcaacttccgcctaccaggtttaagcaattcttgtgcctcagtctcccaactagttgggattacaggcgtgcgccaccacgtccggctaatttttggggttttttgggttcttttgagatggagtctcactctgttgcccaggctggagtgcagtggcatgatcttcgctcactgcaacttccgcctaccaggtttaagcaattcttgtgcctcagtctcccaactagttgggattacaggcgtgcgccaccacgtccggctaatttttggggttttttgggttcttttgagatggagtctcactctgttgcccaggctggagtgcaatgtcgcaatctcggctcactgcaacctctgccttccgggttcaagggattctcatgcctcagcttcccgagtagccaggactacctgcacacaccatcatgcctggctcattttttattttttagtagagacgggatttcaccatgttggccaggctggtctggaactcctcccttcaggtgatccgcccgcctcatcctcccaaagtgctgggattacaggcatgagccaccatgcctggcaggattatacttttaaagacatctttaaaaagccagtttcctgactggagatcacggtagccttcctgacactctcctctggggctcccattagctatgtccatctcaccaccaaggactcggtggaggccatgggagcccccaggtcccatgggaccttgagccaacaggtcccctcccagacaccagctcacctctgtgcagtatgggggcacattgaagacaaaaagagtcctcttctgaggccaggtggacttggtgccttgttgaatgccgtgtgctctcacatagaggtagtgagaagcctgttgcttttcagagaacttgattggaatagctggaaaggaaatgggaggggagggatggccaggctaccctgagctgaggccagcgagacactcacacaacttcctttctccacatccctgtctagtcctatctgttcatcgatccatccatcccttcaccaaccccccttaccctactctttggcaaagcctgtgcgggctctaagagtctgcccaggagggcctcccaaggcggtgcagggagagagaagataaatgggcaatgattacagatgggggcgcaatgagagggaagctcgaaccctgcggctcttggagtcaacgccaaaatcctaaccatggctggaagccccgtgagaccctgcctgtcactgtgacctcttcttgtaccatcttcccccagcaccttggattctctgttcccccgggtacaccagggcctcacacatgctggcctctctacctg

SEQ ID NO: 94368 - DNA, 48021 bp, Homo sapiens
  misc_feature (1)...(48021): n = A,T,C or G
ttccactatataaaaatgccatcttatagtgacaggagtgaaaaaaagaaatactttcccctaaaatggcaataatactctgatttaaatgtgcttccctaacatttttacaaaatgagtttttgtaatgatcctcatatactagatacgaaacaccgtcctagaactggtgtcttctcttgggtatagtacaacagcccatttacaaaggttaatttttccaaacacagagaatatcacttttttttttttgagactgaatctcactctatcgcccaggctagagtgcaatggcgcaatcttggcttactgcaacctctgcctcccaggttcaagcaattctcctgtctcagcctcacaagtagctgggattacaggcatgcgctaccacgcccggctaattttgtatttttagtagagatggggtttctccatgttggtcaggctggtctcgaactcccaacctcaggagatccgcctgcgttggcctcccaaagtgctgggatcacaggcgtgaaccactgcgcccagctgagaatatcactttactccccacaaaagataggtactcttcttcctttcaataagttcaatttgtttggacatgtatttccagaggctattttttcttaaaaccatattttattattcaaaaatacacattgtaaccttggaaatcttttttttttttttttgagacggagtctcgctctgtcgcccaggctggaatgcagtggcgcaatctcggctcactgcaagctctgcctcgtaggttcatgccattctcctgcctcagcctcccgagtagctgggattacaggtgaccgccaccacgcccggctaatttttttgtatttttagtagagacagggtttcaccatgttagccaggatggtctcgatctcctgaccttgtgatccgcctgcctcggcctcccaaagtgctgggattacaggcgtgagccaccgcacccggcctaaccttggaaatcttaaaactggcagagttttttcttaaagtaacaatgcatcttataaataacagtaccatagattccaagcaatactgtagtacattttccaaagtaagagagtacccaagagttacagctactttttaatgatatcagagtaagtttgagagcataaaggaactggaagtatataaaagcataaaatctgtacaaataatagctcagtcaataaaaacagaatggttctcaaagacctcaataagtcagtcaataatatatagtgtgaatctgcattaaagatgctattatgtgctaggcactgtatgtagttaaggctttattgttgttatttctaatccttgggatgacatcagaaaacaggtatttattcattcagcaaatatatactgagtgcttaatattacatggtatttactgttctaaataccaaagatgaacatgataggcaaagcccttgccctcatcagataatattgtagtgagaagaggtaaacagtaagtaaggaaacagacaatctaataaaacaagcaaggttttcaaatagtagtattatagagaaaattctaacaggatactaaggcagagatgaggaaaaggaaagaagagattagtttagatgctgattagggaaacttctctgaagctgagacccaaacagcaagaaggaggcagatacgtaagctctaacggaagactcctaggagacagcagcaagtacaaatctctttggatgggagtgggcttggcagaactaataaagacagcatatgatgaatgaggagcagtgtggtacaatacgaagccggagaggtgggaggggtcatattaaggaggaccttgtaagaacatggtagggggcttaaattttattctatgtgaaaaagaaaaccagtggcggattttaagcaaaggaactttgtaaaggatcactctcgttactatgagacaactgcgggaaactagagaagcaggaagatagttcaatagttattacagttccaagtaagaaataacagtggtttggaaaagggtaatagcagtgagatgtacagaagcaggtggtttcaggttacattttacgttttggaggtagatccaaagaacttgctgatggataggggaagtaggggaaagggaggactcagtgaggaattctagcttttaggcttgaacaagtggattagagagtggtgctactatgatgagaagacggaaggaaaaagaagtggcctgttagacattaaatgaggtatgtcagataaactgctagatatacgtttagagctcagagaagtcaggccagaggtataaatttgggagttatatatatataataatattataatatatatataataatattattacatatatatatatataacatatagcttgaatttaaagccagtagattgaagtcactctaaaaggtcacttgtgatctcgacaagaacagtttcagggctgttgtggggataacacatgactagagtggctgaaggagggaaaggaacttaaggacactgaaaaagtgtctaggtaagactttggaaaacttctgatgtgaaggggagcaaagaaatcagatggcagatgaaagggttcacgaaattttttttctgaaagagactctcactctgtcaacccaggctggagatcagtagtgcgatcctggctcactgcagccttgacctccctgggatcaagtgatcctcccacgtctgcctcctgagtagctgggactacaggcgcgtgctgccacacccagttaatttttctgtcctttgtaggacagggtttcacatgttgcccaggctgctctcaaactcctgggctcagataatctgtctgccttggcttcccaaagtgctaggattacaggtgtgagtcaccttacccagccgaatttttaagctggatataataaagtgtggtatcaaacacttgtttttaagatgggacactttttacgcaattctcaggaaaaagtaaagtttagaaaggtcacgaaacatgcttaacttgcttaaggtcataaggctagacagtgagtctagattcaaatttaggtctgactccaaagcttatgatctttccacatttgcctgctgtctctgattcataagataattaagaaggagataaaataaaagtcatgttttctggtgaaactgtaagagaataacactaatatcttcatatattgatacagtgaggaggaataaggtaaaaccagcaggattataacagatagcttggttctgagtgctaggaaccacctaactctgttttattgcaaatggaatgatgcacatcaaattcactccagcagacttaatactaaaagaaggaaatttatgtgacccatcgatggatcctcttacccaccttgctttttttgaagtcaaagctttattttcattcagctttcttccaccactttctgtatcagaataaaagatattttagtgggttatttctatacatttaacatataatattaagaagttcattccttgactttctaccaaaatagtagtctatatctaatttttaaatcctcatttaataggttattaagatactgcttaaaaagaaaatatttattagggaaacagtaaaaatttgtataaaatacaatcattttatttctcagactcaagggagtactttaggaatgggtctatatttactctatatagcataaaatctagaagccactatatcagtgtcatagaccttgaatataatgaaaatgtttatttttctacccattgaaaacatactttactatatgtatttaataataatgaaggtaaatacttcatcataagtaattaatgataatgaaggtaaaatgggttaaagcatttattcaagaatataaaaatcagaagattaaaaaaatttctcctcagaagagtgcagaaattaaatacagactctaaataagctgaatcaaatcaaatactctgataatcaaatactgtgatattgccatcacttgacaatcatttaataattttgctatctcctgatattaggaacccgtacaagtaactgagaactaaatagaagatattaaatcacttgaggacccagtattctttaatgtttaatagataaaatactttgaacacataacatttcattgtacaaataatgtaaaaactaaggtattattcacagtaagtattcggttaaattcctattttctaaaagaagaaatacctgtggtattcctagcaccatctttccatgtatctggagtgataacagtaccaagtttcttttcacctgttagaacaagatagtaaaaggaaaattaaactttattatttaataagtgcattacattgtgcctaaggttcacaatggtatcgactatcaatggtattaccgtaggagcctgttaatgctgggagagcagccaatcaactgagactcatattaactgtggccaatgaatgactgaccctcagtaaaatgcgtaggataataagatgacttataataagctttcactgttggtttatattttaaacaaatctggtaagtctatttgttccataaatatatactaagcatctatcatgtataaactatacaaagtgctgagaaaaatgaagtgatgaatcagacacaattttaaagggattacagtacactaatttctttaacagcaatctgtaacctgggttccacaggtggatcttaagagatatgcgaacaaggtggagttgtacacaaaccttttatatattcatttttttttcctggcaagagtctatagttttcatcagattatcagagggatcagagaccttccccccaaaaagaaccattcaaccaaaatgtaagcttaaaaaataaaaagtataataatcgacagctaaagtactagaagaaattccatgcaggaagaaataaccctagctaaggaaatccaagaaaagaaagtttggggagaaggcaagacagaggatttggatatgtggcaataggactgtgaacaaaaaggagtaaagaggatgaaggcaaactagataaaggacacattctgaggaaaggcatagaaagcttagagtacacatgggcacaaagagtattttgtttggtcaaaatgtgaagaggataagcctcagtgaagatgaagctggaaaaataagttggggccttagtgtggagggtcctgaacgccaggttccaaatatagaatccccaaattattctctgcacactgagaatttattaaaggttttaagttagggaaataataatttgcacttacgttgattttcaattcaagcatcttctgggcttactctaagccatatcctggcataatgactaatgagaatgaataaggcaaagtccttagtctttggttctagtgtctagcatttggcaggagaacaatacttcttacatgaatagaaaggaaagatcaagaattgccaagacagaaaggtgtcgttggggtttaactgcacatttttatatgggaggagagctgatgagatctggggctgggggaaggcaacagaaatagacaaggaggtgcagaactgagaccattctgagtacaaaatatataggactgtatggtcgttgggaggtgcaaaaatggtcaaagggtagggtagaaagacagcggatagaatctgagacctgtgggcgaagaaaaaacaacgagaaagcaaagttcccgggagagctcagttaggttctcccagcctcctcctcccgcagaagcggccccttaactcacatttttcgcacaccatccttccccacgacggttcccctagccgcaacagcagcagcagcagcaggctgaaaacaacaacactacaacttggaagtattccccttccgggctacgtcaacccacttccggcttctaagcccatactcccgcctaccccaaacctggaaagccgctgccccttttgcccgcccctccctttctgcgactggctgttaggccgtgggtctccgccccacagccctgcgcctgcgcgtgggcctgggccgcccgtcgtacctgatggtaggaggcagtagttccccgcttcccttccgcgggagggagagttaggtaagccccgctggacgccctcggcgctctcgcctcacgaggtgcaagctacccccgcgaattgccgaagcagccctgagccttggcgccccgacccgccggcgctcgccgtcagctcagcgccactcttccggcgtgccctgatggacagaccccctttcggatccgagttttcgcctctgtcccccagttttcccttgtcttcaactcccatgctctttgatcctgcctctcagctggttcctcgctgcccacgcttgcgccggcgtaggctcgggcagaatcccgagggacccgggttggggtggggctgccggtgaaggtgcggcgatgcccgcgaaggctcctctgggtgccgctcggaagagccttctctccgctgcggtgcgtagcgaggtgggccgggtcatgcccgtggcacttctgcaggcgtcctgggggcacgccagggcctaaccggtgctggttccctctttgcytactctggttccttcattcattcagcaaacatttgagtttgggtcctgctcactgtattacatccacatctgctgctggcagctgcgattccgagggtggctcagaaaaatcgctgaagggctatctgttgagagaatggattcctgatccccttgccctccctcaatcagcttaagatagaatctatgggaaactttccctttgtcccttcttgccatccgtttgcttttcatgcctagtgtatttccttataccagagagatggctgtagcgcatgggaccttggaccacctcacctgtttgccgtgtttccttatcagtaaaatatctgcctttgaaaagcattgggtgaattaaatgagagctattaggataaggcccaggttcgcctttctgcttttctcactagtgggcgcccctccgcccacgcgcgcgcgcgcgtgtgcgtgtgtgtgtatagtatttttttttctgagatatttctattttctggaatattctccataatgtaacatattgactgttactttaaattaataaagtccttgtttagcagtacaattagtcagctctcaggtaatttaaatacgtgtattttagagacggtaatttttttttcctccttccgttcgtgctctacttttggttggaatttaacacctgtaacagacgttgtcatcttggtatttctgaagcattgggatcccttggtttagtgtggtgctctttgaactcttgattccactggccaccatttgagtattggaatgtgcacttggtgtcatttggcatttgctagaagatgtgaactactgtaatgttagacaagagtaaaaaaaaataccaacaattcagcctaagtatatttgtggagttgttggaattataacctatgcattctagaaaccgcataaataaactttggttataattgcaacaggcagtagataatttaatccacacagttgatttcatctctttgatattggccaaaaaagtttaaatgaattgctttattggtcctaggacatgacccttttgcagaaaccagtcacaatatttaagaaattagtaaatttgttctttttaggctctgagagatgtttgtaccatattaagaaaatcaaaggtagaatagaaagctaagtctgtatgtgcatctacacgtctgcatcttttgtgttttgaaacaaatacattgctcatagaaaattgacttnatgacctatttttaggggtcaaaacatttaagacaatggaaaaagtcgttattgcatatgctcttcttttcttgttttttgttagctagccatccaagaaaacaccatgaaagataacgatatcaagagactactgtatacccatcttttatgcatattttcaattatcctaagtgtcttcattccatcactcttcttggagaacttctcratattggaaacacacttgacatggttgtgcatctgttctggttttgtaactgctgtcaatctagtactatatttagtagtgaaaccaaatacatcctctaaaagaagttcattatcacacaaggtaaggcttatgtctcaataactgatttttggatggagctagtgtttcttttaatggaagaataaagtattcatcaagtctttattagcttatttatagtgagcaaagggaacctgatatttttccccccaaattggtaggctgttacttggtggaaggctgcccacaatgtttgattgatccttgccttgcattaattatggaattatgacttmttcagagcatattataatattgtgagcctatatagtcattgttttatgtcaccattgaaaataaatacgtgtgacagtctatctttaaaccttactcaataagacattgcagtttatttttattatttttgcatttctgaaagccacttagtgggattttcagaaattgcaatataagcctgtggtaatgcttgtttccaacatggccttccttgactaaacaattttcagatattagaatcaattttccagaatattcactgcagtagatattcayttggctattactaataatgtccacacttaacattattttctaccatgtataagctctgttaggtcatttactgcctatgattggaaaagctgaatgtatgtgttatgtttatatattcttaagctccaaatcaagaagatctcatgtttctttgtagatgttcaggtcttttttcatacgggttgtgtaatatgagtgtgatttcaagaattatttagtattttgctttttcagtgcagttttcccaggaattttgttttaaaatgaaaaaaattgttattttctgcagatatttcctctatcatcgcataatactgtattttttgtatcctagctctctgatgtcaatcagtatttgataaatattgattaatgacatagctctatattaccatggaaacagaacctcttttcgactcatgkaggtcggatgggtagaatatgggcggaaggtggtatttgccttttaggcttttttagtctgtatcgaaggctgtgtatgtgacggtacaggacatgtgatctgatttgagtatacccaagaacatttgaactgttttacacattatgggaacaagttgtgtttgtagatgaaatggaagaatttattgtcctttaagcattatcttgaatcttcaggttattcatttctcttttaggtaactggatttttgaaatgctgtatctactttcttatgtcttgtttctcctttcatgtaatttttgttctgtatggagcaccactgatagagtaagtttgaaatttttaccctaaatttatattttaaaacattcatttaccaaactgtgtgctaattcttagcaactagagaaaaaccatgatgtgcntcattartagatcaagtaaggacaccaacatcattagcagtgttattcttttttwaaaaaaacagcagaataacttaatttattaaatactcttgttacctagccttctagtatccaattgcatgttgagagaagggagagtagagaaactatactataccaataagtatttggcccttagaacctctgaaagaacttactatgattatatgtgtaagttataattagcatatcagttcttataaatgtgattctaaagtacttgaatggagtttttcttaacaaaagtcaatagattcctgtattcaaatactgaataagctggtgtttatagtttaaaggtaaaatttaacactttttctgaactgacaaatttcaaattcttagaaacaaaattcatgaatgtttcttacataatgtttatcatagtttgagaagcttcagtttagcagtgattaatgatcatggtgaaatgagtgatgagatacatatacatatacacacacatatatttgtgttgctaagtataccattttatatatatatatatatttatacatagttttacgtacacacactaaactgacaggttattcttttctagatgggagagaacaagacctttgtaatggaaaatggtggttcctgtctaatccattttaaagcagaatgaatgtgtctggcacagtggttctcaaaatgtggttttcaaaccagcagcatcagcattttatcaaaatgcaaatactcaagcttcagtcagaaactctaggggtagagcccccaccaatctttagtttatccagctctccaggtgtttccaatatatgttaaccactagttgtagagaaccactacaactagtattcaatagtggttcaatagtggttcaatagtgtattgaaccactagttgtagagaaagttccagagagactattgagcagaaagctaactatctagaaatggattttgtttgtttgtttgtgtttgcagtgaaagtctcagcatggatcctagggtctttaacacttctgaaatctatcattaaagcraaatacttgctagattgttttttaaagctacatgttggtggtaaaattatttatagtcatcattttggtggcattcatgttacctttcaaagtaaagcataggaagatatttcacattttatttatataataaagattatgtatgtgtatgtttacctttaacacttttttaaaaagtaatctttttttttttctaggttggcrttggaaacatttttatttgcagttattttgtctacttttactactgtgccttgcttatgtttgttaggaccaaacctcaaagcatggctaagagtgttcagtagaaatgggtaagttttaattttatattataatgatattgaaattaaaaaataattaatgaagtatttttctattcatggcagtttgctgattattctgagtgcttctcattgctgatggtgctcagagatgccttaaggggtcactgcaattagggactggggacagggcaggcagaactacaagcccctccctccacgttagcaagatcagctctccttttttctgtatggtagaattccacctagccttttgtttgtttaaaaaaaaaaagaagaagaagaaataaaaaaaaattctactattaaaagaaagccttgaaaaccatggttctgggataatttggcactgtgataagactgctgtaaataaaattgcttacatacattttataaggtagaagtggggtccacaatctaaaaatgtgttgtgtaacaatgataatttcttgtttagccttttttgtgataagataccagagctcaagttttatgagatttcatttccttggtggccgtatatattttcagcatggctaagttaaaattttagcttcttgaaagtcatttaaatgatatgcaccagaaatagtggagatctagctaagaaagccagaaggttatttgattctttcctatttatcacccagcagcaagaacttcttgagcacttagtctgtgctctgtgttattgtgttatgctaagctgtgtgtggtttctgaagtattaggaggaatctttttttttttttttgagatggaacctcgctctgtygccaggctggagtgcagtggcatgatttcggctcactgcaacctccatctcccaggttcaagtgattctcctgcctcagcctcccaagtagctgggactacaggtgcatgccaccatgcccagctaatttttctatttttagtagagacagggtttcaccacactggccaggatggtcttgatctcgacctcatgatccgcccgcctcgcctcccaaagtgctgggattacaggtatgagccaccacacccggccttattaggaggattcttttgctgaggagcttatctgttcaagggacaaaaatgagcaaataacatcagattacaaatgtgtaaatccagcaataagtgstgtaggaactcaaagggacagagcatcagtaaagaatggagggggagatgggaatgatctatgatggacttaagtcaagagtatatgatttggtgagaccaagaaggaagagaaaggcacctcgtgcaaggagaatggataaaagcattgaaactgaaatgaacagggtatttttgtgtgatttgaaaggtaacagcccaatgagagcaaaagatgcatgctgagtagcttggcttcataaattaccgacttattccctttgaaatcagtactgtttgggacgagtgtggtggctcacgcctgtaatctcagcactttgggaggccaaggcgggtggatcacctgaggtcaggagttcaagaccagcctggccaacatggtgaaaccccatctctactaaaaatacaaaaattagctgggtgtggtggcgggtgcctgtagtcccagctacttgggaagctgaggcaggagaattgcttgaacccaggaggcggaggttgcagtgagccgagatcgcaccactggactccagcctgggcaacatagtgagaatctgtctcaaaaaaaaaaaaaaaaaaaaaggaatcagtactgttttcccttggaaccgtcttctaatattcataaagtctctagaaaacagaagtgtaacaactgaaagcattttctacattattaccataatatcccaaatggtattaattgcttttagccttttagtttgaaatttttaaatagtgaaattggattgaaatcttattactttggattagtgatttctccagttttcaagtctatgtctaataatgggtgtatttgggggaaatactgtcatgtgattttacaattagttctgctataatgtggcctgtgtgttcctaaaaatcactacgctgtacaaaatgggcagtaaaaaccacagagcttatgggaaagatggggttaggtcataacactaaaacaattcatcagtgacatgtagagagaagatgggaacttaataaaaatggtagcacagttttacacgtttaaaatggttacaaaatacaggcatacctcattttattgttcctcactttattgtacttctcagatattgctcagatcagatactgttttttataaattgaaggtttgtggcaaccctgcatcaagcaaatgtatcagcgccgtttttccaacagcatgtgttctcttcattggaaactctcacaatatttcaagctttttcattattattatatctattatggtgatctgtggtctttgctgttactttttgtaattgttttggggcaccatggctcatacccatataagatgacgatcttaataaatgtygtacatcttctgactgcttcacctaccaacgtgttctctctgtctctctcccttccccaccctccctctctctcccgtccctgttccctgagatacaaaaatatcaaatttaggccagttaataaccatactatggtctcttaagtgttcaagtgaaaggaaaattttacttgtctctcactttaaatcaaaagctagaagtgattaagcttaatgaaaaagttaagttgtcaagaactgagacagactaaaagtgaagccccttgtgccaaatagccaagttgtgaatgcaaaggaaaagttcttaaaggaaatttagtctactctagtaaacacatgagtgacaagaaagtggaacagcctwactgctgatggggagaaagttttatggtctggatgaaagatcaaaccaggtacaacattctaagccaaatcctaatccagagtaagcctctcactctcttcatttctgtgaaggctgagagaggtgagaaagttacagaagaaaagtttgaaactagcagtggttgattcatgaggcttaaggaaagaggccatcgccatcacataaaagtgcaaggtgaagcaacaagtgctgatgtagaagctggagcaagttatccagaagatctagctaagattgttggtgaaggtggctaaataacagatttttaatgtagacaaaacagccttctattgaaagaagatgccatctaggacttttaaagttagagaggagaagtcagtggccaccttcaatgcttgacaggctgactctcttgttaggggccagtgcagccagagactttagttgaagtcaatgctaatttaccattttgcaaatcctagggcccttaagaattatgctaaatctactttgcctatatactgtcaatggaacaacgaagtctggatgacagcacatctgtttataacatggtttactgaatattttaagctcacttttgagacctactgctcagaaaaaaaaaatcctttcaaaatattgctgctcattgacaatgtgcctagtcacccaagagctctgttggagatgtacaagaatattaatgtttttttcatgcctacaacacaagatccattctgtagcccacggatcaaggagtaattttgattttcaagtcttattacttaagaaacacattttgtaaggctatagctgccatagatagtgattcctctgatggatttggaaaaagtaaattgaaaaccttctggaaaggaccattctagatggatgccattgaggacatttgtgattcaagggaggagataaaaatatcaacattgacgagaagctgattccattcctcatgaatgatgttgagaggttcaggacttcagtggaggaaaccactgcagatgtggtggaaatagccagagaactagaattagaacaggagcctgaagatgtgactgaattgctgcaacattatgataaaactggaacagatgaggaattacttctggatgagaaagaaaatggtctcctgagatggaatctactggtgaagatgccatgaatattgttgaaatgacaacaaaggatttaggatattgcataaacttagttaataaagcaaagcaatggcagggtttgagagggttgactccaattttgaaagaaggtctactctgggtaaaaggctgtcaaacagcatggcacgctacagatcaatcttttctggaaggaagagtcaattgatgcaaccaacttcatggttaaaatttcactttaagaaattgccggctgggcgcagtgggtcgtgcctgtaatcccagcactttgggaggctgagacaggcagatcacttgaggtcaggagtttgagaccagcctggccaacatggtgaaactctgtctctactaaaaatacaagaaaaattagctgggcgtgctggtaggcccctgtaatcccagctacttgggaggctgaggcacaagaatcacttgaacccaggaggcagaggttgcagcgagccgagattgtgccactgcactccagcctgggcgatagagcgagactcagtcttaaaaaaaaaaaagaaaagaaatttccacagcctccccaaccaccaccctgatcagtcagcagccgtcaacatcaaggccacatcttccaccagcaaaaagattacaacttgctgaaggctcagataattattaacatttcttagtaataaagtatttttaaatcatgtgcatttaaaaaactaatgctattgcccacttaatagactatgatacagtagaaatataacttttatatgcactgggaaaccagaaaatacatatgactcactttattgtacaatttgctttattctggtggtctggaaccaaatctgcagtatctaaaaggtatgcctgcacccaaatattacaataaacatagcacttttccttggaaaaggtttccttggtaaaggtttgcttctggaaatagacatgagaagggttgcctattgtgagttattgcgaagtgatgagatggttgttggaaatctgagggaaaattaacaccagatgtgcgtatgtgtggctcatgacacgtagtaaactgaggtagctgggaggtggttattttttaaaacagtattgagatataattcacacaccgtacacatcatctatttaaaatatacaattcaatgactttttgcaaccaccaatctacttactgtctctatagatttgcctatcctggaaatttgttataaattgggtcttatgtgatcttttgtgactgcctttttttacttagcataatgttttcaaggtttatctatgttgtagcatgcttcagtacttcattcctttttgtggctgaataatattccattgtatgsatatatatcaaattttgtttacccatttatcagttgatggacatctaggttctttccacattttgcattttggttgttgtgaataagctgcatcaaacatttgtgtataggtttttttatggacatatgtgtttatttatcttgggtatgccttggagcgggattgctgggtcacatggtagtgttaagggtttgagaagcaagctccagtgttcaaactctgtaaagtgcagtttggtactatctgtaaaaattacaaatatacttcttcgacccagcaattctacttcttggattttaaccagtaggtatacttgcacacttacaaaatgttgaatatataagattactcatttcagcattgaaaattacctaaatatcctttaataagggatagggttaggataaatttaacccacactgtgaagtactatgcatttgtaaaaactaaacacataaaaacagaaaaaaaccccaaaacaaaactctttatttaccgataagttagtggaaaaaagcaaggtgaaaaaatgtgtacaggatgctaccatttatgtcaaaagttgtcagagggcacagatacacgtatatttctggaaggatatgtgagaaactgataaaacctgttgtctcttgcgaggggatctgagaagctagaggacaaagtaaggagactttccactgaatatcctttgctatcttttgaaatttgaaccacattagtgtactacctagtcaaaataaaagttataatgagttagagtttgccagtacttaactttcttcttgcttatggaaagtaggcttatgtcaggaaattgctagatttctctgatgtcacctaaacttcagtagactgcaaaagttgtcctaaaatttccaacatactggagaacagcctagtctccagaggactatggctaaaaattatcaatttataatgtgaaacattttatataatatcacatagcacatgacatgaaatagcaatgcaaaaatattttaataacttttaaagcattttcattatagagtttctcagagcaatctagtgagatactcactttcaccattttctagatgaagaacttagaaagctgacaggttaagtgatttgccccagttctgtagccaggaagtagtagagctgggattggaatcyagatcattagatggtgtagaagttagacgactccagtaattgaggatcagaaaacaggttcttgccctgtttttactacttagcggccaagtgatcttagacaagctacttaacttcacatatgtaatatgattagaataaaactaatatgtactttgcagggctgtgtcagaactgagtgaaatgaatgaaatcaaataataggttcttaagaaatgtttgttgaatggattaaaaaatgtcagggagcattttatatatcatactttcartccttactgcaatttgtctcagtatttcttcctagtttaggtgacagaccaaggagcacagtgcatagataactatggaggagggctggttttttcatttaatttaatgtgaagttaatttgaactttgacgtaagagaagaatctaagtctttatgtttccaccatacactagagttagttcacttcttcttagtacttttattatacttccaaattttactatagaaagcatgtcaaattttgaataagctaggaaataattagattaactcgttgaacattagagtttgccttcttaaatgttcacttttaagcaaaaatatttaaaaactcaaagatctatggttttgcagtgataatataaatattcacaaagaattactagttatattgaaattgctccaatatgtagttagcattattcatattgaatcacaactttattttttaatttttatttttttgtgtctacatagtagatatatacatttctggagtacatgagatattttgatacagacacacaatgcataataatcacatcagggtattcacatcaagcatttatcttttgtatgtatggttgtacaagcaatccaattatactcttagttatttttaaatgtacagttaaattattattgactatagtcaccctgttttgctatcaaatactagatcttactcattctatctttttcatgcccattaatcacattctctgcaccccccacccccactactacccttcccagcctgtggtaaccatccttctactctctatctccatgagttcaattgtttttttaactaccacaaataagtgagaacatgcgaagtttgcctttctgttcctggcttatttcatttaacataatgacctccagttctgtccacattgttgcaaatggcaggaactcattctttttttaatggccaagtggtactccactgcatgtatgtatcactttttttttttaatccattagtctgttgatagacacttaggttgcttccaaatcttggctattgtgattagtgatgcartaaacatgggagtccagctatctcttcaatatactgatttcctttcttttgggtatatacctagcaaygtgattgctggatcatatggtagatctgtttttgtttttttgagaactgatctccataatggttgtactgatttacattcccaccaacagtatgtgagagttccctttctccacatcctcgccagcatttgttattgcctgccttttggataaaagccattttaactggggtgagatgataatctcattgtagtattgatttgcatttctctgacgaccagtgatattgagcaccttttcatatacctgtttaccacttgtatgtctttttttgagaaatgtctattcagatcttttgcccatttgtaaattggattattagggkttttttttccctgtagagttgtttgagctctctatatagtctggttattaaccctttgttagatagatagattggaaatattttcttccattctgtgkgttgtctcttcactttcttgattgtttcttttgctgtacagaagctttttaacttgatgtgattccatttgtccatttatgctttggttgcctgtgcttgtggggtattattcaagaaatcttagcccaatccagtgtcctggaaagtttccccaatgtttccttttagtagtttcatagtttgtggtcttaaatttaagtctttaatccatcttggtttgatttttgtatatggcgagagttaggggtctagtttcattcttctgcgtatggatatccagttttcctgccaccacttatggaagagactgctctttccccggtgtatgttcttggcatctttgatgaaatgagctcactgtagatgtatggatttacttctgggttctctatttgttctattggtctatgtgcctgtttttatgccagtaccttgctgttttggttacagtagctctgtagtataatttgagtcaagtaatgtgattcttccagttctgttctttttgctcaggatagctttggctattctgggtctttgtggttccatataaattttaggattgtttcttctatttatgtgaagaatagtgttggtattttgatagggattgcattgaatctgtggattgctttgggtagtatggacattttaacaatattgattcttccagttcacaaacatgaaatatctttccattttttgtgtcctcttcaatttctttcatcagtgttttatagttttcattgtagatatatttcacttctttggtgaagttaattcatagatatttaattttatttgtagctgttataaatgggattacttttttatttctttttcagattatttgctgttggcatatagaaatgctactgatttttgtatgttgattttgtatcctgcaactttattcaatttgtttatcagttctaatagtttttggtagtctttaggtttttccaaatacacgattatatcatctgcaaacaaggataatttgacttctttctttccaatttggatgccctttatttttttctctcatctgattgctctagctaggacttcctgagtcacaactttaatttcaaagaattctattattattcaaggagattgtacaaaatacatgaatagtacatgctttttcctactcaataataatttagaacagaaattaaaatttcaatttgaagttcttatgctgtagttctaattaataaaaagtatttaaaataccttgaagtgtcaactgaagattttagagctttaaatatttttatcattcatcctgtattttaatatgtaaaacacagtagagttttgtgtgtattttttttaacttaaagacagcccttttagtattattaaaatgtgaataattcagatgttcagtgtgaacaggctaattttgaattggcatgatatctcaattagtgttgaatcaatataaatgttgtataatatttttaagtgaaataagtttatatactagtttttaatgtatttatttgcatgtttgtagaaaacttatgttgaacacatgatagtcatgtgacgacagagaacamcaaagctttgagcttgtgaactgtataggaactacatcctacaagttaaggatcaattctgatactattgggattttatacataactaaaagacactattttaacaggatttctccttacagtaaatgttaagttactccaggaaaacaaaacaaaagaatactattataaagaaacttggaagtagacaaggtcatttggtttcttaaaatattctgccagcttcttattggtatacttattaaataatatactcagtttgtactaatttaattcagttattgcattggcattaaaattattttttttttcatttgcagactttcttataaaggaaagtaataatctgactactatacacccatatagttcattgaaacttgttttttgacatatcagttcttttatgctgttatttgaatgtttaagttagaagttgatcacttttggtgaactaaatagattcctgaatagtactaaacaaaaatcttgccaagagtagtgatctagccgaggtgaaaacattcaataagacctatttgtgtagacaaagataataggcctctttttgtcatctttgtattgaaatagattttatattgaagcaaccactgtggacactaagagtgaaaatatagtgagtgaccaaagatttactcatataaaaagtagataatttagtataaatgtgggcaaaaaatttagtggcaaagaggcatttgttttaatattcagtggggaaggaaaacatttatattagaattttgtaaaatacctttagccactaggaggagttgtacagtgtctcttttttagatgaagagactagcagttcaaaaaattaaatctatttaaacaaacactattttgatgacagtgtatttaaaccatgagtgtttactatgaactaccctcaggtgtctgatacagtgtctggcacgtagtaggcactcaaaatggcctgtttacttcaattaatatttgatgtaatgaattccagtggagtcaaataatttggacaaatagttggagcacagtgtcatgaaggctggcctgtaacattgctgtagtcactttttaagtttgttcacaggggagccatttatttattctgagccctattgactgtgcatatattccttaactttgaaaaaattagccaataaccgtagaattcaaatagctttattatggaaacttacaaaatgagagtacatcaatgtcagtgatgctagaaattagttaatagaaaggaatttacctattttattctttttatcttatttattacaaaataatgtatataaatgtttgtagtaaaaattcaaacagaaaaatatagaaagttaaagatcctagtaatgctatcatggaagcaatgaacaactagcagattttatatgttcttcgaattttgtattaattatatatatataattttaaaacaaaatagttaaactagtcatggctttataacttttttcccactaatgtgttatgaacatcgttatctgtgtgtgtgtataatctacctcttcttacatagtattcttagctactgtatctctataagtaacataaaacttcagcttatattggtttgaataataaggaaactgattatgtcacataacggaaattggatggttctagacacagatagtcatggtatggttgtgcttcttactgattctccttgttattatcctcaggctggtagtgggatggcagcagtttctcttccttgagttttcctaatcattgagaaacagaatgggatcatcaatagttaattaattagtctcatcatcagggttgagatgaatgttgagcaattaatcatcattacaagtattccatgtaccatgatttatttaactaatttcctattaaggtttaatatcaaattttcatgataataaataatgttgttaggtatatctttgttccatataattttgtatacttgtgcaaaggtttttgtagactagatyacttgagtaacattcctagatcaaaggaagttaacagacactgtcaaactaaagttataatttgaagaatatgtatatacccccatacatattcctaccaatagagtgtaggtttccctgactccccatcaggcctctttacctcttatcaatctaccagggctgctacctacagggatctgctaagggggcakactgtgcactatagtagcttcatctgatttctaagaggaggcgtaagccttggccatgaatttttaagtctcaattatagaaccaccatttattaaatttcagtggaatattactaactgaatcacagagatagcatttatcttacccagcctccctacctccattctctttcctgcctcatgttacagaaaacttattagaaaataacatccagtcctcaaaaggcagcttcaagacagggaaaattggggctagttaagataggatgtgtgcccatgtgaagtgtgagcaagagaaaagaaacggcatgacaaccctaaaaatgcactatagaagaaggaaaaggggtgtgcagaagatgaagaatctggcctgaaagaaagtgctaccctagaagcaaaaataaacaaaaaaacctccacacagtttaccatgaaaaatagtactaaggatatgaattgaataaattaagagcaaagatgagatcatgaaacaaaatgacgtggagaagaagattgcagaattagtgaaataaattgagaatgcaaaggtcactattacaggacataaattaaaaatatcaagaaacagacaaattagaaagtcaggttttagcatggaagaaaggtttgagctaatcaaaatgaatgcggggtagggagggggttgggaagaataaagcatttagagaagatgtgataaatatagaggagaaatgaaagggatgcaaacaagactagttagtgcctctaaaatacccaacaaaaaatgattcaaagatgtgatagaagacagttttcacaaatgaagggattctccagtttgtacatcaaagggactcactatatcaagaaaataattgaatgaattggagttgtagaacaatgtaaataaaaactaatacaagcaatggaagttgaacagtgcagggaggagaagtgaagaaaatataattgtacccttcatatcccagctattctagctgtccccagatactgagcctgttgggtacaatctctttggggaataagttttaaacgaaatcctacatctcaaaccatgagttcccaccttacacctagcccctttcccctggttggcccaaagtactgggagccaggcttataccatctaggcagaatattgaaatatttctttcgagggaaaatggtactgacattttgggattctctaaaggaaagtcaggttcctaccccgtccctagttctgtgcatccccgtgcttgaattataagcatccagtcagctgttttaatgtttcattttgttgttgctgttgtttaaaaatagtgttattgagatataacygtataccatagaattcactcaaagtgtataattcagtggtttttagtataggcacagttgtacagccattgccacaatctaattttgggacatttcaccacatcaaaaagaagctataactattagcagtcataccctattcccactsttctctccatggcccaggcaaccactacaggagtgtccaatctttgggcttctctgggccgcattggaaggaaagaattgtcttgagccacacatgcaatacattaacactcacgatagctgatgagctaaaaaaaaaaaaaaaaaaaaaaaatctcataatgttttaagaaagtttatgaatttgtgttgggccacattcaaagccatcctgggccacatgtggcctatgggccgtgggttagagaagcttacactaatatattttctatctctgtagatttgcctagtctggacattacatacatggtgttttaagtagaatgagaagtaaagaatcaccagatatttgaggaatacgtcaaataaaatccagaaatgaaaacaacaaaaaagaaactcaggggaaatagaggcagtatataaagacagaagataacttaaaaacttactttttttttttaaagtttaccataaaaggtgaacaggaggcagtcaaaatgcatattcagagaacaagaaaacttttggggaataaaaatactcaacggaagtagagacaaaacttgaaaagattccctagtcaaacaaaaaggtaaagattgcaaaatgaattaaaagataaaagcagaaattagttcaaaataatagtatacctagcaagagtaagggaaaaattcttaagtgatctgatcaaacaaggtctttaagtagaagacaattttaagaaccagaatacctgagattttagattaagaaggcccatatattttcagcatagtggatgaaaaaacactttaaaaaacatttttgtgaaatttttgataaccagcaataaagagatcattctaaaagtttttagagaatgagagaaacatgatacctacagaggacgggaaaccagaatggcactgaacttctcaagtgggaatcagaaaacaytggagcagtgccttccaaattctgaggcagggccaggcgctgtggctcacgcctataatcccagcactttgggaggccgaggtgggcagatcatttgaggtcaggagttcgagaccagcctggccaacaaggtgaaaccccatctctactaaaaatacaaaaatagctgggcatggtggcaggcgcctgtaatcccagctactcggcaggctgaggcaggagaatcgcttgagcccaggaggcagacgttgcagtaagccaagatcgtgccactgcactccagcctggatgacaaagtgagacttcacctcaaaaaaaaaaacaacaaaaaaccccccacaaattctgaggcagaatgattcccaaaaattacagtaaaatcattttcagacttaaaacatctctaagcatctattttccatgtaccctttctcaggaatctatggaaggaggtgctgaaaaagaaaattcctttctcaggaatctattgaaagaggtgcttaaaaagaaaagaaaaaggaagatagatggaggaagtcttggaatttaggaaagagcagatccaaaagaactgagagaggcaaagggaattcacaagatgctcgtgaagggaccccacagcacagcagttttgcagcagtcctaggtggctccaaaaagatggaaggagcggggagaagaaatcaagcatttagaggtactacttagcttctttggaatatgtgaaaattacttaatgacaggtacgtaagcaaacagagcagggaaaaagaggcagttcttaacatccatggacaattaaagattatatttactatgagaaaagaaatgtataattgtggtttactgtgtggttcactgtgattagcagttttataatcatcataacgtagacattactattgattcggttgaaaggaggagatgttaccattgtagaaggggcgtgagtcagggagaaatgtgtatgtggaggtaggcagcttgtagataaaaggtgctaaatcttctcccttagaagaaggcagaaagtaagttaatcttgaaaaatctatacttaatttatgtttttttttttaatttgaggtaaatagaagaagcagcaaaaagagttgaaaatatctgtcttggagcagacatcaggagtggggagggatggaagaggagactactatttttattattagtttaattgtactcctttactttaaagatgtcacatatattattttgataaatatgaaatttttactttaaaaacaagctacagagtttttctatttttaaaaataggtctcagttccattttttctacatttattatatgtaggatcataaacacttggctaccacaaaatagagggcaacctcttggatgatcatattttttattttaataaacataagatggccacaagtgtgctggaaccgtgaaaaatgtgaaggcatggattttgcctcttagcccaaggaacttagaacttagaggttagaaagatacatacatcaatctttttttttttttttttgagatggggtctcgctctgtcgccaggctggagtataatggcatcgtctcggctcacgacaacctccgcctcccgggttcaagcgattctccgttctcagcctcccgagtagctgggattacaggtgcctgacgctgcgcccagctaattttttgtatttttagtagagatggggtttcatcatgttggccaggctggtctcgaactcctgaccttgtgatccgcccgcctctgcgtcctgaagtgttgggatttcaggcgagagccaccgcacccagccacataaatcttattgaaacatctctgatcgtaaagttgcgttgattgaaaaccttcatggttccttagtttgatatttaagaattttctaaaatcctaaccctaaatctatcaccatgataccatttcacaccaattacgatgactgtaataaaaaaaagataatgacaagtgtcaggagggtgtggaaaaattggaatcctcatacactgctggtgggaatataaaatggttcagccattttggaagagtctggtagttagttcctcaagtgattaaatataagagtttccataggacctaacaattccactcctaggtgtaatcccaagagagatgaaaacatatgctcacacagaaacttgtgcataaatgttcatagcaacattattcataataaccaaaaagtagaagcaacccaaatatccatcagctgttgaatagataaaatgtggaatatcccttgaagggaatatgattgagccataaaaaggaatgaaatattgatacatgctgcaacatggatgaaccttgaaaacattatgctaggaaaaagaagccagtcatacatgctttatgattccatttatatgaaatgtccagaataggcaaatccagagagacagaaagtagcttagtggttgcctagggctgggaggaaggagaaatggagagtgattggtaatggttaaagagtctggggatgatgaaaatgttctaaaacttacagtggtgatggctgcacgactctgtgaatatactaaaaaccattgatttgtatacttgaaattagtgaattgtatggctagaaaggattttctaggataatttttgactctactcaataaagctatttttaaaaatcctaactgtggagaccagcctgaccaaaatggtgaaaccccatctctactaaaaaaaaatacaaaaaattagccacctataatcccagctattcgggaggctgaggcaggagaatcccttgaatccgggaggcggacgttgcagtgagcccaggttgcgccattgcattccagcctaggcaacaagagcgaaactccatctcaaaaacaaaaacaaacaaaaaaaaaaacggtgagggccgggcgcagtggctcacacctgtaatcccagcactttgggaggctgaggccggcggatcacaaggtcaggagttcgagaccagcctggccaacatggtgaaaccccatctctactaaaaatacaaaaattagcctggtgtgatggcacacacctgtaatcccagctactcaggagtctgagacagaagaatggcttgaacccgggaggtggaggttgcagtgatccgagatcactctattacactccagcctgggcaacaacagcgaaactccgtctcaaaaaaaaaaaaaaatcctaactctgccctacttttccagccttatttctygttcttccacgtggcctctagcaatctgacttgtgttctcttgtctgcagtgcagctcttttctccagtcctccagtttaagacctgatgctacctattctttccaatccagctgaacttcctcctgttccataaaatagaaaaagtgaattcttcccaacagaaagtaatctctgctctcaacctctaccacaccttatgtttccaggcacatcactttatgtattacagtatagaggaggtgtgtgttaagttgaagcttagtcatcattgtcagccacatgtagtcaaaaattggcctaggaaatcctttaaattgctaaaatagtacaattccctttacattgaacttggccagtttttccttccaacattggaacacatctctgttctattgaatgctagttgaaaaagctgacttatatttataggtgttacatgaaataaaaaagaataataaagccctacaaatagtacaaatttggatatatgtgattggctccagcccgttcttagccctgcttctcaatggaaacaagctaaggctcttatcttgtgtagttggggagtawgagatggaggatgatagagggattggtttgtgaactgacttgtcatcatttgggacttttaaaattcagtgtacattttgcgtgtaataattggcctgtttctagttaaataaatcatctaacaaaacaaatgttttcccccatactatctagaagaggctacttttcaataacttcaccttgcaatttaaacaattgaatatttggaccccacttagtgcattgcagtgggcttttacctgactgtaaccagactcctgttctrsatgatgaagtgttcaccctatgagggccaggctgaaactaacacctactaagagaatggcagaattaagtctttccacctttacactctcagatgtgcacttagtaaataggaacggtaggcagaatcaccagatcttttgaaatactttgttcttgttctctgcctgtttcttgccaagtaaattgaattggtttatataaatgaagtgtgctgtaagaaagactagttgaggccgggtgcagtggctcatgcctataatcccaacactttgggaggccaaggtgggtggatcacaaggttaggagttcgagaccagcctggccaacacagtgaaaccccatctctactaaaagtacaaaaattagctgggcatggtggcacacacctgtaatcccagctactcaggagtctgaggcaggagaatcgcttgaacccgggaggctgaggttgcagtgagccgagatcgctccattgcactccagcctggacacagagtgagactccgtctgaaaaaaaaaaaaaaaaagaaagactggttgaataaatgatgcaccatccatacaatggaatactgtyacagctgttaacaaggaaaaacaagcaaaacttggtttataacatgatgcatctgagttttgttttgaagaaatatacatatgtacatgtgtatttatgcaaatgtacatatatccttcaaaacaaaattatgtgtgtatttgtgcctgtataaaatatttctggaagaatatgtaataatttagcataatagcagttgcctgtggggaaaggaaccaggagttgatgataggggtggaagacttagctgtttctacaaatgctctttaacatggtttgactcctagtgcgtctgtatattacctttccaatggaaaacatttacatcttcttaccaattaactattaatagttcatggtaaatatgtatatgtcattttgagattttcattttaaattagcaggaaayatatgtatactgataatgtgtgctagtgcttgttggattctccagcagctcatgtatataccaccaacgatgtaccaatttgtgtttcacagagttacatccatatgggagaatagtctccagatcactacaatttctagctttgtaggagcatggcttggagcacttcctattccactggattgggaaagaccatggcaggttggtttcagttacttaaagcaacaaaataaatgtttgtacaatgatagtaaaacagatgaagcaaactagtgtgtatatgtaaattgttttgttgttcaattaagtagggataccacttctatcagtcactgtaatctgggcagcttcttaatggggactgtccagtgccacaggtgtctaggtagccctggttttatcttctagcactattttttgcacatgtgtagatgaataaacaagcttattttgtgattgtatataggcggtttgtttattgtttttaaaaaagacaggttctcactctcttgcccaggctgtcctctaatgcttgggcctaaacgatcttcctgcttcagcctcccaagtggctgggactacaggtgtgtgccaccgagcccagccagtataggaatttttaaaaactaggttaatagctgcagaaatttcctattttcaactttgatatttattgcccttgtggtcttatattcatattttctgaacttgattgatggccaaattgaatgttcctcttgaaatttttagaagcagatagcaaggtaatttttgcagcagcggcctgtgttatcaagaaagctcacaaacatcagatttttcrtcttgtatcacaataagataaagctgatatgctaggtaaagcactgtgaggtaagtgctctttttatacccattttacagatgaggaaactgacacctagagggtatgtaacattcccaaggtcactgaacttacagtgatgactgtatctttatcttaatattaatgactttgtagtatgccattatatactttataacttatttaacaaattcactattgatcatttagattattgccagtattttgtgataataaacactgctgtgataaaatctttgaatctatagcttcttgaatttttctaattaggttcacagagtaattactsccaaaaagaattatggtattaaaaaataaatgtgctttctttttccaacatgaagataatttttttctgatcacraagataatgtatatttatttagaaaattaaagcaatattagtaattctaaggaagaaagtaaaaattactttcctccccaaccacccagaggaaacctccatttgcttttggtgataatttttgcagctgtctctctccatgcctgtaactataatattcatgttgtttttaatctgctttttcccctcagcagtatattatggagctcattctatgtcaatgaaaacttacatatatgtaatattcgattatttgtgtaaaatattgtaccagttttttattaaagaacatttaggtcatttcctattttactattattattttattatcaaatatggtcattatcatacttatacatctttgcatatttgtccaattttctctgtagggtagagtcctacctaatgaattgatgaattaaatctttgatacatacctcatttgccaaatgtgggatccagattgtgtgccttgcacataactgcctacatttagctctattctttgtgctttcagttagatgtcgtgtctccccgaaagtcaaattgttgtttcatgtttaataggtctgataggtttgcccttccctgttttaactcttcatcactatattagagaaatccttggaggtttggtgtgtgtatcgtcacagattcccatctcaagtttttggtgctagtaaaggtttcttaagttgacatcttatagaagtcatccatacttgatgtcattcaacagagtgtcagtgatttctaaattggaggacaatcaaaatcattgaaaagtatacacagaaaattgaaactgtgtagattcattgctatcaagtaatgcaattaaatctaaatagaaagtattgataaataaagtactatgggacattagctttaatgagttggtaagatataataaacatatcattttgtatatgatgcaatacattagrgtgtaaaggtttgatatattacacataatttaagtcttttctgtttacaagacagtgcagtagtagaaactgaactaagaggaatgaatatatgtgctttataaaatatgtgtttaggtttgcttagaaaatatatatcttaattatttacagttcagtcacccattttgggattgttcaggcttttagctgatgacccatttttctccctcagtgcttgttaacaataaggatgaactagatccaaattgatggtattactttttaaattaatgtaaagtttccatttgaattactgactttttaaaaagattttctaggtagctggaaattaatttaattttaaatctaatttaaatacataacaagtgttggtttccattaagagtgtttcattcagctggaatattactggccatgtaattatctttactattgggttgtttttagaatattccaagttaatgacccacgtattcactgtaaaccttttaaattatgaaatgtattgttgagggaatgatagaattgatgtataattaaaaatcttttattcatatagcactcatctgctccttgcccttttagcagttatttactaataaactaaagaaatgaggtttttttttcactttttatttccagcaaacaaggttgtttgtttttttgttattgttattttttaataattctaactccacagaacagcatctcccagagaagcaataaatcagataagggaatatggcattttctaaaagtggagatgttgttagagcaaaatttcatgagaagacaatacagtatacactttattatctaaaatagaacatgtattaagagattcttgttctgtgttccttgtagcccaataccgatttgatctgcttgtggtaaagcaagcttttctggattgtgttctggttttatttatattccagtcagagaaacaggaatatctggttaagcaattgtacctttaaaaacacacacatgcacacacacacacaaaaccccacaaaatctactacatgttttaattcagttttctttactttgaactcaaaccattgtataacattcctgaggccaagcataagattatagtgatgtggattctgtaatgagctgtttcaagcatatttttatgtttaaaataatttcttcattaaatgactggaaaggcccactgaaaatatgtgatctcaatgtaaaagttttttaacttaatataaatcttaagtgattttaaataatggcaagtgatgaaagattaggcatctttatagttggaggaagcctttcttttgtagaaggcagcaaggggatatggttaaagagaatatggtagggtagctacccattatactgttggtcatctttgttgttgttttaatacttkaaagtcatcttcttgcctctaccttatttgccttaaaatctcagcaagaaaacaaatatttgaatttcccataatccagataggctttttcaacttctagagaaagcttatagttgctgacaaaataaatatttggactacagaaaacctttgtattttataatttgattctttatctgctgtaactaaatagctaatcaataagtatttgttgttattactgtatgcatagcatatgttctgtgtaagtaagtacaacagatacttaaatacacccaggactggaatttaattatttaataatttagatttgaactgtgatttagatttaatatgctgtaactatttcatagaatatgtagctatgaggtttttcatctggaaaatgtcttgtcaaaacatggctagtatttcatgttataaaaaattagtggaaggttaagaaatattgttggttattctgagcacaggaaattgaccatgaggtttttaaactcacgttttattaatgggtaggcaggtaacatgatgattaggagttctggcatcagattactgggttgaaatcctggctttgtcacttgctagtgaggatgaaataataaaatccctctaaaatacctagctcagcacctgacacatggttattacttaattaatgttacaggcatttgtgacctagaaaagacatagtttaatgactatatttttagccttcaaaaaatgcaaattccatgatttatttgagttctcatatattagagaatatgttaattgtctcagtttgttgttttattttttctgcccagcagtctttcagttggtagagtggactgttaatttatctatttctctggtatttagttatgccaatttagggtatttggatttcacataattttcaatcctgtctgacatttcagatgacagtagaaagaaaacgtagcacttatagatctctccatgtaccctgcagggggcttggtactgtgaaatgagtaacttaatcctgacaaccgtagtgcaaggtaggttttactcccattttatacactagaaagtccaagtgtgagaggggaggagtacacatcttgcttagcattactcaggtgggaagagggagacttaagattcacatgagagccccactacaccatgattcttttcattgctggaaactaaaacatagcttttctttttaaaaaatggtcatagcttaggtctctttggaatagctaaattacttattatatttcatttctttccccacattgttttcattacatgccttgaccgttgtggtggtgtctgtattttaggccgtaatttatttgtaggagaatatttaaagctaatatgcaatgattttgtccctaacaaatccacacatgcctttaaactatggacttcagtgctacaatctttaaaaatatttgaaccaaataatcaagtctcggctaggatgcttatttcttacgaaggtaaaaaggaaaattgatataaagtattttaaataactgaatttggagattttgaattttagacacctgagatcgtctttgaaacaatttaaagttgttttaaaatatttgtacttattctcaacagacaccagataaatgaggcattgttgtatttaaaaattttttgggtttttttttttcagttttaccacgttagaaatctagtatttgtgaaatatgtatattcatttcctaaagtcacagatgccacagataattctttcataagttgaaactaggaatcataggattataactacatgaattactgcaaaatgctggagggagattaaaactaagattatggatttgattgattgaagagctgcaggtttttacgttaattggtatttccattaccaaagggatgatactgtgttttagaccaaaataaaatactcatttatatgaatatggtttgtatgtttcaagcatgagaaaaatgtgttaacattgaactggcatgaaatggttttggattgaaaaggcgtgttcatcgtagggtaatcatgttgataatgctctgctaacaggactttcatgttagagagaataatgctggccaagttaactcgtttgcacgagttgtgaccagaaccttttagtgtcattttgacaagaattccagaccaggaactacacaccccttcgcaaataactcttcctaaagtagtattcttagtcacaggagagtgtatacatggatgagtgtagatttttaactagagaaatgtatcccaatgagtagattcatttgtgcatgtattcctgtatcagacaataacatttactttaggaatatctggaaaaacatactgttcaagaccaattttggaggagaatataaatgattatttataaccagtaggtcagcaggctttgaaagatgaactctctcagtcatgcaaatgcaaatttgtgataagcacaattaacaaaacaaacatattgaaaagtagctcatgagagattgagaactggattttatcttcctttttatctcgagagagacagtaatcctaatggttgtgagttgttctaaatgtctgtaggtgttctgatttgcagataggtcagtttctccatgttatctgtgacagtgtaaatctcccccaaaattataagtaatatttattatattggaacacatttttaagaatttatactaaaatgtatccaaaattaaataatttaatcttagtttacacctttaactgctgggttaaggtaggggctccacaaatagtttcgaatgaatggagtcattcatatgagcctttaaaaattaacacaaatgcctaccaatgattagtttaaaaccactatctgtacttaaaattttgtttcttcgaatttatgaaaaatgacagctagcagcagggtaaccttctgaggtaaggatacagatggttaacgtaatgccagtatgttgtacagctcctgaatttgctcttgtaacagacatttcacatgaagaacagcatgtattaaagatgattgctttatggctgggcgcggtggctcacgcctgtaatcccagcactttgggaggctgaggcagacggatcacgaggtcaggagatcgagaccatcctggctaacacattgaaaccctgtctctactaaaaatacaaaaaaattagctggacgtggtggcaggcacctgtagtcccagctactcgggaggctgaggcaggagaatagcgtgaacctgggaggcggagcttgcagtgagccgagattgtgccactgcactccagcctgggcgacagagcgagagtccgtctcaaaaaaaaaaaagatgattgctttgcaagggtaaagaatagttcctaccacttcctaccacacagtatattactcatgaactattcgttctaaactgccggttctacttattacatagtagtgtcagtgaccaaagaaatactgtttgtgtaagtttaattttttcaagttaaaacatgtaatatacagaatactggtacgtggtactttatagctttcatgacaaattttaagagattacttcagccctgcattttaagtatagtaggtacttctgtccctgttctgtaggggaaactgaggctcagatgttaaaatgagctggctaaggtcacttaacatctgatgtaccacttattttttaattagatttttcttcttcctggtaattttaataattttacccacttgagttgtaatatatttgattatacaccataggttgtttcttctatttactggctaaaaaaatgtaaatttataaaaaactctcactatcttgcccaggctggcctccagtgcttgggcccttgtcattttggtggcaaacacttgtgaatgacttcctttacatgaatgtctttgttctaagyttcctattttctttaaacaaaataattatataaagccatctcagattaccataatttggagaaatctttatagcagtgcagctgaattatgtatttaatagatatcacttttttaaaaaatcctatttgtggcatgaagaacgttgaatagaaacatgtctgtatgtgagataaggaaatagttttaaaggaaaaccttaggatctaattatgaaaatacctgattaagctaggatttacaaatgaattctgttgccatagtgtagtttaaaaatttttagaataattataagaaaatcagtaggaaacttgcttgaggaatagttcttagtgggcagcctccctccttttgctgttccctattttgataatctattttgatcttcaaaaatcatgaaaacggcccttaaagaaattctcttttaaaaaaatgacagggttacgattaagaaatgcttatttcaggaaagccaaggaggtactcttgtaagtacaaagcctgacccatcattaacagtcttcaaagccagtccacattttaatttgctgatggcatgcacttcttgatttacataacatgaataaccaagtgttccaagccgtaacccttcattagacaaaattttttaacatttcatttttggcattctgttggaggtgaggtgtggcagctgtttaaaagaatgtgcgtggtggtatgtatgtgtttgagaacaaagagccatactgaaattacaaaatgattaaaatacaatttagtaacccaaattggaatctagctgggattcatgagggattactattctccctatactttaacagtgagctttttttaacagagtatagggactcatactttgccaatgattagtagactctcagcataaatagaggaaagagtattatcctaaatgtttacatagggtaataaataaaaactactaaggtaaaaagttcagtgctttacgtagatagtaaactatgcatagtattttatttgtaaccccatgtgttaagaagggacactgttaaagtaacaatcatttaaaagtaacaaccaacaaactggtatttaatttggtattttaaatagttaaaaatcaaatggaaacagtgtctaaagtcactaagataattcataacaaaacccattaatccaagctccacttattgtaaatagaattcaccatgagctaacctaaaatgtacctgtggagataaaacaagagtgtaagttagcaaagtattaaataaaatttcagggagcccctaaatttatttttaagaactttagaactaattctctatatgcaaacactgattaactcaaatatcttgtaagttcattcatacatggccttatttgaggcagtgtatttgtattcactagcaaaattcatgtcagtaaaatatttttgaagcagtttatttcccagatatttcactagtttgaaatagtcatttcagtgattagtctgaatttctattgaagcctaagctttgaatgaagacatgcttctgaaaataaggcagtttttctctagtctgcttatcaatagaaaacaaatctttggtttttagttaaagtgacaggaaggatttttgcaaaaagaaaaactaaagaaccaaagcaattaaaaagctcttgataagcaatggggaactccaaacccatcaaggtcagtagagtacctaaggcacctcagcttcagatgtgacagtcatctttgcttagagttctgataatctatatacatgatttttaccatcttgagaatgtgaagctgaaaaggtaacatccaacaatgattactgtgaataagaaaattactgtgataaatgggagagacgttggagatctctgttctacctcccatatttataatgaggaaaccaaatcccagtcaagaaacaggtgacaccagtttgtgtagacaaattcctaatctgtttctgttagggcagggcaaattctagacttctaamtttgaattagtaaaccaagtgtgaagggtttcagagatatgaattggagccccctccccccaccaaaaaaaatcctcataaatccccaaaggcaagttggaaatgtgtaatagtttactgttgtaattcgtttataccatgtgttggacaactcagctaatatgttaattgatttatacaattcctttcaattttatctaaaaataagcagaccaaaattaaataagaaagttacataagattccatttgagcatacataaggccatgatactttaatgtgaaccaccatttcttggaagaaagaagacatccaaatgtccrattcagagagaaagttcctggccagtcatccagtagactctctccactcttcaatgggaaggtgatgcttatatttttaaaaatctctacaaagctcacatacaacaagacagtacatcctagatttgtgactgatatgagcatttaaggctgtcattttcaagtataaaagtttagtgttccattacccaatctgtgcagtagacatagctataagctcaagtcatgtgaattaacagaagcccaccaaagacatttaaaaaattataatttgggcaacagcaagtttaaatgtaggaaaggctagaaaaaatgtgatgagattgtttctctaaaatgcattaggttgttcacaatgaagctttgtctaacaccattatctgatgcatccattatctgatgcatggcrtatgcaataaggcagatccacagcagaccaaacaaggaagctgaattaggtaatagaactagtaattaagatggttcacctctaacacagttctgtggcctgttccccccagagaaagattagaaatggctccagtgtaccaaataagcttcacagaagaacatgaaaattttcctccaacttttttttyttttttttttcaagcagagcctttcacttagggaccaactgcttgtagatgaaataaatcaacattaattacttctagcctgatgtaatatggctggagaaaaggggtctctsgaagccggtattttgtttaacttacattctaggtgtgtatrtaagttstcgctctataacttctgctgtggtyccarcatcyatatctgaaaggtggaagcagctgctctgttacaattttcatgtaacacgcttggattctaggtctttcctctttaacacaacttaaagaaagtttcttgtggtttggtcagcatacacacttctcatttcatttgatgtacacagccaaagtgggaattaaaaaaaaaaaattaccaactagttcagagagctaaattgagtctatcattatggcaaagtctgacccaaaattttaatttgtaattttagcatgtgtctcatgcactttggggagcgtcaaactaaatctacaattgccagaagccttgttacagtttaatrcacaytaactaaaatgtgtacatttttagtgttcatgataaatgcagttatgaccttattacacttttggcattctttaagaaagcacattaagctttaatatagaaatatttaggttacacttgtgctcaagtaataataaaacatttgttcttttttgatctcatacattctctcctcaggtatggcccatctcctgtacgcttggagcgacctttggctacgtggctggccttgttatttcaccactctggatatactggaatagaaagcaacttacatacmagaacaattaacyggagcaaagggagatatttctttgtgcagattctgtaagggctgggcagaaatgkgtatggtcaaagccaagcagttccatttacagctctgttttttacgtagttacaacatgatgtgattgtagctttttaaactatgaaacccctgagagattgtaccttctagttgaaataaagtatttataatagattgtggcttcagatgctgcttactgcttcttaaacctttaaggaacattcttaatacactttatagaattctgaggacaggttttgttttctttcaagttttgaactgcttcattacctataaaaggtctgggtatagctgtagcatttcatttgctttctgagagaaatggacagtttccttggccactgaagatgtttctcacgtaattaaacaacagtttatacatcttgatcctattcttttttttacagtgtgtttctttggagttaaaatggctatgatagcctcatcaaaaacagtcttcaatcccttctgggttaaagctgaacattccacatagcagcatgctcctatctgggagggagaaaaaaaatcacaaatatataagatcatgtttatacaattggcatgacataaacacatcattataaagaaaattataaaatacagctatgcaaaaagaatacattcatcatccatgttcataaccccagaggggattttaaaatactagtatatgtccttccagactttctatgaaaaattatttcactcaccacatatttactgggtatctactatatgtcaagcactgtttaggtcctggggatatgtcagtgaactgaacgaaagagcagagtccctgctgtgtggcgtccacatgtgctgacatctgctgggtaagaggcacaggggagggaatacagagcagatggttgcaaatgctgtggggaaaaagcagagtgagggaggcggggagtgctgaggacaatggtagtgggggtccggggaggcttctcaatggggaagtttgagcagtgagggatacctaggggaagagctccaggcagatagatcctgatgcaggagcatgcctggagcagtcaaggaacaagatcacactgaggatgtggtatttgagcagagacctgaaaagagtgaaagaatgaatcatgtccatagggaagaacattccaggcagagggaacaacaaaagtacaaaggttctcaggtagaactttgagggaacaacaaaggagaccaggaggcctggggaacaatgagtaaggcagagagggaacagaggcttgtaggccactgtgcggactttggcgtttagtctgagctggggacccactggaggattctgagcagagcagtgacatgattgcgcttacatttttaagacttactctggctgctgtgttgagaacagatgaccatggggcatagacagaagcagaaaggtgagttggaagctattccagtaaagcaggccagagatggaggaggtctgaaccaggtgatagagggaagagttagaaaaaagtgtctggattctggatatgttctgaaggtatgttgtgccgaaggctagatgtgtggtatgggagaaagagcaaggtcaagtacgacttcagggcttttttttttttttgagacagtttcactcttgttgcccaggctggagtactatggttcgatcttggctcatcacaacctctgccttctgggttcaagcggttctgcctcagattcctgactagctgggattacaggcatgtgccaccacacccagctaattttgtattagtagagatggggtttctccatgttggtcagggtggtctccaactcccaacctcaggtaattctgcccgcctcgggctcccaaagtgctgggattacaggtgtgagccactgcacccagctgagggcttctgacctgagtaactgggaggacaggcttggagggtaaaagaagaatcatatcttagacatgttaattttgagatactcagccatgtagatggacttgttgagtaaacagctggataaccaaattgagaatttaggaaagaggtccaggctggagatggaaatccaggaatctttggttgtagactgtgcaagctacaagactgacagaagctcatttaggcctagggagtgtagctatagaagaagacatccacaaagctgagtgctcatcactggggccctccaaccagggaccaaggaggtaaagagatggagcagagtccaatgagaggggagaaaaaccaagagagtccaactgaagaaagtttcaggaaggacgcaactgtgccaaatgctgatgagtctagaaatgagatcatactgttttgcaactacttttttccctttagctacataataaatatgaaatcttaacagatagtatgaagttttaatagatgcagggaatttttgccattataaacaattcagcatctttgtagctctaagtacgtccctaataatttacttttattattaaatattataaatggacaaattataattttatataaggtacaaagcaatattttctctctatatatacatatacacacacacacgagtgaaatgattaaatcaacataattaacatctatcaccttaaatacttatcattttgtgtggtgagaacatttaaaatttactcttttagcaatttggaaatacgcagtccaccattatttatttattcatttattttgagacagggtctcactctgtcatccaggctggagtgcaatggcactatctcggctcactgcaacctccacctcctgggctcaagtgatcctccttcctcagccccccaagtagctgggactacaggtatgcaccatcatgctcagctaatttttttttttttttttttttttttttttttttttttggtagagatggggtttcaccatgttgcccaggctggtctcgaattcctgggctcaaacgatccacccacctcagccttccaaggtgcggggattacaggtgtgagccaccgtgcccagcaccaccattattaactgtagttaccatgttgtgcagtgttatctcaaaaaatgtattcctcctaacactgtacactttgaccaacatcctaatgatttgcttaggataaactcttacatatggaattgcttgatcaaaagtgtccatgattttaaggattttgcatactgtcaagactgctttgattcaatgaccaatagtacaacagagtgtccattttactacacgggtattataattaatttctcattttttgccaattctataggtgcaaattgagcttacatttgactactaataagtttgaacatatttcctatcttcaatggcaatctgcattttggggggtgaatttttcattgttagcccatttttctattggtatctgtggctgcttctgattaactcatatgcaagaggttcctgtatactaaggatgttaacccatttttctgccatccatctcaggttatatgacttttcattttatttctggcatttgatgtggtattaagtttttatgcagtgaaatcattaatattttcatttatggcttttatctttatgacatttagaaattccttctctccccaagattacaaaactgaatacatggaatttctgaagtgatttgttagtaaagccatttattttttgctttaggaaaaactgtcctccagaaagttttcttgctttcttttgcctcctgatactacattttaaaagactatatatgggccgggcgcggtggctcatgcctgtaatcctagcactttgggaggatgaggtgggcagatcatgaggccaggaggtcgagaccatcctggctaacatggtaaaaccccatctccactaaaaatgaaaaaaaaaaaaaaaaaaaaaaaatagccgggtgtggtggcaggcacctgtagtcccagctacttgggaggctgaggcaggagaatggcatgaacacgggaggcagagcttgcagtgagctgagatcccgtcactgcactccaacctgggccacagagtgggactccgtctcaaaaaaaaaaaaaaaaaaaaagaccatatatggattctgtttccacaaaagtcctattgaaatcacaacatttaaaaaatagaatccaataatgttaaggccaaatgggaaaaaaggggaaaaagtaaacctatctttggggcacgaaggaagataagctacaaggtattgcatgcatcactgttacatatatttttagaatttttgtattttctatcctcttttcataaaaagattggagaaatttcaacacatttcttttcaaacctagtcatcattttttggttttaaccacaaatttaaactgtcatcctaggtggctccactgtctaactcaatgagtcttaagacagagctgatttggcacagtgcaactgtttaagtaatgaagaagggttgaaagtagtgacacgtgtttccgatgcttttttccatatgtgactttttaggaaaatatcactggcaatgtagcaaaggtgtaagagtctcggcccaggagtcaggctttggactgaaacccaactctgccatttattacctgcaggatcttgggcgaattatctgacatctcccagcctccactgtctcttctgtgtaacaggggaaacagacctacctcactgagttcatgcaaggattaaatgagataatgcatgtaaagcactccacctggcacacagtaaatacacaataaaattagcttctattgttatcttagcatcttttacattcatgcttaaattctgtgagtgttccattacctcttttgctagtttctgtccttgttccacacatataggtttttctttcatatcattcagtcttgctaaagttttggggtcatctcggagatcaatctaattaagaaaggtcaataatgtcccataatattacaaatctttaaagaaaaatcaaagcatgtaatcccacttaattcccacataccaaaaaaagattaaacaaaagaacttaatttttaaaaaccaggaaaataattgctttcttttggcacaattttttccaaaaatatgatagaactcattaacttgcagctgagattaaacacttacatcatttgctcagctttgggactgtttgtctgagagcagcctctacgacagaccaaagagcttattctaaaatgcagaaaatcaaaccagacatacctgagttcctattaataaaaagggtacatttggtgcgtattccttaagttccggtacccactcctctttcacattttgaaatgaggctggatttaccaccgagaagcatataaggaagacatcggtcattgggtaagataaaggcctcagacggtcatagtcttcctgaggaacaaagaaaagcctcattatgtatttacatttctattgtttactagtaatatgtacattagattacatggtcaaagatgcaaattcaggagtactccactagtggaatgtatggcactctaagtaaaatcagataactctgtttttgttattcttctttgtgaagttctgaacacccatgaggtaaaaaaaaatgacaatatcattaacaatgacaatgaaaactttggaaaaatacattatgatcactaacgctgtcactaaaaacatttttaactaaaaagtttgcacaaagaattgaatatagctagacattgcctaagtattataatttataataattaatacatgctaaatatttactatgtgtcaggcactagtctatatgctctctcatggattacttatttaatccttgtaacaacaatatgacacaagtacccttaatcctgactttcatttgagtaaactgaagcacagaagttaaattacttgcgtaaggatgtgtagccagtaagtcaaggagctgagattcaaatcctggcagtttttactccagagtctatactcttaaccactatacagcttcactgagaccttcaagctttgctttccttgtttctatagttttattaattgtgtgtgtgtgtgtgtgtgtgtgtgtgtgtgtgtgtgtgaagatttaaagagaaacatacacagtaaacccaccaaaatcctcctttactctccaactttcattccctctacttaatattttcatgtttattcttccagttctttttctatgcatgaatataccagtaactgcacatattcatacatctgtacataaaatgaaatcatgcagtacttgttgttctgcactttctttgtcttggacatctttctaaatcagaatacgttagactaccatatcattttacactgttgcttcagagtccccagaacagctatactcctgatggttattttagtctctatcacaaaaggcagtgaatatccttttttgcatagactattttatgtgaca

SEQ ID NO: 94369 - DNA, 201859 bp, Homo sapiens
gaactggaaactatcgttctaagtgaagtaacccaggaatagaaaactaaatatcgtatgttctcactgataagtggaagctaagctatgaggatgcaaaggcataaaaatgacacagtggactttggatactcgggggaaagggtgggagggggtgagggataaaaaaactgcatattgggtacagcgtacactgcttgagggatgggtgcaccaaaatctcagaaatcaccactaaagaacttattcatgtaaccaaacatcacatgttcccccaaacctattgagataaaacataaatttaaaaataaaaaaaattatatgcctgtatactgaaatggtgaatctgctcatgcaccacattgagaaattattttgaaatgttattatgaaaacatataataggatactaaaataaactttcagaaagtaaaattttaattttagaatagttgttgattaaaaaaattattgtgaatatagtagagttcccatatgccccacattcagttaccctattattaatatcttaatattaataaatagtattttctaccattgttaatgataaatggtatatttgttgcaattaatgaaccaatatcaatatctcattattaactaaagtttgtactttattcagatgtcctcagttttcacctcaagttctttttctgtcccacgatcccaccaaggatactaacattgcatctagtcatcaggtctccttaggctcctggtagatgcttctcaggctttctctgtttctgatgaccttgacagttttgaggattactagtcaggcatttcgtagaattaaattatattctcttcaatttttaattttatttttaaacttcacgtaagcattttaaacacacacaaaattagagaatagtataatgaatccccatctacccaagacccagcttcaaaactgtcaccatttccaagtttattctatctaaactgtcctacctgccaaccctgaggattttaaatcaagcgccaaatattatatcatagtacccttatgtatttcagtacatgcctctaacagataaggcctttaaagaatatacccacgatgccgttatcacagtgacaaagttaatgatgattctgtaatgtttagtagtcagcctacattcaaagttccccaatggtctaaaaaatgtcttgttcaagtttacgtactcaaatcaggatccaaacaaggtatatgtattgaattctgttgatttgaaaaacaggacttttatctctgctttagctgagacctgggactgaaaacaaaaccatagttatagctacattttgagatgaggtgctaaactccctgtgttgtgcaaaaggggcattttaaaagagttttaagatttttagtccaacacccacctcaggatccagagtatttctttggggaaatgcagtagggaactgtggcttttttccctcccaccgtgggagagagaagcaaggtgtcgccccatcaccccaagctcagtgagacagtctttaagaaaacctctctgagaactcggtgtttactccttggagctagaaagacacgttgaccgatacctgaggaaaggaaagaggaaaggctgtggctggagatgtctgaaaaatgactgccaagcagagcaaagagaggtggttgagttcagagcaatctgtgacttctatcactggtagggcagagatatgagcctccataactagatatgatgggagggagggatgtggtcctgtggtcagtttaaaatggatcccacccagatggccttcttgctgggggctagtctctttcagcagaaagaggttggaggtgtagcatttaatacagaagctgggatggggcacttaatacagaagctgggatacggctgtagagagaactggcatagcctaacaagggagcagcagtcaagaattccaagtggggtgaagctctgagtccctacaaaaagaatcctgcaaaataagtagtcagctttgaatattcaccattcccagagagcctaaatggatttcaaaagtacttgtttgttcccattttcagctaggtagggggaaactaaggcaagggcggsggggaccaaccatgccctctcctcacttcagcatactcagtaccaagctgggagagggaagacactttaatgttacatatccttctgactttttaatattaaattggactgtgacaaagaaaaattggttcaaacctgggacagaatctccttctggaaagaaatctgctttgctgatagaacgcttaagcaattttctgataacttgtaataagattaaagcctcttctgggaaaccagctacttgctcagctgaccaacagtctgctgtctaataattttgaatccagtttagtaataattaagcatttattttacctataaagtattccttccacagggaatcattgaatggaagttaacaatttgtatcatgttgggtcctgcactttcaacataatgattacaaaaatatttcagggatagaaatatgccgatggataaagtaattttgcttgtccttaaaatcaatcatatcttaatatcaaatttctgagaaataactctagcaatcactttcaaatgaccccatgtggtgatgaatttgagagttacaggcggtacctcctcacttcaaatgtcatttggacacagagtactatctatccttatttcacaggttctgtgtattatctatccttattagatatacacatatagagatgtgtattatctatcatatgtattattgtcatatatagataatacacacatgtaaatgtgtattatctatgcttattttacagattctggtgcctggtcatcttttacagtcatattatataagcaggattttccctttctatgtattaccttaaacatgatcctagatcacaaaccaattgtcttaaagggttcaaagaagggaattaacaggttttaatttcaaccagtagtaacacaaagcctagttattccaaagctgttgctcaggttacaaaaccaaagcttcatataatttaatcatgcattgtacgtgaaggacctgcatacatttgtttgtataaaaagccaaataatcatatacagtcttggtagtaatatatttaaattggcacagcccttcgaaaaacagtttggcaatatatatcaagaacaatacatgcttatacccttgatttgatattccaacttcaattaaaaatatgtgggaaggaagctacatgcataaatattttcttttttatggtagtgaaaaatgagaagcagcctgaatatgtaacaacagggactcacagtaggtaaatgtgtggtttatccacctaatgtgatttattaaaatattcattggaaagactacaacatggaaaagaagaataaaagttgcattcatactataattacttaaaacatatattagaaacatttgcgtacattttctaaagacttagaatcacatattattggcaatccatgccgaaatggtacataaaaatttccgtttgctaatgttagactgctggcagacacagcaaatttttcagctaagcaaatgtcaattgttgctatagcacttctaaaattcaaataaacctacctaataattggcaggggtactcttgggtaaatgtggagaaaagtcaaagattaagaaaaggaaaatgtcaaccttcccagtcagtgactacttagaagctatgctatagttgtccgttgttatctgcaggggattggttccaggaatccccttggatataaaaatcctggaatgttcaagttcctaatagaaacatacatacacatattgtcctgtatgttttaagtcatctctagattatttaaaatacctaatgcgatgtaaatgctattatactgtattgttcagggaatgatgacaagaaacaagagtctgcatgagttcagtagagatgacttttttttttttttttggagacagggtctcgctctgtcacccaggctggagtgcagtggccccatctcggttcactgcaacctctgcctcctgggcaaaagtgatcctactcccacctcagcctcccaagtagctgggactacaggcacaggccaccacagccaggtaatttttgtattttttatagaggcggggcttcactgtattgtccaggctggtcatctctaactcctgggctcaagctgttcgccagccttggcctcccaacatgttgggattacaggtgtgagccaccgtgcaggccaagatacttaaaaaaaaaaattctgtttgaggttggttgaatctatggatgcagaacctgctaatatggatggctgactgtactagtggggaaggcacactaaataactaggataaaatctggtaaccactcgcagagatgactgagcgggatagaggaagattttggagaagggggaggcattccagatagagtagacccaagagaagaggttctttgttttaaacctctgtactgagagagcagaataaccgagagtgtcttgactatagtttaaatgcaggatttgcataagcaggtagtggaggctgaagaccttaggttctattttgaacgtattaagaagaatgatttaaaatttatgttgattctagagtctgcatggaatgaactgggagatggaagagttaagttacgaggtctctgcaataaactaagaccttcactacataaattaactgcactagcatttccagaatatattttactttaaaaatgatttaaccatattctaaccaagttttggatgatttttggtgttctctaatagaattggcacagtatattgaatcagattgcagtggattattttaactgtgtggccagatgcagagaaatatgccaaggtattgaggccaacaaatagagaaatgcaaattctcacaagtaaacagatttggaattctagaaggtggcagattatcaatagctgtatccagatcctttggagtggtggatggttttatattaaaacttggtaatagctcaccaggaaataaaattcagccttaaccttctaggcaattgggatgttgctgagaataatcaagacaatcaaaaaaaaaaaaaaaaaaaaaggtcgggtgtggtggctcacacctgtaatcccagcactttgggaggccgaggcaggtggatcacctgaggtcaggagtttgagactagcctggacaacatggtgaaaccccgtctccactaaaaatacaaaaattagctgggtgaggtggcgcatgcctgtaatcccagctacttggaaggctgaggcaggacaatttcttgaacctgggaggtggaggctgctgtgagctgagattgcactactgcactccagtctgggagacaagagcgaaactccgtctcaaaacaacagcaacaaacccacaccaaaaaaactgtatgaacagcagacaagatgactacagtgtttttcttttgtctgtttccactagcataaaagacttcatatttttaaaaagtttcttatcccagaaaatatcacaatccgtttagaatacgagttcaggctcaattccttcctgactgtacagaagagctcaagatgttgcagaccttatcttaaaagctggcttggtagtcacctaaacatttcataaataatttactaactctcaaaacactaaacacgcaggcccttgatttcaaaagccaatcttgctgggatggagtggggtgggggacctgggatgggggatgaaaggggttggaaatggggagatattggtcaaagggtacaaagtttcagttagtgtgaataataagttctgaagatctgttgtctaacatggtgactgcgataaatgtattgtgtccttaaaaattgatgagagtagatcttaaatgttctcttcattaaaaaatggtgcaatggatacgttaatttcattgatgtaatcatttcacaatgcatacatatgtcaaaacatcaccttgtacaccacaaatatacccaacttttatttgtcaattacactttaataaagctgggggaagccactctttttttgggcacagcatccggcttttatttactaactttgagaacagagtaccttgatcaattaaatggtagggagcgctgtggagacagcatcctccccagtccgggaagagaggcctaggatgcctggggcccagcggcctcttccctcctggcgtccccggctgccctcgctcccaggccccgcagtctcatttgccgcttccgacgcgtgaccccggcgcgctagcgtccgggaccggtgacaggcgcggggtgcgccaagcagtcccatgtgtcccctccctctcgcagccgccgcagtcgctgcgccccgagcccctctccggctcctcaacagagggctcgccgccgccatgtctaccgcccagtcactcaaatccgtggactacgaggtgttcggaagagtgcagggtaggaggcccctctacggtgggagatcaaaaaggttatgggaggaaggggagaaagctgtragaagcgcctcccacctawagtatgccttttcccgttgtggctgggacttccgctccgccatgacacagcagcggcggcggggagggaggcgaaacgcgcatgcgcccgaggacttggacgggcggaagtacgggaatggggagggaagtggsggagcgggagaggaggggtcaggggactgctgaggaccagaagtgggcggctgctgggtgcgggagtaagcggcacgggggaatgttgaagttgggtaggaaaagaagagggtcttttaactagtggtctcgttgcttgccactgaagctacctgggcttgacttgagttttaggaaggacacttagatggtttaaggttaatttttcagaggtcaaacctttttttagacctctttgtmgctcttaaaagaatgaaattgttatctaatttttgtttcatcctaagtttaagtagttgccaagtttgtaatgtctggcttgttgaaaatattgatatttataaatgaaaatattaagtcactctgagatttatgcaatggaatataaatagggtagtgatttaayatccaccatcttcatttaaaataaaactcttcaacaatgggaaattttactcatttcttttcctctttgaatttgattttcatttcacttttcccaccgaattaccccattgttttgcttgagggttttttttttttttttgctcaccctatcatacttttctgcaatatgtatatgtacatatatgcacatgtatgaataagtgtaatgctttttcttaatttcctttgacaataaggctctcttagaaacaaatgctggttctttggtgccaaaaagaagaactagcgctcaaagaattttctcagcaaggcaattttacctctatagaagggtgcgactcgcggatgaagcaatggcaacggcacacctgaacaggggaggggaaggggttcttattcctgatgcaggtagcctctactgctgtgtctttcccctactggctagggttggaccgcacagtctaagctaattccgactggctattttaaagagcaggcgtacgagctcaagtggcggggtgaataatttggcaggaagggtggttacagaacaggtgactcaggatgattcaggtcagagcaggtgaccaggggtgactcaggatggagcaggtgaccagaggaatagaggtgaactactgattagaactggtggaaaaggttgtttactgaaactagaggcgaggagaacgaggaagctagactttagagcgcaaagaaccgagcatactgacatactgattctttgaagagaaatttagaactcattgtattcaacagctccaagtattaaattttttgtctggatggagttattattgaaattattattagaacactagatgaaaatataaaaagtatgataaacattattaaaatttaaaggtaaatttgtgttagaagtttatttttttaattttatttttttaagagatggagtcttgctctgtcacccagactggagcaagtgcaatggcacaatcatagctcactgcagcctggaactcctgggctcaagtgatcttctgcctcagccttctaagcagctgggactacaggctcatgccaccatgcatgactaatttttaaaatttttttgtagagaaagggtctctgttgcccaggcaagtctcgaaatcctggcttcaagggatcctcctgcacttcgcctcccaaagtgatgggattacaggcgtgagccactgcactcagccagaaatttattaatgagaagactgggggtgtttatggaacctcggttggtggaagagttgaattatccttgtatttggtactctagaggtttttacactttggtgcagtgtaccagggtaagattaagaatgggtaaaagtgtgccttttgtaaagagatctttttttaatttaatttwatttttatttcctataggtctttggagaacaggtggtgtttgattacatgaataagttcattactggtgatttctgagattttggtgcatccatcacccaagcagtttacactgtacccaatgtgtagccttttgtccctcaccccgtcctaccctttcccccctgactccccagaatccattgtatcattcttttatgcctttgcatccttatagcttagctcccacttagaagtgagaacatagaatgtttagttttccattcatgagttacttcacttaggataacaggagacctttctttcaaaggatgattgtgcaaagggaggtaggaaaggagtctcaggtcagttttaggaaggaatatatgtggaagttgaagatctggaaattgattccctgaacattatgcatggatctgtactctttagaaagtctttgagtgaacccagcggtatgttatcctgctttgaaaactgccacaataagtcaccaaaacacgtaatgtaaaatacgaaagtggtggcaaagatcacctgacagaatggtccactagagasaaatggcagtagtgaaggagtctgtgtgtgtgtgtgaatgtgtgacatttattatgggtgttctttgtgctgagcatttcactgttgtttacttaatcatcacaattttgtgagatgcatgtcttattcctgttttaacaaggacaaaacaggtgcacagagattcagtaacttggacaagcccttagttgacaaatgggatttgattctacatctctctgactttaaaagttgtgctttcccattataagatgttatctgctattacattatatatttctattaactatacaattccacttttgtgcacatagtggtaacacggtatataatcaatttggaccagcagtaaaaatatggaaaagagaaacgtactatacataaatagtggggtttaaaaagtcaactttagggcaataattcctatagtttgcagtatgctaaatggaagagagtacatgcccactattgatcaaggcatagtatgtagtacaaactcaccatcacatatttacatacatctacattgacattccctgacaatttagaatgtgccaagctctgtactcaacattttacatatattgtctcatttaatcctcatccctgtaactgcaatggtttttctcatttaacagatggagacattgaggcgtggggaagtaacttctttcccagttatacacaagttaagaagtgggatttgaatcttagtagtcttttttttttttttttttttttttttttttttaacagggtctcattatgtcacccgggcaagatcatagctcactgcagccttgagctcctgggctcatatgatcttcctgcctcagcctcctcttgagtagttgggactacaggcatgagtcaccatgcccagctaactttttaatttttccttggtagagagggagtctcactatgttgactaggctggttttgaactcctggcctcaagcaagcctcccacctcggcctcacaaagttctggccttataagcatgagccactagcctgggcaacagagtgagactgtctctaaagaaacaataaaataaataaagtatggaataataaaattttagtgaaaactgtcttgttagaaataatggctatgaaagtaaattcgcaatggaagaacctataattgggaacatttattatggacaaaatacggattgataaagtcatcattaaaatatttgagtggaaactattcccagtgaaaattgtttcaatgacatgaaagtgaacatggaaaaaatggaaaatgttttaaccctcctgtatggaaaattgatcaatgaattaaattggcttgcttgagtttattgcagaaaacgttttccaaccaaaaatgatgtgttgttagtatagggaccgtacaactggtttaagccaatatggatacattattatgaactaaagtccttacttttttcaaggtttccttagtttttacctaatgtcttttttttggttccaggatcccatccagatacatttagcccccttgcctcctcaggctccttgaggctgtgacattctgttagacttaccttgttgtcgatgacgttggcagttttaaggagtactttgaggtcaagtactttgtagaatgctccccaattgggatttgtctgatatttttgttatgataagactgggataatggggtattggaaggaagaccacagaggtgaagtgctgctcttgtcacacctatcaagggtatatactgtcaatctgacttatcactgttgatgttaaccttgatcacctggctgtgatagtgtttgtctggtttctccactctaaagttactcttttttttytctctytcttttcatcctgtactttaaaaaatcttcacattctcaaggagctccacgttttttccccatcaacttcycttgcatcaaggactttgggagagggttaagagagctggggactgagcccctgtgcttttagagtgtttgtaactgtggcctggtttataatgtttctatagatgtttaattatatttacatctagaataatataatctgaaaatttgaaagggaaattgattatgctgtgtatagatgctttgatgctttaccagctctcaggggaatactaatgacactcctagaaatgcattgtgactatctgttggtatacatgtgcttagaatttttttttgactgagtttttttagaataagagtagcttatttgactactgatgacacagaattctttcagtgccactttgccagccagaaatctccayggctagtggcacctctgcccaggctttgcttgggcccactgggcttactctgcccacttggcccagcagactgcgctcaggytgtgctactggtctggatcctgcgcttgccttggctctgtggtcagcccgcagctggtccaggggtgccrtgaccaacttctaccttggatgctggtgtctggatgagggggatgtggcagtgcccaataacttggagatgccagcaaccacagagccccaaggtgtgttacagcttttgcttggggagtcctgaggyctgagcctccagaaagtgttacactgtcgttcatttctgctgtctgcagcttcagtgaatgggagcgtgtcacaactcattgggtcctgctgcctgcagctcagcaaatgggggcatgttggcacacaatggttttttcactcctatagctcggcgagcatgagcatatgttacagctctttttgcacctgccattcgctcttgtcccatgaccaagaggaatgaggtacgcggacactggagagtgaacaaggcagagaagaattttattgactgacagaaaagctctcgataaagagaggggacccgaagtgggtagccctctgtgtgagagggggcctgaaagtggatagccatctgtaaggctgagtctggggtttttatgggctcagaatggggtgtatgctaattgttccatgggtgggcctggaaaaagcaccattcagttggctaaaaggcatcgaggaagttctcactctggttgtggactccacctggaactggcaactcggtttcaggtttcacttgaaggtctggtttcaccggagacctgtccctgtctaccgaggaatttgtctgtttcctactgctataactgagatgaataccatatttcttaaatattgcttaaaatgaaaactgggatgaattattaaatggctttgtcagataatgcatgatttagaagtacacatttttcttacatagacaagtaaatggaaaagctgtgttttagaggttgaaaatattaagtaccaccattaaagtcaagaaacataaatatggttaactctaattccctctcctgtctttgttcttatagtattttatttatagtagttatactttgtgtttatccttttaatcattctgctttcagctacagttatctgtgtacacttgtatgtgtctctcactagaaaataatgacagtattttgaaggtcaggctggtggcttgttttcatatcccctacacggctacgcctctagtgggtccttcaaaagtgaactgaattaaattgaagtatttggggatatctggcttggagaagaaattgtagtgtgatggctgttttaactgtttgaaagatgccgtggtgtatggctccagggaacagaacctggactgatggtgaaaggttaagtaaggcagaattttattccacataaggaaagctttgtaacaattaaagatatttacagtcattaagggctgctttgtaaggcagcatatagatcacttcctgcattcaaaattgacacatgcagtcagatcccaggatgaaatggtaggttacaatataaaaaataggattttacatgaaaaggtgttgacatttaaaactcatcacaggtttctttaaatatcagtgtgtgtttgtcaattcaaagtatgatttactttgcaaacattcctctcagggtttctcactgacacctctttccacaaagtgaggtacagttgtagtggactggaccttgactgagcagcatatcgtgctggagtcttttatcaccaaaagggctgatgtctgccccagtttccagagcagagtgtctgtaaaaaacctgcatgtgtcatatcagctttccttctcttcagcaagtgaggtggaaaaagtatggggaggccacgaaagcccatagataaatctcctacagaagccctgtcccaagagggctgtgttccagccaacactgataaagtgcagaaaaatgtctccacatctaccttttctttctatatagatatctatctgttgtgcagtatgcttcatactaggaatcaggactctcagaaagattctgggaaaattcctggtggcttatgaaactttgagcagttgattcctgcatggttcagtgccttgcagagttaatgggctagaagtcttgagactccttggctcaccttcctcccaaggctttaaaataagagttgtagtttgaggggcccaacaaataacacctatcttcattgtgtgagttactgtcaagacaaagagtaaagcggagttttaggaatgtgatgtctatctgcaggtaagtggactttataatgacctgtactacagaattaaacagtggccaccccaaacttcaggcacagggaggctactctagggtagagccagaagtatgatccctgtgggtaacttgctcccagcgggaggaagaagaggacatgcctgggctgtgcatgtttctccttctaaatttacccagtagatgagtcactgcatgtccctgtgacaagggcagggtagaaagtagccaggaatgacacactaatgatacgcctcctcacagaaggaatttccgctagagagaaagatgctttctcctgcagaaataagttataaaatctagagagagctcagtcatttagttctacttgccgtacttcaagaggatcttcactgcagttgttttggtatggagtgataggaaaaagtcagggaggttgtacggtaagcaaaattggagaatgactgcccttgttctacaaatagaggtaggaaggactacatcatagtcctgttttctgctttcctttttttgtgtgtgtggcattaacaaaattgagatataatttacataacactaaatatacagtagtttttagtatattcacaatgttttgcagcattaccattaattccagaacatttccatcacccctccttccctttaccagctgcttcccattccccacctcattcccccattccccacttcttcctccatcccctggcatgttaaagtgcctcagggaagtcagggacaaagtctctgatgtccttggcctctccctcaagatttcaagattgctgcttagctccaatcataatattcataccatgattaggagaaaaaagggtaccagtgcaataccccgacatggagaaaccactaactcccagccaagtcagcccctgttgaagagctgtcttgaaagtcccaaccagtgatacggcttacatttcattggccatccccactataaggaagtctgggaaacatcaactggcacattgctgccccaagtaaaatcagagttctgttagaagggaagaatgggagaatggatttggggtatgcaactagctgtgcctgtcacagtcgttcatatattaaatacacttctaaacaattattacatttgatgtttttttcccaagtagtgacacaaaaggacacattacaaaaagattgtgatcttgtgtccataacctctccttcaaaacactggctccgtaaccaaaaacaacctaaatttctattaagttcatattgaatctttttttttttttttgagacagagtttcattcttgttgcccaggctggagtgcaatggcgcgatgtgggctcaccgcaacctccgcctaccaggttcaagtgattatcctgcctcagcctcctgtgtagctgggattataggcatgtgccaccacgcctggctaattttttgtatttttagtagagacggggtttctccatgttggtcaggctggtcttgaactcccgatctcaggtgatccaccctcctcggcctcccaaagtgctgggattacaggtgtgagccaccacgcccagcccatattgaatcttttctatatgatttatttcagccttgtttatttccatctattactgccttaagcaatgggtgacacttttattatccacccagtttgtcaagaagtatgaatttaaccaaaaattgtgcctcaaacttactgttttaagatttaataaatgcatgtgtgtattgttaccattcatagttaaaaatgcttttatttgtttttttatttgtttgaaacagagtcttgctctgtcacccaggctagagtgcagcagtgtgatcacagctcactgcaatctcgacctcacaggctcaattgatcctcccccactctatcctccctaatagctgggactagaggcaagtgctatcatgtgctatctaagacgcatgtgctaactagaggcatgtactgtcatgcccagctacgttttgtattcatattttttgtagagatggggtttcaccatgttgcccaggctggtcttgaactctggactcaagcaattcatctgccttgtcttcccaaagtgctgggattacaggcatgagccaccatgccctgccccaaatgcttttaaatttaaaactttgaaaatttaaaccaaattaacatatgcacatggatttaaaaaaaaaaactcaaaacagtatagaaaagctggtgataaaaagcaacagctaccatatcctgctccagtttccaaccccaaatcctgtatattctataaaacaaccaatttgaccatttatttttaaagtcttgtggtttttatgtcttttgttatgtatatactatgtgtgtttgggccataatcctgaaagatacaattccaaacgccataatcttgcatgttgaaattccaaaacatcaaaatccttaaagtctaaaatcccccaaatcacagttctgaaagatcaaaaatcccaaaaatataatctggaaaaaatcattcaaagagtatttaaaatactaatttttggccaggcacggtggttcatacctgtaatcccagcactttgggaggccgaggcgagcagataaccagaggtcaggagtttgagaccagcctggccaacatggtgaaaccctgtctctactaaaaatacaaaacttasctggagatggtggcaggcgcctgtaatcccagctactcaggaggctgaggcaggagaattgcttgaacctgggaggtggaggttgcagtgagccgagatcgtgccattgcactccagcctggggaacaagaacgagactatgtctcaaaaaacaaaaacaaaactagtttttaaacatattaaaaaggggattcaggctgggcacagtggctcacgcctgtaatcccagcactttggggggccgaggtgggcaatcacttgaggtcaggcattcaagaccagcctgaccaacatggagaaacctggtttctactaaaaatacaaaamttagctgggcatggtggtgcacgcctataatcccagctactcgggaggttgaggcggaagaattgcttgaacctgggagaaggaggttgcagtgagcggagattgcaccactgcactccagcctgggcgacagagagagactccgactcaaaaaaaataaataaataaaaataaaaaggagatttatttgagaaacatttaaaaacacaacggaaacttcataggccagtttgcagaagaagataggtaataataacgtatgtatttttgtgactgtacacactgaggtgtactgatgacagtcacataggtgtaacagttacgagaagatgaactatattcataaggaagtaggtctaaaagcaaaatatataaatgcatatcactatagttggtaattctgtgcaaccagttttgtaactggtcatctgacataccttgatggacaacctaagtcttttgatgagattgatcaaaaattgtgayggatcaccactgtatatgcagtcactcaaaaagccaggatgtcaagaaattttatctttcacaaatgtacgtatacaaaaaggacatctcttcattcattaaggaagtttcaacattttttacatacatacacaatactaagtcagcgttgtggtgacacactcatagagtcaaatttgcaaaaaaaaaaaaaaaaaaaagcataaaacaaattagaactctaaaactctttacaaagtttatgcttctggccgggtgcagtggctcacgcctgtaatcccagaactttgggaggcctaggcgggcggatcacctgaggtcaggagtttgagaccagcctgcccaacatggtaaaaccctgtctctactaaaaaatgcaaaaaattagccaggtgtggtggtgtgcatgtgcctgtaatcccagctacccgggagggtgaggcaggagaataagttggacccgggaggtggaggttgcagtgagccgagattgtgcaactgcactccagcctgggtgacaagagcgaaactccgtctcaaaaaaaaaaaaaaaattgacatgcaaaaaagtatattacagtgaaagattataggcagttgcatggaggtagtccataagaattggccaacttttcacaatcattatctatattttgaagtcttccttcatgatgaatagctgctttttttttttttttttggacatggctctttttggaaaatacatttacatccgtattctacatggcactgctctttttgaaattcttctatgatttgatatacactgacataakcrtcccctattaaggttttccatcttcagtgctatgcttctatgttttgcatacatggaaattcattctgcatgcactcatatacagactacaaatttagtgcagactatacttgtgatcaaacaacaacaccgttatatgtcttgtaatcctaccatgcacataattatttttaaaccagtcagtaactttgctggtttcttcaggcaaatgcagattcaatccattaaaagctgggctgggcgcagtgactcacacctgtaatcccagcactttgggaggccaaagtgggtggatcatgaggtcaggagattgagaccatcctggctaacatagtgaaaccccatctctactaaaaacacaaaaattacaaaaatacaaaaaattagcccggtgtggtggcatgcacctgtagtcccagttactctagaggctgaggccggagaatcgcttgaacctgggaggcggaggttgcaatgagccgagatcacaccatgccactccactgcagcctgggcaacagagcgagactgtctcaaaaaaaaaaaaaaaaaaaaagcttctggaatttcatcasctggaaggaaagccaatgcagacaaatgacacatttttaaattgaagttttcatcattgccatatctcatggccaatcgactcatctaagttttccactaaatgcatcagactgaatggaaaaaayaaactttgttagtgacatcttgaaattcactttcaraagctttgttgcacctaatctgtcattatgatttggggattcagttgaatccattttcttttgcaacatccaccaaatcttcaaataagtgttttataaagtgcttcccttttgtccagtcattcatacataaatgagtggataagttctagaattttgagatccaacagggggatgaatcatatgcaattggcaaaaaatggtggggatggttttgaaagtgccacacattagccaaactgaagcatgcactggtttttctttgttagattgggtggtttaataaatagaagtctatcttctttgatggacagatccctgatcaagaatagttcatcatttaacgtgttttgtatcactggaggaacctctgtatcagcaagtgcctttcattcagaagttcactgagcttttcaaattccattttttttttggctggaggtagtggctcatgcttgtaatcccagtgctttgggaggctgaggcagttggattgagtgaagccagaagtttgagactagcctgagcagcatrgtcagactccatctctacaaaaattttaaaactatccagacgtggtggtgtgcacctgtagttctagctacttggaatgttgaggtgagagaattggttaaggccaagagtttgagaccatagtgagctatgatcacaccactgcactccagcctgggcaacagagtgagaccccatctctttaaaaaaattccttttattctccgatgaaggttattttttttccttttccccccttttttaaaaaaaattcagttggcacaaaggaaggattttttttttagggcaagcgtggtactatgtgtgaagatgcggaagtcatacacaattgaataatttggcaggggagatttcttgtatcttttgcctgcattttcacttctctgaaacactcaaaacactgagggcagatcttacccacttggtctactcagactcacagtaatctctggaaacacccttacagacacacccaaaataatgctttatcaggtttctaggtattccttaatccggtcaaattgacacctaaaattaagtccacaaatccagccctggtcartttggcacccatatgtgtctccttaaaccataattcacttccaaataaagacaataacaaggtaatagttctgtttaacatgatgcagctaacatgatgcaaatattatgcacacaaccaaacaggtactaatcgtatccccagaattaggctttctagattttatcattcagaattttaatctttcaggattgtgattttcaggattttaatcattagggattttagactttagagatttttaattaaaatttttatttttctttcagaaatgaagtcttgctttgttgcccaggctgatctcgaactcctgggctcaatcaatcctcctgcctcagcctcccaaaatgctgggcttacaggtgtaagtcaccacacctggctgactttagggattttgatctttcaggatttcaacatttaggattatagcattcaagattatgattggcactaatactatgtatatgcctaatgttatgtatatgcataatgtcaatttaggcattattagtaacttcttgctatctattatagtatatatactatctattatatataatagatatgtactatggagatatatgtgagcattaagcatgtatgtctacatatatatgtgtattatatattcagtcattatatattatcactgtgtaaagttctactagaatcaacatagaattcttgagattctttccagaactttgaatgcagtaaattgagcatcatcactttgaaagtaaacttaaagtctaataaatatgattatatgtatattcacaatatacattaacaataaatataatatataatcaatatgttaatattattaatgatattatattataaatgtataatacatatataataaagatatataaaaatttatatgataaattattataggatagttaaatatttcacataaatatttatcagctggtttttaaaaattcatttattcaacaaccatgtgccaagctctggtctaggtgttggggacacagtggtaagtaaacaagacagaaaaattcctgttcttatggaactgacaatctactataaagataggaaatcaaaaagtaaacaatgtatgtgcaagaaacatggggtgcattgctgttttagataaatttgttggggaatatttctttaaggaggtgacatttgtatggagggataaataatgggaaggagccagtaatgagaatatcagggggaagaggattcaggcagaaggaatagtcagtacaaaggctagggggcttggcatctttaaggggccaaaggaggcatatctggctggaatggggtgagtaaagaggagagaagtaggatatgaggtagaggaattagggggctgtggcaaccagaatacatttcatttccagtgtagtgggagcccctgtgggcttttaagctggggaaggaratgctttgatttttagttaagaaaaggaaaccatgttgggtgctttatggagaatacactgtaaggggggcagaattggaagcagggaggctagttaaggaggttcttgtagtagatgagttgaaagattatggtaactttaagtatataaacattatcacccattcttctagacacagttggaacagaattaaactatttttcagtaaatcttcagtaacgactggggcctagaaataatttagaaaatgagtacaatgcatgggtttgaatatttaactatgcgtggtatccagatatgccctgatctcaaacctcgggcctttgagcatgctctcctatctgtaatgttctactctcatcatactaatttttgctcatcattgaagtctcagctctaagacctgtttttcaacaagccagccctaaaatcacccaagagtgattgtctgtcatgtagctgtcttatgaactctaatttatatctaggcttatggattttacagctccaaattgtccattattttaattgccatatttaattgccagtttacttgtccatctttcccactagattgtaaactcttagatgcagggactgtgtcttactcatctcattctttgcacttaaaattagacaattgaaaaatgtttgttaagtcaataatcaatgtttaactgtgtgcctattagatttacctgagttacctcattcttagattatgttagtgtgaataaaatattacatcaatagattggagcaggtaatttccttaacactgcaacacatagtggaatatctgtgtttgattccactttaaaaattttctcaaaccccatcaccataggctaatggtctttgtcatcatcaatgaatagatggtggaagggctgctcgagattcgtaaatgttgaaaggacgttgctcttcactgaggggcatgttgtcagtttccctctttgggcagctccagtatttctactagtaagtggtacagatggagggagaaatctacgtgacaggctgcctargctgtgccaatgtcaggtccctttagggtgcaggaggggagagttgcctttttatcatgcatggttttttccatgtaattcgtctgacttgtgaaaaaaaggtgaggcaacaatgacatgcaaatacatgagttattaccaacaccaacttgaacagtgtgatggagcgtgcatcagatctgtggtaccctacgagattttaattttctccttttgatgcaattcttacctgaaatataaacycttttcaaatctctcccagacctttctttaagggggagtcagccattgcttctaaactttagtgggcataagaattgcctggaaagcatgtgaaaacagattactgggctccacctgtagcatttctgttccttggaggaggggcccaagaattttattttctgaaaaaaactctcaggtgctgctgtttcatggactactctttaaataggaaagagatggactacgtgtttctaatttctgtttactgccattgcaagtgctttctcttttcataackctaatattctggcctgttagcggttgaggaactcagaggggaatatacacaatacaacctagaccaaaactttcagtctacttacttggtcagtgtcttactgtgttctgggatccccttacccttatgataaaaagactgcacacttttgcctgcacagtgcagcttgtcttctctcctgttttatctctctcctacctggtctggttgacctgaagtttctggaattttctgctaattccttttatatctaccagctaatgtcttcccctccatctatataacagattgcctttctgattctctttcagatcaatatgtcccactcatcattcctccacattgaacatctatctcttgaaatatttttatagccctataaaaactccatttgtgatactatcctgtcttcattgctttgctgcttttttttccttcatacttgttgggtaccacagtatactaccatcaggaaactataaatctgcttacaaaactgcataaaatatctaagctactgatgctttcttctgtatcctcttaaccaggcttaactgctgtatgtagaatcaataccttttggactctttggagattgatccatccgctgtgacttcccagtgtattttttcccaatgtattatttttcaattgagatagaatataaattcagcaacattcaccttttatagtgtacaattgaatgattttttttttttttttttgagactgagtctcgctctgttgcccaggctggagtgcaatggcatgatcttggctcaccgaaacctccgcctcccaggctcaagtgattctcctgcctcagcctcccaagtagctaggattacaggcacccaccattatgcccagctaatttttgtatttttcttgagatgggatttcaccatattggtcaggctggtcttgaactcctgacctcaggtgatccacccgccttggcctcccaaagtgctgggattacaggtgtgagccaccacacccggcccaatgaatttttaacaaatgcatacagtcatgtaatcctcaccacaamtgagatatagaacagtcccatcaccccgaagttcttcaccccccattgtagcactctcccctctactcctggcccttggcaactgacaatcagttttctgtccttatagtttgccttttccagaaagtggagttacacagtatgtgtgagtctggcctctcttacttagcataatgcatttgtgattcataygtgttgttgcttgtatccctggttcattcctttttattgctgcagctgcatgctattccgttgtgtgsatctaccacagttgtttatctattcccaatgttttttaattgctatatcctctcctctaaatttaagcactttttttttctgtcatttggcttttgagtacgaaaaagtaaatttccaaatttaccatgtgttctaggtagaaataaaaactaagttgcaataggtactaataagctctgaatttctgcacctgatacattcctgatgtttctttacttaggcctattttaaccaactctcaagtaggagcccagatgtggggcatatctataccaaagaagcctgttctaattcatccttttggatcaagagttttccaagttgcaatttgaaggactgacttgagatctgttatttagggtcattgctgcaattcccaggagagatgtaagaaggccttccctttcactaaaggggtcccataccataaatacatatccctgataatttggaaccagcctgtctcttgtgtcacccccactctagggcccagttctctatgtatcaatatttggttctagaccacccaaggtatgaagtcccatagtattcttgacctctgtctgagatgagactcctatagttttgcaggctgggtaagcaaagtataggataccatcatagttggccaatatagaacagcttatcatggtctagatagggaaaacataaccaagaccaaygatacttcccagcctacatggttcaaagtattaacataatgtaatctacactatagagattytaagaatcatttccatttcagttagtttccattagtacttaggcttcagagctagggacagtggctcatgcctggagtcctagctactcaggaggcgaggcaggaagatcccttgagcccaggagtttgagggggcagtgagctacgattgcatcactgtattccagcctgggtgcagagcaagaccctgtctctaaaataaataaataagtaagtaaataaataaataaataaataaagaactgaggcttcagaagccaagttatggtcaagcatatcatttcataagtttcattggttctataactagaaataaaatacacaaatgttttattacatttaaatttgtatttagtccttacattttaagaagatatcttaaaagttgaggacagctaaattttatgccaagtatactcaactgtacctgtaataactattttgttttatttagcatttaaaaatagaataaatatgtgcttcagcattttatttatttggattcagcagaatattactatttttctccaaaaagtcttccttttctcttttcattttaaaagaaactaattttcaaaaacactttctaaatatattcagagtaaacattttatttatttcatttacttaccacttaataaatacaggggttcccccttgttcttgggtcgggatgcagtccaggaaccccagtgtatgcctgaaactgtggatagtgtagaaccctcgatatgctaagcatttatcatacactgtggccataacttttacaatttgaggtataacagcaaaactaacacaaatttcttcttccttcttcacagtttcatggacagaagattgtttttactttagatcttagcagcgtcagcatacaatgtttttctttccttatcaagtcgagaactttcaccttttcacttagaggaagcactttatggtttctctttggcgcatttgccagcatcactactctcgtgcttcggggttcatcattaagtaaaataagggttactcgaacacaagcactgcagtaccaccaagtcagtcgatctgataaccaagagagtgtctacagtgtggatctgctggacaaagggataattcatgggtgggacagcatgagatttcactatgctactcagaaaggcattcaatttaaaacttatgaattgtttatttctggaattttaaatttaataytgtaggaccacagttgatggaggattaagtgaaactgcagaaggtgaaaccaaggataaatggggaccacctagataaaagttaagtcaggaaacatataaccttttaaaggaggacaagctgacaattctttttatctttcttttatacaggtgtttgcttcagaatggtaagtcagtacaatctttattattttgctattttttttccactgttattcccaattacagagatagggcagttttctacttggcgctagtctactgtttactccctgtccttgacagcaaatgaagaaatatatgtatttctttgaaattactgattgagatttttattaatgctaaaaacattgtacccttcttagtatttacttaacattttctatattcaaaagtacctctctttgggtgattttaatgaaacgctttgattaggtgtattgaatacaaagtatgggactttctacatgttctggatggaagaaatcctctaggcaacggtacatatgttgcactgcaaaacaaaacacgctaaygttgcataatgaagtggttcccaggatttagcagattaagcgccacgtcgtgttttaaaatttatttatttagtttggagacggagtcttattctgttgcccagtctggagtacagtggtgcgatctcagctcactgcagcctccgccttccaggctcaagtgattctcctgcctcaccctcccaagtagctgggattacacaggtgcctgctacgacatccagctacttttttatttttagtagagatggcatttcaccatgttggccaggctggtcttgaacttctagccttaagtgatccagccacctcagcctcccagagtgctggaattacaggtgtgagccaccatgcccagccaagctaattttttttaacttttagtagagacagggtttcaccatattgcctgggctggtcttgaactcctgacctcaagttatccacctgccttggcctcccaaaatgcccatgcctggctccatgttgcttttaaatttttaatttttttaaagtactcctttcctacaacttaattgtggcatgcattttcacctactatctgaggtgggtcactagattaggtccctggttcccaactcctgagggttccaatattttcccactggtaaaatctctattatgaggcagccccatcccccaaaattcagattgtctccattttcgttattatctaataagaaagtgacttattttcagggccacgtcttacatcagtcttagctgttaccattttgatttgtgttgtttcatacagctggggatgtggagtgtagagatcttgatcaccctggcctccatacaggagaagagtatgtttttgaaaagttctaaggccggatgcagtggctcgcgcctgtaatcccagcactttgggaggctgaggcaggtggatcacctgaggtcaggagttcaagaccagcctggccatcatagtgaaaccccatctctactaaaaatacaaaaattagctgggcatggtggcagatgcctgtaatccgagctacttgggaggctgaggcaggagaatcrcttgaacttgggaggcagaggttgcagtgagccgagatggcgccactgcactccagcctggacgacaagagtgaaattccatctcagaagaaaaaaaaagagttctagtagactggatcaatagaaattttagtatgatgtagttaaaataattcaaaatcaaaatgttgctacttacatagcataactgaatttggagctagaaaaaggcaattttaaaagactaytaataataataggagagataaatctacccatagacaattataacatttctgtgccaagtccagagccaacagaaaacatcagaatcttttagtcttataaaaactctgcaaaccagcatgtttatgttagtgttcttgctagtttaattttctttcttttttaaaaaaaaattattttaggttcagcggtactcatataggtttgttatataggtaaactcgtgtcatgggggtttattatacagagtatttcatgacccaggtacwaagcctagtacccaaaagttatttttttctactcctctccctcctcccactctccaccctcaggtaggccccagtgtctgttgttcccctctctgtgtccatgtattctcataatttagctcccacttctacgtgagaacatgcaatatttggtttctattcctgtgttagtttgctaaggataatggcctccagctccattcatgttccttcaaaggacatgatctcattcttttttatggctgcatggtattccatggtgtatatgtaccacattttctttatccagtctaccattgatgggcatttaggttgattccatgtcttggctattgtgaatactgctgtagtgaacatatgtgtgtatgtgtgtttatgatgaaacaatttatattcttttgggtatatacccaataatggrattgccgggtcacattgtagttctgtttttagctctttgaggaattgccacagtgctttccacagtggctggaccagtttgcactcccaccaacagtttgtaagcattcccttttctctgcaacctggccagcatctgttattttttggctttttaataatcgccattctgactggtgtgagaaggtatctcattgtggttttcatttgcatttctctaatgattggtgatattgagcattttttcatatgcttcttggccacacatatgtctacttttgagaagtgtccatgtccttgcctactttttaatggggttgtttataattttcttattaaaatgattttccctcatttttgctggaaatttcgaagtgttgtagtctctatttctgcttatcaatactctatgttgatcataattgtatatgttttttctcagtgattgagaatcttggattgattatgatttggaacccaggttaacaatgtaatttagtgttagcagtcttaagggcaatgcagctaaattttatgtatccaaaaacacatcataggaactgtttctgaaataattctcactctcagcgtagtttttcataatgtttttatgatagtggaattgtttttactgaaagtgaaatttaacaaaagataccatttatgtgaaggttcttataagtagaggttactgtaggtcatctatacaattgttggcattgactacaaaaaatgattattaggttagcattttttggatattagaatcaagtatgttatgaactcagacttttgatgctgcactttattcttcttgttttttcctgaaacagtatacagaagatgaagctaggaaaataggagtggttggctgggtgaagaataccagcaaaggcaccgtgacaggccaagtgcaggggccagaagacaaagtcaattccatgtgagtagtaaaattaataacatgtacatgaaatttatgaggctgctgttttttagttttttaagacatggtcttgctctgttgcccaggttggagtgcagtggcacaatctcggctcactacaacctctgccttccaggctcagatctccccgactcagcctcccaagtagctgggactacaggtgtgagccaccgtgcctggccttatraggctactttaatgtttcattggacagtaagaatagtattgatggaccagattttgtttgtagattacaatcaaactaatatgtttgtaggcaggcctgtgaagaaattctcagagttgggagtagcatttctatgtttaggaatggacttcccacttgggctggcctcgagaagaattgtggcttccctctccaatytgtatgtcctgtggcatctcctccagcgttagggagatgtccagggcccaagtaattctcatttgaagtgttgtgacagatgcgtagtgccttargatggttcgtgaagttcttagggtagcgttccaggcaaaaagattgccatctcctttttrcagttaagtgctttatttatctaattgtaattttatttttcctgccaatgagagtgtgtttaatgagctggagggttaccaaactatgaatccttgaagtccaagagaggccagattcagtaatatggggaaaaatgtcctgtgtacacaatgacrttttcaaaagccttgtgttttcagcttcataatttccactgctctttgtagtcttttttcttttaaattaaaaaatagctaacatttattgagcatttacatgttgggcaatatgctaagtaccttgtatgaattatctcaatcttcacaacagatcttatgaggtaggtactaagtaacactcaatttattttattgtttgcaatttatctttgttttcattacttaatatttttagatttccaaagcaataggttttgcttattgtaataagtgaagtaacgtaacactgagaagtataaaggtaaaacttgtaatgtgtacttttctgtctatttccctcccctttattaacctctgacaaggaatactttctacagctttctctttcacttaaaaatagttaagtatgcatttgtaattaaggttttgctgatttttaccgaaatagaataccttgtgcatatttttccataatttgtatttttattttctggacatttcagtaaacagtaaatatataattatcaactccttatttttctaattttaaatgtttacgtgcatacttgtgtttgtgtgtaaaactacacctcaaattgaaaagtggggtccaaaagttcagtttcacaaactgtggggtgacagttaatgaaaaacaatatttttaagtagaattgtcacaaaatgtacaagaaattttgggactttcgttgtacagaactgatagttcaatggaagagaaaatgccaaatgattgtgtggaagttttaaagtagagattatgtcccatgattcgagggagcctagaaaaaaataataatatagtttttaaaaacggggagtatgtggaagatagaagctcataccaatcatgtcatattcctaatccacattatagagggtcattgattaatttgcttaacataaatgaaatcgtatcatacactgtgctcatgttttcttttcaacccctgcattctccacccttcttaagtaacctgtgttagcaagctagtgtgtattcttctgcttgtctccatgttcacattctctctctcacacacrcacacacacacacacttgcacacacacacttttatggattttgttcaatatttgctttttaaaaatgggatcacggtgtattcccttctctgcatcttactttatcactcaaagatacatccaggaaaatcctttcaagtcgaatggtaatctctaattcattctttttattggctacttaatattccacaatatatagatttattattaccttattgctggaaatgcatttttttctgtcttgttttttgcaataagagcaatgctgcaataaaattttattggtgattttattttgattgcataggttcccaggagtgtgatttgttggttgaagtggctrtgtatttttaatgtaaaaatatttgtcagactgctttacaaaacagctgtaaacaatttacattgttttcctcctcatcctgtcagcaattggtattgtactctctaatttttcttttacctgattggttgtgagtgattattattttttgctgtaatttgcatttctctaatgactagtaagttggagcatctttatgcttatgtctgtgaatttgttctcatgaactcccttttcacatcctttacccatttttctatcgagttgcttgtctcttgccaatttttaaaagctctttgtatattggttatggttactaacccattatctgttattgcttttgcaggtattttcccaaatctataatttgcctattggtttcgtctatgatagctttgcaacataaattgtttttcatttttattaactcaaatatggctatttttttctctctggttaagaaacagattgtaagtgttgtcgcccaggttttcttctaacttgatgctctatttattacatttaagcatttactccatctggaatttgttttttatttaaaagatgagatattggaccaactattttctaccagatgaatagccagttgtcctggcgccacttactaaataatcactctttcccccattgcattgaaatacatttttgtcatacgttaaaatctcatataractggattttatttctgaattctctattctgttccactgatctatttctctgttcctacatcagtataccatattgatttaattatactatctccacagtatatttcctctcactgttctttttgattcttttatttgctttcttgggcatttgtttcctctcttaactttaagatacttttacctatttaactggaattctattctgtttattaaaaagaaaacttacatgattgtgtcacacatatgcttttaagataaactttatgtatttatttattttttgagacaagggtcttgctctctctcctaggctggagtgcagtggtctgatctagactcactgcagccttgaccttctgggctcaagtgatcttcccacgtcaacctcctgagtgcacatgctggctaatttgtgtgtgtgtgtgtgtgtgtgtgtgtgtatattttgttgttgttgttgttgttgttgttgttgttgctttgtagagatagtgtctcactatgttgctcaggctggtataggactcttggcttcaaatgactttcctgcctcagcctcccaaagtgctgggattacaaaaataaactttatttttgagaacagttttatatttacagaaaaattgtgaagatagtacagagactttccatatactccccacacagttttcctcctattaacattttacattaatatgatacgtatgttaacaattaatggaccaatatggatacattagtattaactaaaatccctatttatttagatttcaatttttacctaatgtccattttatgtcttaggatcccattattgtatttgctttttaattgggcattctcttgaaattaagagaagtgacattttggctgggtgcagtggctcatgcctgtaatcccagcacttcgggaggctgaggcgggcggatcacttgaggtcaggagttcaagaccagcctgtccaacacagcgagatcgtgtctctacaaaaaatacaaaaactagctggggttggtggcacacgcctgttgtcccagctacttgggaggctgaggcaagagaatcgcttgagtctgggaggcagaggttgcaatgagatgagattgcaccaccgcactccagtctgggcaatgggagtagcctgtcccaaaaaaaataaaataaaataaaaataaagacagaagtgacatttttatgatattaaatcttcccatttaagaacacacagatgttgttccatttgcttagattttaaaatttatccttcagtatgattttatggttttctttatataggtttttgtacttttcttgctaagttatttctaagtatcttaatgactttttcactattgcatatggatttctttcccatttatgcttctagttgttcatgcttaaatatggaatatctaatgacttttgtgtattaattagatatcatagtattaccttatcagatattcttattaattctatcagttttttaaaaaactatagtctattgggtttttaaaaaatacagttatgcaattagtaaaaatggtgtatctttgtttcagtgacttcatttgtcagacctgccatgacaatgttgaataataatagccatagcaggcatgcctgtttggtttctgactttatttaaaatagttttattgtttcacctagtaaaaagatgtttgctgttggttttaggtaaatatactttatcacaataaattttacttttgcattccttgaattagcctttgattggttacagtgtgttattcttttaaattattgctgaattgccaagtattgcttgccaatattttatttagaacttttgtatatatataagtcacgtaaggtttttgttttgttttgttttgttttggkggagtctcgctttgttgcccacgctggagtgcaatggtacgatcttggcttacttcaacctctgcctcctgggttcaagcaattcttctgcctcagcctcccgagtagctgggattacaggcatatgccaccactcccagctaatttttgtatttttagtagagacagggtttcaccatattcgccaggctggcctcgaactcctgacctcatgatctgcctgtctcggcctcccaaaatgctgggattacaggcatgagccaccatacccagccggtttttttttttttttttttttttgggggggggggtattctatcatgttttgattttaaagttttattggcttcacaaaacatattaggaagttttccatccttctcttcattctggaataactaaaatatcagaattactgttcttaggttagtggaaacaaattaggaaatcacctggtcctgctgccttctcaatgttgacctttaaccaccttttcaatctaccctgtggtaactggtatgtttgttttttgagaaaacgttttgctctgtcacccaagctggagtgcaatggcacaatcacagctcactgcagccttgacctgctgggtttaagtgatgcttccatctcagccacccaagtagctaggaatacaggtatgcaccaccatgtccaactaatttttaaaaatttttttgtggaggtgaggtctcattacgttgcccaggctggtgttgaacttctgagctcaaacgatcctcctgcctcggcctcccaaagtgctaggattacaggtgtgagccactgcacccagcaagtaactgatatagttgagttttccagatgttcttggattcctttttattttgctaggaaattatccaatttttctaggttttcaaatttgttgcgataaattttataatttaaaaaatctcggccggtgcggtggctcacgcctgtaaccccagcactctgggaggctgaggtgggcagattatgaggtcaggagtttgagaccagcctggccaacatggtgaaaccccgtctctactaaaaatacaaaaattagccaggcgtggtggtacacacctgtaatcccagctactkgggaggctgaagcaggagaatcgcttgaacccaggagccagaggttgcagtgagccaagatcatgccactgcactctagcctgggctccagagcaagactctgtctcaaaaaaaaaaaaaaaaaatctcttttgcatctgtgcttatatgccctttgaaaattcctaatcttgtagaacttcattttctcctcctttttccttaatcaagctctgacagaatttatctacttaattggtatatttttaaaaaacagcttttagatttattgattataatttttgggagggttacatttcattaatttcaacttccatctttattaatttcctcttctttctttgtttgttgctcctctaagtcttcaacatgagtcctagttgccgttgtttttagttttttaaagttaataatraaggtgattaggcattttctcctgaatacagtttttttcttttccattggttttggtagtaattgttccttccttgctttctggatagtttgtaatttcattttttatttcttctttgaactaatactgtaactaatgggattctgagtttgtgtttgtaaaattcccagttaaaacttttaaagtaattgtttattatttatttctatttttatttgattataatctgagaacgaggcctagaagatttctacttaaaaaattttgttaaatccttgtgataaatgacatgatatattttggattgatcagctaggatctatgattaaattaggatgctttaggctgcaagtaacaggatacctgattaaagtgcttgaatgaaggaactgatttttcccactttccaaacaggctggggcaagcagtcctaggattagttcagtgtgcgaaagattattaaaatgtacattttggtgttgctatacttttctctttttatatttttttatgatgggattttcaaacacatacatgaatagagaaaaaaggacagtgaagctcatgtgcccattacccactttcaataacagtatgctttcagacattcttgtttcatatattcctccaactttttttttgtcattgttagagtatttaaagcaaatttccggcattatattattcacctgtaaatttggtcaaatgatattaaactatcaatacttgacaatattttaatctataaaacaacaatttcatgttgttcaatctaatgtttgactatatacagaaaacagaaactctatatatccatcaatatgtattccaaatcccacacagatctatgtgcaaatgtcaaagtgcatcacacaacctgtctgtcatgctttttcctggaggcctgtcttccagtctgggtctgggtttgctacacaactgtcactctggtgttgctcttcgctgctttcctgtagagcaggctcctgtgtccttaatcatatgttttaatcattcttgatttattctcttattttgcagaaacataattctctataagcttccgaaggaaaggtgcatgagaggcaaaaagtttgcatctctgcatgccttcatttacccttgtgcttgactgattgacttacaaaattctatgccaaaaataatctcacactaagaattttgaaggcatagttccataacttacagtgttgctgttgagaggtttgatgtcattcgaatacaaaggattgggagttatacctgtttattccctcagaaagtttgtcagatattccacttatctctcttctccattttcacaaccatctgcctttgtgcatgttttaattttgctgtaaatgcacttggaggagaatgttttttctttgacaatttccttccctatctcttttggaccctcttcttttagaacttctgtatggacctgatcctctatttttttttttttttattacagactggattttaccctgttggccagtctggtcttgaacccctggcctcaagtgatccgcctgccatggcctcccaaagtgctgggattacaggtgtgagccaccatgcccggcccctgattttaaacttttctcacctagtttccatttgttattatgtgggaaattagctcaactttgtcttccaacctttctattatttttgtttgtttctgctgctctatcttaattgtttctctttcatagcatctcattcttgttgttgttttccccaaatctctctgaggatattatgtgtatctttcttttcaaagtattcttctgatttttgcattgtctctttttttttttttgagacagagtcttgctctgttgcccaggctagagtgcagtggcatgatctcgcctcactgcaacctccacctcccaggttcaagcagttctcctgcctcagcctcctgagtagcagggattacaggcatccaccaccacacccagctaatttttgtatttttagtagagatggaggtttcaccatgttggccaggctggtctcaaactcctgacctcaggtgatctgccagcctcagcctcccaaagtgctgggattataggtgtgagccaccgtgcctggctgctttttgcattgtttctatttcttctaagttacttttcttttctttctcttcttctttccatttttctcctgtttgcttgttttgcttatcttttatattgccggctttccttacaatcatattttcagtaacttagtcatacataaatcaaaacagccaacaataagcaggacttaaggaaattttccaatatgtagacttatgggcttgaggaatggtggtgactgggtggggaactggcatttttgttagtgaatctccaaatgtcagatctatgcgttctgtcttctgcagtggtgtctccaaatcctgagtcttctktgaggtccatgggggtaagctgacttgcttctcattatttctgtaggcacttagtctgtaacatcctttggtttactgtatagttactccttctccacttgctttccttctttctttttgtttttaggcaggatcttgctctgttgcccaggctggagtgcggtggctcagtcatagctcactgcagccttgatctcctgggctcaagtgatcctcttacctcagcctcccgagtagctaggactgcaggtgtgcaccaccatacctagctaattttttaattttttgtagagacagggtcctactatgttgtctatgctggtcttcaactcctggcctcaagtgatccttctgcctcggcttcccaaagtgttgggattacaggcgtgagttaccacacctggcccctctgttttcctactaattatttgttgaaacctcttgtttaggttatagttttgtaccagctaggaatattttcagctataagttaacagaaaactggacttaaaaatggatataaaaaaagggttcatttttctcagtaataagaagtttggaggcagatrgttactggccttagttcagtagctcaataatgtctggaccaatgtctctgtggttgtcttggccttttcctcatggtcaaaaaaggaaaagtgcagctgcacatgatatccacagttaaggcaggaacgagtaaaggattgtgttgcttttcctgacccrccccaaacagatatctacttgtgttccattggctcaaatagggtcatatggttactccttgctacaagggagactgagaaattggcttggttttttgatgccctgaaaaaaaaattctcttggccaggaagaaggggatggggatgggtgtatactaggtagtcaatgaacaakctgttacatctttcatattttgatgctatcattttaatggggcttcaggtgaaagaagatagacatgccatgtgtaattgcatggtgaaaattaagcgagaaaatccatatgaagcacttagtgcagtgcctggcatgtagtaataatcaataaatatttgctactatgttatgacccatatgctccactttgtacatgttgtctcgtggcagttggaatgatcaggtggagatgccactaggctcctagataaatgggtcatccctgcagagaaattgggctagagaaattaatttggttgtcatcagtatgtggatagtgtttgaagccacatacatggatgggattatccagggagaagttgtgtaatgacaagcaagcaggaagaagacactggagaatgtaaattaagcttaaccaacattataagttgtgatgttacatgtttaggttttaaaaaatgaatttattcctctagtgcaatatattaaggtactgaattatcaagaaattgaatcacaataagagatgttgcaaaaatagttgcaaagtcagactcagtgtggcacatttgtagctatatattaggttggtgcaagagtaatggcaaaaaccgcaattacttttgcaccaacctaatagtgccagtccaggaacggtggctcacacctgtaatcccaacactttgaggggtgaggtgggtggmttgcttgagctcaagaattcgtgaccagcctgggcawcatgatgaaaccccatcagtacaaaaaacacaaaaattagcygggcatgggccttactttcttatagctatttttaaaaagagaaaaatttttwaaaatgcaatgacagtaagttgcagaaatctgaattaaattgcctttaaaaaaaccacatttgtttcttcccaggccatgaaaatgtggaatacaacrgggaccatcatttagagatggcctggctgtgattatagcagccctgctctgtctttactaacaagccagcagcatgtaagaacacactgtggatgtgtgtgttttcttcttctgtgttttattttctcaaaaagaatgactgatgactttcttttgcaaattgtactatattattccaattgcagtggtaagttctgccaacattttttgatgcataaggactgttttgaatctattgttttattatgtctttttttttgcaaaattaagaatattttctgtttcttagtaatcatgttaaattaatgtacagtgttatgacactgagcataagcctttgaataagtcctcagaaaatatattttccataaagactcaatggtagttttgtaaaataaaacacttgtatttggagatagccaaattctaaaattaaaattacatcttgattgctacatattttttaaaccgtatgttatgtatcagtcctctgcacttcaaaggattattaaaggactggtatatgtatataagaggatgatgaaatggttacatggcctggaaaactatgtcataatacaaggaatgcttgaaggcattggggaatttagctggagaaaaaatacttgaaatcatgatagcttccttcaagtatttgaagggctgatacataggaaagggtaaatgttctctctttttccagaaggcaataatcttgattggagccatgggtgaatttgctgaatttgcttatttcagctgaccctgacaacaagttttcctgtaaagtcattaaatgtatataatggtggaattttatcaatacctaggagtagtctagatcagggattggcaacccacggcctgttttgcaagtttagtaaatgaagttttattggagcacagccacacccatttatttatgttttggctatgactgcttttgtggtacatgggcagagtggagttgttacaacaaagactggatggcctcaaagcctgaactatttaccatctggccttctacagaaaagggtttgctgctcactgtataacagctgtcagacaagccgagggtgttgtaggtctaactcatcaaatggtatgttagactagatgtcctctgaggtcctgtccagctaagattctgtgtttcttttttgtttgtttgtttgttttttaagacagagtttcgccttgtggcccaggctggagtgcagtgccctgatactcggctcattgtagtctctgcctcctgggttcaagcagttctcctgcctcagcctcctgagtagctgagattacaggcgtgggccaccatacgcagctaatttttgtatttttagtagagatggggtttcaccatgttgtccacgctggtctccaattcctgacctggggtgatcggcccatctcggcctcccaaagtgctgggattgcgggtgtgagccacggcgcttggctagattctgcgtttctttctttyttttttttttttttgtgagacggagtcttgctctgtcgcccaggctagagggcagtggtgcaatcttggctgactgcaagctccgcctcccgggttcataccattctcctgcctcagcctcccgagtagctgggactacaggcgcccactaccacgcccggctaattttttgtatttttagtagagacggggtttcactgttttagccaggatggtctcgatctcctgacctcgtgatccgcccacctcggcctcccaaagtgctgggattacaggggtgagccaccgcgcccggcagattctgtgtttctatacagagctgatgattgcgcatgtacttaaaatgtgttcatagttcaagagttagaattagaatagagatactcactaatagagttgtgtttacctcttccatagatattaatacttgacatttgtgtgaaatatgaaatttgaacacctttctgccttaactatgaattgacatttttttgagtttccagttgtgacaatggtaaattgaaatgcaacaatggattttgtgaacaattaggtggtgtcagattcaaagttatttaatattttcaaaaataacttttctccagcagaccattagtggcatgaatgtctgtgcaaccagagtggctagcttttccttgctttttcatctgagtatttcaaggtactttgctaatatttttatactttattcatcaagttcctttttacacaaatagacagggttattaagaaaggttccattggatgttctattgaaacatagaaggtatttttttaggggaacaaaattcactgaggagctgtaattttggaaaaagaatagtttagtctaattgatataaattactctaatggaaaactaggaacatgaaaaatatctacagtagagttggaattctaacaccaggctttagacctcaaatactaaatcatttattttcctttagaacataaccgatctatattaaaatgacttaagggtatagtttttactttaaagttcatattttatatatgtgcatttagtaaggtaatcatatttaataaaagaaatgcataatgcagtactaattactttttatctttttttctttaatcagctttctcaggtagcaactaattacttaaaaaaattaatagactttcttttttagagcagctttaggtttgcagaaaaattgagtggaaactacagagagtttccatatatttcctcacacccaattccctaggtccctcagtttcccccattattaacatcttgcattatgtagtatatttgttacaattgatgagccaatattgatatattattaataactaagctgataggttacattagggttgactcttttttttttttttttttttykaggcagagttttgctctgttcccaggctgctgtgtaatggcatggtcatagctcactataaccttggactcctgggctcaagtgatmctcctgcctcagcctcctgagtagctgggactaaaaacacgtacatgatgctcagctaatttttttattctttattttttgtagagatgggatctcgctatgtttcccgggctggtctcaaagtcctgggctcaagcagtcttctcacctcagcttcccaaagtgctgggaytactggcatgagccactgtgcctgtccagagttcacttgtgatgttgtacattctactggttttgataaatgtatgatggcatgtgtctaccattatagtatcacagagaattgttccactacactaaaaatcccatgtgctctgcttattcatccctccttctctccctctagcccctgacaaccactgatgtctttactgtctccctagttttgctttgcccagaatgttatatagatggaataatatagtatatattttcacattggcttcattcacttagatacatgtctttaaggttccttcatgtatttttatggcttgacatttcatttcttcttattgctgaatactattttattgtttgggtgtgccacaagttgtttatatattcacttattgagagacaccttggttgcttccaaatttgttattttattaatttttttagagatagggtctttctgtgttgcccaggctggtctcaaaacctggccttaagtgagcctcccacctcagcctttcaagtagctggtattacaggctcaagccaccatgctcagctggtttcttccaagttttgtcaattatgagactgattacttttttaaaaatgtattttttcaaaattataatcatatataattatagggtacacagttttccccctatgttttcttatagtatgtttttaaaatcagtttcaggtcttgtgtttaagtctttaatccatttcgagttgtgttttgtatatggtgtgacataagggtcaaatctcactcttctgcatgtggatgtccagttttcccattattctttattgaagagactgtctttgccccatcgtgtgttcttggaacctttggaaaaaaaaaaatcagttgactgtaaatatgtgggtttatttctgggctctctatcctgttccattggatgatgtttctatttttatgtcagtaccatgctgttttaattactacagctttgtaatatagtttgaagtcaggtagaatgttgcctccagctttgttctttttgctcaaattgcctgggctacttagggttttttttttttttttttcatgtgtgtgtggttctatataaatttcaaaataactttttctatttctgtgaaaaatgtcattgaaatgttaatagggattgcattgaagctgaaggtcattttgggtagtgtggacttttttttttttctttttttttttgagacagagtctcgctctgtcacccaggctggagtgcagtggcgtgatctcggctcactgcaagctctgcctcctgggttcacaccattctcctgcctcagcctctcgagtgcctgggactacaggtgcctgccaccacacccggctaattttttgcattttttagtagagatgaggtttcactgagttagccaraatggtctcaatctcctgacctcgtgatctgcctgcctcggcctcccaaagtgctgggattataggcatgagccaccgcacctggcccgtagttggactttttaacaatattaattcttccaatccatgaacgtggaatatccttatatttatttatgtcttcttcaatttctttaatcaatgttatatttttcagtgtacagagctttcatctcattggttaaacttattctcctaaggtttttttttttgatggctgttgtaaatgagactgttttctatatttctttagatagtctgttgctagtgtataggaatgctactgatttttgcgtgttgactttgtattcttcaactttactatttatcacttctaacagttttttggtagagtctttatggtttttgtcatcagcaaacagtgacaattttaagtttttcctttcctatttgaatgccttttacttctttctcttacataattgctccacaaggacatccagtactacattaaatagaaatgatgagagtgggcatcctggtcttgttcctgatcttagagaaaaagttttccatttttcaccattgtgtgtaatgtttgctgtgggcttttcatatatggcctttattatgttgatatacatttcttctatactaatttattagtgaaagsatgttgaattttatcagatgccttttctgcatctaatgtggtgatcatatagtatttgtccttcattctgttaatatggtgttctccatttatagatttgcatgtgttgaatcatctttgtatccctgggataaattccacttgatcatggtgaatgatccttttaatgtgctgttgaatttggcttattcgtattttgttgaggatttttgcatctatgttcatcagggatattggcctgtaattttcttttctcataatgttcttgtctggctttggtatcaaggtaatgctaacctcataaaaagagttcaaaagtattacatcctcttcgattttttggaagagttcaaaaaggattgatattagtttaaatgtttggcagaattcatcagtaacacttccagtcttgggcttttctttgatgggaaagtttgtattattgatttagtctttttgaattaccaattcaattattattggtctgttcagattttctatatcttcttgatttagtattggtaggttatatgtggtaggataaattctaggaatatatccatttcttctagattattcaatttattggcatatggttgtttgttcgtactaatctttatgattctttgtattctgtggtataaatcacagtgtctcctcttttatttctcattttatttatttgaatcttttcacttttttttctaggttaacctaactgtaggtttgtcgattttgtttatcttttcaagaaaccactgctggtttcattgatttttcttctattgtttttctagtctctattttatttatttttgccctgatctttgtcatttttttccttctgctacatttaggctttttctttttctgcttccttgaggtataacataatattatttgtgatatttattcttttctgatagactgcaggggtccccaacccttgtgacctgttaggaactggaccacacagcaggaggtgagtggcagtaccacctgagctccacttcctgccagatcagtggcagcattagagtcttatagcasagcgaaccctattgtgaactgcgcatgcgagggatacaggttgttcactcttcatgagaatctaactaatgcctgatgatctgaggtggaacagtttcatcctgaaaccctacctgcttccttcctgtcttccaccaaactggtccctggtgcatagagccatttattgctataaatttccctcttagaattgcttttgctgcatcccataagttttggtatgtgttgtgttttcatttttgtctcaagatatttttaaatttcgcttttgatttcttctttgactcattggttgtttagtaacatgttaatttccacatatttgtgaattttccaagatttctcctgttactgagtcctagtttcatagcattattatcagagaagatacttgaaattatttcacttctcttaaatttgtccagactagttttgtggcctaacatatataataaaggtatatatttttcatttattaaacaattatatatttgataccttttatatatgccaggcactgtttttggtacctgacctagagaaagttccatgtgctcttgagaagaatctgtattctgttgctgttggatggaaaattctacatatgtctgttaggtccatttggtctaaagtgtagctcaagttcaatatttgcttattaattttgtttattttttatgtaatcttaaagtttacctacaatataaaaactttagcatgaaatatatatatattttatttaagttccaggatacatgtgcagaatgtgcaggtttgttacataggtaaacgtgtgccatggtggtttgctgtacctatcaacctatcacctaggtattaagccccgcatgcattagctatttatcctgatgctctccctcccctgctccccaacaagccccagtgtgtgttgttcctctccctgtgttcatgtgttcttattattcagctcccacttacaagtgagaacatgcagtgtttggttttctgttcctgtgttagtgtgctgaggataatggcttccaggtccatccacgtccctgcaaaggacatgagttcatttctttttatggctgcatagtattccatagtgtagacgagcatgaaatattttcattttcttatttatgtattcatttttattttttgagatggaatcttgctctgtcatccaggctgtagtgcaggggtatgatctcggctcactgcaacctccacctcccgggttcaagcaattcttcctgcctcagcctcccaagtagttgggattacaggcacctgccacccatgcctacctaatttttgtagtgttagtagaaatgcggtttcaccatgttggctaggctggtcttgaactcctgacctcaggtgatccacccgcctcggcctcccaaagtgctgggatttacaggcatgacccactgtgcctggtctgagcatgaaatattttaaataaatattttttaaaaaggtatctcaattttccaaaaacttgaaatctattttagtttaccagtacaaaataaatgtgatttaaaaaaaaaatttacacaagatttacatggttgtcctaaaatttaaatgatgtggatttatgtggagtaaaagatgtaagttctttctgtcctcttaataccatagtcctatacattttttcctatgcatgtaacatgtatatatattgaaaatacatgtaatataatcccttattattttaaaaaaacctatacattcccatgtagttacatttatctctgtcatttgtgaagatgggatcatgccacacatattattctgcaacttaaaaaaatttcactgtattgtatattgtggatatcttttgatggcagtgagtgttcttttaaatcactgcagaatattcagatttatagacaaattataatttatttaatcattcatctattactgggcattcagctttctgcagtttttttgctattatgaatctcgttgcagtgagtatccttgtatacataatatgtgtatctttttcatttattaaacaattatatatttgataccttttatatatgccaggcactgttttaggtactagaattcagcagtgaccaagaaataaggtttaatttcttgtgtgggaagacccacaataaagaaacaataaacaagatacaagatactttcaaatagtagtaagtgccgtgaaggcaataaataaggtcttgcagaagagagtggtggttttccaattctagatggggtaatcagggaarggctttccatggaggtgacttctaagctaagagatgcatggtgaagaggaggctgtcagtgcaragggtctgggaagagctttctgtgcagaggcaacagcaaacagccatgcaccagtgcaggtagtgggatcatctgcctggtgcaggcattatgggcacattgtatatagggaatttgaaaacaacaggaaaaccaactaaaagttggcctgcttttctttctttcttttattattattattatttttttgagatggaggctcactccagcgcccaggctggagtgcaatgacaggatctctgttcgctgcaacctctgcctcccaggttcaagcaattctcctgcttcagcctcccaagtagctggaattacaggcacccaccaccacgcccagttaactttgttttttttttttttttgtatttttagtagagacaaggtttcaccacattggccagcctggtcacgaattcctgacctcgggtgatccacctgcctcagccttccaaagtgctgggattaaaggcatgagccaccgtgcccggcctgcttttcttattttttttcctctttttgcccttattttatttttgtagagacggggtctcactgtgttgcccagcctgttgtcgaacttctggtttcaagcaatcctccagccttgacctctcaaagcactgggatgacaggcatgagccactgcacccagcacggtctgcttttgattatcaccatgcaccagcaattctaaccaataaaatactgtgccttatttccctcccgctccatgccactgacatgagatatgtgctattccccatatttttgaagtgttgattcctggatatgggtcaaaggctgtctgcaatttaaatttaaactttggattcacttttaattataaaaattatcaagtgtttttcaaaacatactgagtaaactaaggcctcgtggctgaggaagttttgctctcttctgtgcttttgtaagtaaaaaaattgtattgatttaagtaatttaagtgaatcaagccaattacaaaatattaagaaatggaaattaaataaaatcacccataaacctaccgtttgaaaacaaatttggacaatattttgatgcataatgcaagtttgtatttctcttyctcttttttggggcaagggtcagctaactaaacatttggtttgatattcttcagagttaggttgtaactctctatatatacatagttgtatatatactctctctatatagtatataggcttactactataaaaccatgtgttataggtttactactataaaaccactcctggttggcccttcgtctgtggcaggtacttttgactgggctgctaaagtcaagctccctgggctttaaaaaaaaaaaaatcctcaaaaatcagtcaataytgcctgagatcacctgttttaactccaataaggttctagagcaagcatctcattcggtcacgtgaaggtggcatacctgggtggtggtggaactcagttgcagaactgggcttcaaaaatattcataagtcagtgcttatattggattatgactttttaggatgcttttttttttttttttaatgagacagggtctgactatgttgcacaggctggtcttgaactcctgggctcaagcaatccacctgcctcggcctccaaaagtcctgagattacaggcatgagccaccgcacccagccaggatatttttgaatagttaaagtattttatcatgataatgttttcattcagtaaatgtttattatgtgtatttcgacgtccctctgctaggtgctaaggggcataagatgattaaaggggttgtgaaaagtccagtctaactggggtgagagaggtaggcaggtaaattagcacaggttggaagcacaggggtagagtttgggaatgaagctctggggcagcacagtgggaagagtgctcctcctgccttggggaacaggacaggccttgcctctccttctggcttcctctgtcactattcatctcgcaggcttttctgtcctctgccacaagtgctcttcctccctgaggacttttgcagaagttctttcctctgcctggaatggatgcttccttcttgtctccacgccttgctgattgctccccactctttcattccccacttgctgtgttgtagcccctcactgtgtgctctgcttcctgacatcatttagcacggctgctgtgaaaggatgacttgctggatattccccacctccccctcaagagaatgctttcagctgtaagtaacagaaaactgataaacaagtggctcgacaaatggtggtttattctcaaatatataggggactggaggtcagtagccactggtgcttgttgagctgtcatcagtgtcaggatcgtgtctgtaggattctcttgtcctttccctcawggttataagatggctgtcccagcttcaagtgcacccacactcaaggctgggggaagggatggctctgggtcttttcctttttatctggaaagcaaactctttcccagaagctggcagcacacttctatgtgtgtgctattgtccatccctggcagtaatcagctttttcagccactcataaggatgaaagggagaggggggagaggtattaagactagtgttgtgtttgccattcaacaatgccatctacacttctcaagactgtaagctccttaaaggcagggattgtctgtccttttcttctttgaattcccagtgccttgcacagtacctggcacatagagtgaatggtgacaagcatgtcagaaagagaaggtggaataaggacctttcaggagaagagaatgtcagatacgaaggcattgagctgaaagagccttcattgtgtttttgggaacatgtgactggaacataggcagatgacagactactggaaactgaaaagctctgcatatcatgtgaatttgtccttctgtcagcaatggggagtcgttgaaaagtttcaggccagggagtgacacaatagtatttgtgggttagattactgtgttgaaaatatgggctaagaactggaagaagggagattggaatcaaggagattaattaaccatatcatactgtggtttcatcaaagagagtaagaataatttggaagattggaaaatataattttaaaataacctagaacaatgatctcaaagtaggaccttggatcagtagcatcagcattacctggcaccttgttagaaacgtaaattcttggggtccacattgagcctactgaatccggagcccagggtaagttccagcagtgtgagttcataagccctccaggtgactgtgatccacatgaaagcttcagagccactaaactagagcaatggatgcttaagggtgaaagacagcttggagatcacccaatctgatacagccaatctgcatatcagaatcacctggggagcttttacatggcaactaaattgcccacacctcctactccacacagcagaacaactaaatcatgatcttgggggctgggacccgtgcatcaaattatttccaatgatctcaagtgtttccaatgagcagccaggtctgagtaccattggtcttatctaacccctattgatgggaaaactcaggattcaaagaggagttactcaagggcgtatagcaagctcaggtaagaactgggtccttgaatcaatttcataagctgtcatctccatgaatgccttaaacactatcccaactttttaatttttaaattatattaaaaacttttgtggctacatagtaggtatacatgttctatcctaactttttaatgatttgcctgaagataatcattcacggtgacaaatacaactgccaaatttttagaagaaaaataggttacagacattatgaaaaagtcagttctcttttacatgaacagtattacacactttaaaaagttatcctttttgtaaatattttgtaagaatacgtatttttaacaataatgaaaagaatatagatacaatagggtagagagtgctttgttatttgtgtgtataagtaataacccttttttcaaactctagatggagctctttggtttttatatattcttttatttataatttggtaagtctttgttttaaaagaagcagctattttgggatttttttaaaaacattaaaaattttataataagtattctcaacatttctcagctctccttttcttgttgtttcacaaccatatagattcttacttttttttgttattgttcaattgctggaccaaatccaaattcaggcctcagagagtcatttctcaaatgcatcttaaagttgtattttatctcacagtatttaacgaatgggataagtttcccatgtttattgtttgtaataggtctcaaagttgtaatagaatttgtgtaagatggacctccctttatgaataatgccaggagagaaagtctctgaggatattatagctgttgctatagtaattccttcagctatttttaccccactgtgtacaaaggagtgttaacagctaccttcttgtaacataaatgaaacattttgctgctgcttctttttcttttccgttttactagctcagtattctctcttctattggaagtgcacttggagcaaaattcccaaaatatgaggcctgttgtttttaatggtataagcctgtggtgtggttcctaggccagcagcagcaccatggatatcacctggaagtttgttagaaatgcagattctcggctcccaccctagacgtactgaatcagaaaccctggggatggggcccaacaatctgttttgaaaggctgttttgaaaggataaaaatcctgtactcaccggaacctacataaaaaaatttcctcctgtacaggccaggcatggtggctcacccccataatcccagcacttttggaggccagagggggaagattgtttgagcccaggagttggagaccagcctgggcaacatagggagatgcccatctcaacaacaacaaaaacaacaacaacaaaaaatcagaaagttagccgggcgttgtgatgcacacctgtggtcccagctgcttaggagactaaggtgggaggattgcttgagcctgagaagtcaaggctgcggtgaatcgtgatcaccgcaccccagtctggagccagagtgagaccctgtctcagaaaagaaaaagaaaaattactctgtacagtcacttttgctcgttttggatttgtccagtgcttttcaaatcacccagggcttttgttaaaaggaataattttcattcagtaagtttgaggtggagcctgatattctgcctctaacaaactcccaaacagtatggattttgcttgtccccggatcacattttgagtggtgaggccaaatagcacatagtaaggccataaccatgcctgcatgtgagttatctgtgatttatgtgtatatgcttttgatttagtatacctaaagtcagtttttccttttcaatcacagtgggaagagacaatttatagaatgtaatgctttcttgtctaattgtaagtgactcaatcatattaaatgctacaagagggtattgtttgccaggatctgtctctgagaccctctgttataatcagcagtggacacccttgaaaattacattatttaaaaaactgagactcattcatagcattatgaagtcagagagaaagtcctgaagtttgaagaagttttcagacaaaataatttcagacaaaaagaagtggttcataaatgtttgttatcggctgggggcggtggctcacgcccgtaatcccagcactttgggaggcctaggggggtggctcacccaagggcaggagtttgagaccagcctggccaatgtggtgaaaccccgccactactaaaaatacaaaaaattagccaggtgtgttggtggatgcctgtaatgtcagctactagggaggctgaggcaggagaatcgcttgaacccaggagacagaggtcgcagtgggccgagattgcaccattgcactccagcctggccaccaagagcaaaactctgtctcaaaaaaaaaaagttatcattcacttattatttactgagcatctgccgtggggagcattgtgctaggcactttaggaaatttttttaaaaaggataaagtccttgaccttgaggagataayagtctagctgaggcaataaaacttatgcctgtgaaagttaattaccaaaatagggagtattctgtcaaatggtaaagaagcgtggtagaatttcggaagaccaaaggatagctaatggctggtaaggctgaaagagggatctgattagggctttggagcatgtatagaacttagacattcagaggagagggaaggtgggggaatgctccatggaagagagatggcatgggtcagggtgaagcttctaggagtgaatcatggatgcacacaggaactggggagaagttcagatgacatgaatcttaacttcttgtctaggagccagataggtgaggatttaactgccaggcttttgagttttgacttagtcccttgtgcaccaaggaatcattgaagaatgctttcagctgggggcagggtgacccaatcataatgatgatttaggaggagtcattaatggaatattcaggatgaattcaaatgacagactggaggctgaaacacttgttggtaggcaccggcactgggtacatagggaagagagaagactgcaggaaatacagtaaggaagagaactggcaaagggacaatataaactgaaaatataaacagattaatgagaagttaagaaaaattaattcatatgaatggaaaccaggggtgtttgggaccacatttgtcctttwgaggtgcctcttgtggcaaacagygtttttttgttttgttatgtttttgtttttagttctgggatacatgtgcagaacgtgcaggtttcttagataggtatacatgtgccatggtggtttgctgcacctatcaacttatcatctagtttttaagccccacagccattaggtatttgtcctaatgctctccctcctcttgcccctcacccccgtgacaggcctgggtgtgtgatgttcccctccctgtgtcatgtgttctcattgttcagctcccgcttatgagtgagaacttgggatgtttrgttttctgttcctgtgttagtttgctgagaatgatggcttccagcttcatccatgtccctgcaaaggacatgaactcattcctttttatggctgtatagtattcaatggtgtatatgtgctatatttttttttatccagtctcttattgatgggcatttgggttggttccatgtctttgctattgcaagtagtgaaacagccttattttctaactaaccatcttggagacactgtatagactagttgatttcagtggcattaccttgctaacgatttgaagttgatatattatttcactcacatttacctttttggttttgtatctccttttagggtcctctgccttatttcctgcaatcatgaatatgttttgaatactgctagtcacaaattccaaagctggccattcattgttagttagtactttcagaacaattgtcttaaaattttagatctagaagggacctgagaggtcatctggtctgtctgtctgtctgtctctctctttctctgtgtgtgtgtctgtctctctctgtctctctctctttcactctctctctctctcwcwcwcacacacacacacacacacacacacacacacacacacattagagacaaccaaagtcttctaagacttgaggcaaaggaaagtacacttgaaggcaatactatatgatgccccatccatgttaagatggttcacagagctgatctgacctgatcattggtgccttagactggagaggagactgggtgccaggagagcaaaccagtcttcctgttagtttcttccctacccctgccccaagggaaagtcagtgcatcttggactctggatgaaggaatcttctggcggaaatctaaggagtttatatatatctattttaaatcaatgattaccggccattttacagagggttatctctctaaaagtcctagaaacccatgtaagcatattgaatcagagctattcagcctgacttgttgcagaaaacatactgccttaatccaccaaaacayacacatgtgacactgcattctaaaagtttgaagttttacattcagtttaaacaaccatccagcaatatcagaccctggtccattggcttagtggtgcctcattcttaatgctcttatctaggtgcagcctcaattactgcctggttagtcagtcaaggaaaccaaagtgtgtgcgctccacttgaccatggtgttgtcagagagcacccagagggccatgtagtctttgatacagcatgaggtgatgcatttgattattacctgtgtcctctgggcaagcatttattcattccacaaatattataaagtatctgctatatgtcaggcagagtgttgggaactgtggatacaaagatgagtaatacagtctctgccctcaaggacttgaggaaagatggatgggtagacacagaagaatgtgtatacagaatgaagtaagacatggaggatttgatccagaaaactcttgagactgaataaaggattttaacttttgtacaaactgagatcctcctgtttgccctgtcaatgccaaggcgacctacattcagatactgtgactttaaaaaaattgctcattatcatgtccacatctccagtttggctgacacatctgtccttgtgaaatatgccaagcacaggataagataatctctgaatttggacccagtcaagtgcttgagttcgatgccaagatggttaggctaccttgctactcaccttgaagatttctcataatgatggaaacttacttcaagattctatagcaatttggcttttgtatccccaccttccaagccccccacctccatttcttagtctcacatttgccaccccagttcgctggcaatgctcatctcacaaggctaacagatgcagctcacaagccaggagggcagcaggcaggccctcttgataaaggactcttaaaatttattttaatttttctttttttgtgtgaggtattttccagtgaaaaccagaaaacctgctggacaaattctgaaaaagctgtaacttttttttttttttaatgcttcaggcaattccatttgatctggccatcaccaaagctactggtaatccataggacccttcctcatgacggcatctatcgacctgtgaccttttgcctccagctcttactgaacaaaaaaagcacccagtgtatcaccactcatttcctcagcagtctgctatatttagtttgtcaaagtgtttttggatcttgattcagttatctaacatgttcattgtttctcctagctcatcaactgagaaatttgataaggatcatttctatatcattgtccaaataattgaggacagctttgaacagcacagggcccagtagcacagtctagacaacactctcctctgawacatttataatcatatctgaaaagatataatggtggcaatcttttggacactgtattacaaaaaatctcaaatccagagaaaagacagagaatagcgtaatacccacatttagatttcacagttgtagtatttttctatatttgtatcacaaatgttatatagatacagatttttttttctgatttggataaatttgctgtaagagacatttgggggaggaactactgaggcatttgaatatggcctgggtatgaaagaacgttaaggaattagtattatatttgttatgtgtgatatcatcatggttatgtaggaaagtgtctttattttttatagctgtatactgaagtatttgggtgaaatgttatgatatccataattttatttaaatactttgggcttttataaacaataattcagagggaagagagttgtgtaggagatatctaaagaggttcagagagaatggctaattgtttatcagtctgtgatggaattgttttgagtttggaatattttgataagttctaaataataagccagttttaaaaaattaccacataatatgaaagacagaagtcttcatcctgttcttgggcccagtgccaccccagagcctcattccatcccatttctccatcccaattattactgtcattttttataaaaattgcttctatattttgatgtacatttctcaaaactgttttgtcaaaatattcactttttccattgtcttcagacaaaaccactrtgtcaaatctgctgtgtccaggccaggcacagtggctcacacctgtaatcccagcactttggtaggttgaggtgagcagatcacttgaggtcaggagttcaagaccagcctggccaacatggtgaaaccacgtctctactaaaaaaataaaaaaatcacccaggcgtggtggtacaygcctgtaatcccagctacttgggaggctgagggaggagaatcactgaaaccgggaagcagaggttgcagtgagcagagatcacgacattgcactccagcctgggccacagaagcagactccgtctcaaaaccaaacaaaataaaatagaatagaataaaataaaataataaaataatctgctacatccaaatgtccaataaaggaaaaaagccacatgaaccgtgagttagaaaccataaaaagtaattggatattaccaagagaagtgttactaatataatttcagatacattacggggataatatttagacaggtrtagtagagccattattgttatatatcagctgagttattttaaaatagatatagtaatcattgaattaaagaaacccaatgaattttaaaaagagaaagagcagtgaaaatgaacatacagtatctcttgggaaaatgtaaaatggatgataaaacaggaagactgtagagggtgtattatagataacacattaattgtaattgtattagaaatagaattttaagcattgccattttctggatagctgaggatgacaaagtcaaaatttttagtgcatgctttcacttaaatggcctataaaatagacaactgaggtgaaacactggtaagatgagccaaagctttatttttggcgtcattttcctttaaacctgttgggatttgtaaagcttggttttcctgtccaaagaaccaatcaggagtgttacagaagaatttttctacctaaataattttgaacgctattctttctaaagtatgttagacttatcgcttacctttttccccacagaatggaagctatttagcagaggttggcctttttctgatgactccagtagatagtttcagcagtgaatcttccagggctaattagcatgtgtggtgccattggagttgcatgcttgcgttcttgggtcctggtgtgttgttcctctttgttaggtctgtctgattttgatctgtttctttgatgcttggagcacacccatgagagcctcccctatccccctttgacttcagtttcaaatttatggacattactgaaataaatacacacatgctcaccttcgtttggatcctacatcaaaaaatgtgataaacaatcctcagcctctagaatttttttttttaagagagaataggtcttgctatgttggccatgatggcctcatgcaaccctcctgccttgggttcccaaagtgctgagattacaggcatgatccacttcacctggccaacctctaggaatttgatgtaagtctagctactacctaccagccatatccatgtactctagacaacatttttgacaaacagtgcacaggaaaggcccatgaaacttacggttttttttccatcgagaaaaatattgccttctatttctataagttaattttatttttyaataattctaataattaatgaaataatacctggatgctaagagtcaaacagtgctaaaaatatttaaaaaccagcaactactgcctcttcaacccatcccatcccactcctcaacaatagttttagcgatttttttgagtattcctcctaatttcagattaactggtatctcttaaatcattaactttagatattatctggtgactttttaccgtgatagacaaatctattgatgtcctattatgatagatgaagatgtgactcttaaactagtctttccttccctcatttcctcattatgcttttatatgacttttggttaatgcatcagcagtcagtttttatatttttagaactatgtaagttgtgtcctaaggtgccctcaaggaggaatctggctccagttgttcatttcttctttttattttgagacagactctcactctgttgcccaggctggtgtgcagtggcgcgatcttggctcactgcaacctccacctcttgagttgaagtggttctcctgcctcagcctcccgagtagctgggattacaggtgtgtgtcaccatgcctggctcatttttgtattattagtagagacggggtttcaccatgttggccagcctggtctcgaactcacagcctcaagcagtctgcctgcctccgcctcccaaagtgctgggattacaggcatgagccaccacgcctggccagttcatttcttcttttagcgttttgtgacacttggtgatacttggttgccaataccaggtgatagaaaaactttacctccaaatcctgttgcagaaatttttcttaaaacagtttttttttttttttwaaatcacagaatagacacagtctcttaggcggttggaagtatattcacatctccagctagatgggaaaatcttgtgggcagggattgtaatatgactttgggattgtaatatgacttcgtaaagaacagggatttttaaaaggaaaggttaagatttggataggcaaaaggaaggaggatatgctttatacttttggtctcttgaccttatctgaaggcctggaactcctgtaatgaagtagttacacagtcaaaggtgggaggagggtctgttagcatccatctgcaggtctcagtaattctccactgcctgacacaatcacctcctcactgcccctgtgaggtgcagcgccatccaagtcaatcacagggaaatgccagggctcactttgtttatttactggagtggctggttgtactgggaggctatcaagactatcgggagggctcggcatttcatactctttgggctgccttctgtgtgtatgtgacagatcctgggccgggatctctgagccagagctcctctcaaggttaaccttgtacatccccctccccatatgtgatcagcaggggacaggctggagtgcgcaagccggagtgcacattcccaaaggttcacgctggccttccttcgtgtctgctgtccagccccaaatacgacccttttaatctcataaaactactcagaagggcttcaaacataaagaaatacagtccacagctttcctccccatactgaagatagcgaatggaatatgggaatgttatcggggggcgagctgttacccatccactaagagccctagttcctgatggccaaatgcatatcttctctattaagcaaatttatctgccaaaaagctgtgttatgccaaaaagttatgtccacaaatttaggacactatcttgtgtcgtttgtggttgtataagaatcacaatgtggcgttggttgctaaatacattattaacctgtttgagagcaactctgttgttttctttgctcatgaaggtcaattttcaccagtagaagcattacaaatttaacttgaggatcttagtttttttttcctgtaagagcttttttcacccctttcattagtaattctaaaaattttgaactggaaattttaataatagagtaagtaaatctaagcttctttggaagttgtacttgtcagttctatttttcggtgtcttaggaaacaagttaaaaacggctttttagttcttaatacatttctaattacagttctttctcctctttaaggggcttgcttttctttaaaaaggtgccgttttctttccctgtactaattggaatgttggttttaaaaattgatattcttgggttgggtgtggcggttcacacctgtaatcctaccactttaggaggttgagggaggaggatctcttgagcctagcagtgcaagatcagcctagtcaacatagggataccccatctctacaaaaataaaaaatacaattagccaaggatggtgggatgtgtctgtagtctcagctactcaggaggctgaggcaggaaggatcccttgaacccaggagtttgaggctgcagtgagctataattgtgccactgcacttcaacctgggtaacagagcgagaccctgtctctagaaaaataaaaattatattccttctaaccatggtcattaaaaaaatatgtatataaatatacacatgtatatatatttgcttgcaaagagacaaaagtcattacttaaggcaaagcttttaaaattgaagatgtttcatatgatcatgtgctttgtttatgaacacatttgtaccaactgaagtgttggccttggttgaatttccttcttttctccaaatcatcaaaactgatgaaatgtcaatcatgttgaccaatttttcacaacaatgtgtgtmacccatggcagtgaagggtgtgaagacaaatttagcttccacacctggagagggagcagtatgtggatgagtagaataaattgaactctactaatctcttttttcttttatttatttattattatrctttaagttctagggtacatgagcacaatgtgcaggtttgttacatatgtatacatgtgccatgttggttagctgcccaccacccactgacaggcccctgtgtgtgatgttccctgccctgtgtccatgtgttcttactgttccattcccacctatgagtgagaacatgtggtgtttggttttctgttcctgtgatagtttgctgagaataatgtttcccagcttcatccatgtccccgcagagaacatgaactcatcctttcttatggctgcatagtattccatggtgtatatgtgccacattttcttaatccactctatcattgatggacatttgggttggttctaagtctttgctattgtgaatagtgccgcaataaacatatgtgtgcatgtgtctttatagcagcatgttttataatcctttggttatatacccagtaatgggatcgttatgtcaaatggtatttctacttccaggtccttgaggaattgccacactgtcttccacaatggttgaactaatttacactcccaccaacgtgtaaaagcattcctatttctccacatcctctccagcatctgttgtttcctgacttcttaatgatcgccattctaactggtgtgagatggtatctcattgtggttttgatttgcatttctctgatgaccagtgatgatgagcattttttcatgtgtctgttggctgcataaatgtcttcttttgagaagtgtctgtttatatcctttgcccactttttgatggggttgtttttttcttgtaaatttgtttgagttctttgtagattctggatattagccctttgtcagatgggtagattgcaaaaattttctcccrttctgtaggttgccttttcactctgatggtagtttcttttgatgtgcagctctttagtttaattagatcccatttgtctatttcggcttttgttgccattgcttttggtgttttagtcatgaagtccttgcccatgcctatgtcctgaatggtattgtctaggtttttttctagggttttatggttttaggtctaacatttaagtctttagtccatcttgaattaatttttgtataaggtgtaaggaagggatccagtttcagctttctacatatggctagccagtttttccagcaccatttattaaatagagaatcctttccccattgcttgtttctgtcaggtttgtcaaagatcagatggttgtaggtgttatttctgaggcctctgttctgttccattggtatatatctctgttttggtaccagtaccatgctgttttggttactgcagccttgtagtgtagtttgaagtcaggtagtgtgatgcctccagctttgttcttttggcttaggattgtcttggcaatgcggactcttttttggttccatatgaactttaaagtagttttttccaatgctgtgaagaaagtcattggtagcttgatggagatggcattgaatctataaattaccttgggcagtatggctattttcacaatattgattcttcctatccatgagcatggaatgttcttccatttgtttgtgtcctcttttattttgttgagcagtgatttgtagttctccttgaagaggtccttcacatcccttgtaagttggattcctaggtattttattctctttgaagcaattgtgaatgggagttcactcatgatttgactgtttgttattggtgtagaggaatgcttgtgatttttgcacattgattttgtatcctgagactttgctgaagttgcttatcagcttaaggagattttgggctgagacgatggggttttctaaatatataatcatgtcatctgcaaatagggacaatttgacttcctcttttcctaattggataccctttatttctttttcttgcctgattgccctggccagaacttccgaccctatgttgaataggagtggtgagagagggcatccttgtcttgtgctggttttcaaagggaatgcttccagtttttgcccattcagtatgatattggctgtgggtttgttacaaatagctcttattattttgagatattttccatcaatacctagtttattgagagtttttagcatgaagggctgttgaattttgtcaaaggccttttctgcatctattgagataatcatgtggtttttgtctttggttctgtttatgtgatggattacatttattgatttgtgtatgttgaaccagccagccttgcatcccagggatgaagcctacttgatcgtggtggataagatttttgatgtgctgctggattctstttgccagtattttattgaggattttcacatcggtgttcatcaaggatattggtctaaaattctcttttttkgttgtgtcyctgccaggctttggtatcaggatgatgctggcctcatgaaatgagttagggaggattccctctttttctattgattagaatagtttcagaaggaatggtaccagctcttctttgtacctctggtagaatttggctgtgaatccgtctggtcctggasttttttttggttggtaggctatgaattattgcttcaatttcagagcctgttactggtcttttcagagattcaacatcttcctggtttagtcttgggagggtgtatgtgtcgaggaatttatccrtttcttctatattttctagtttatttgcatagaggtgtttttagtattctctgatggtagtttgtatttctgtgggatcggtggtgatatcccctttatcatttgttattgcgtctatttgattcttctctctttccttctttattagtcttgctagcggtctatcaattttgttgatcttttcaaaaaacaagctcctggattcattgatttttttgaagcattttttgtatctctatctccttcagttctgctctgatcttagttatttcttgccttctcctagtttttgaatttgttagctcttgcttctctagttcttttaattgtgatctcccaaagtgctgggattacaggcatgagccaccgtgcctggcctgtttttgcttttttactgtaaatttactgattatcaaactaatacatactgtggtagaaactgccagttatttcccagcatgcatctgtccccttttttctttagtaatagaaaccctgaacttgcgctsyacacatggtccctactatggtctgaatgtttgtatccctccaaaatcatatgttgaaatccgttccccagtgtgatggtattagggagtggggccttttggtagatgatcagatcataagggcagagctctcacaaatggggttagcacccttataataggccttggagagctctcacaccccctttaccatgtgaggatacattgaaggcaccatccatgaggaacaggcccttatcaggcactgaatctattggtgcctcaatcttggaattcctggcacccagaattgtgagcaatatgtttctgttgtttatataaagtacccagtctaaggtattttgtttagtagcccraactgactaagacatccccctagcataaggaccgtatttcttagcctgtttgaagcttgtatggccaccaatgagatgtgaatgaaaataatgcatgcattgtctcggttatgcccttaaagggaaagggtgtgccctccactattttctttcccctttcttgccagaatgtgaagacaggaattggagcagccatcttgaactgtgagatggaagccatacattgaaggtggcagagcaaccaaatagaacgaccaagtgtctctgatggttgttgagctgtcataccagctgtggactgctgtctgaacttttgtaggacagaggaatacactatttaagtctgttgtaacacctgaattgctctgtattctaatataatacttgttttagaacacttggaacaacagaaaattagttttgttaaggcaggaaaaatcttatgtgtaattctatcacccagagtcagtcatgtgttaactgacatcttagtggatgttgtagcatgcttccctcagcctcatccccacctctaccttcacgatgacatgcttagttgctcagtgcctggagtgttagctgctaatggttctatccaggaattgaccttggcctcaggggggcagcctgcatccaagaatctgttgttgagagggtaccaaagtctagtcttcttgctttattcagtttggacaactctgaagggccatcctagctctagagctcgatgtagaagtggccaaggtctctgttgcaactgcattacagttcacctctccctctgtcaatccagcttccctctcctttcacaggcactsttcccaagggcacttcacaacaaacccgcatgcaaatctcagaatctttgtgctagggaacctgacctatgacatatacagatttagagatttgggattataatactttgtttttcactaaatattttgctgggtagtctccatttgcctttccagacacattctcctgccctccatccacctctgttctgggaggctgaccacgatgggatacattaatgagctcctttgccctctaccttccagttgaatgctgccagtggaaggcactgataggagatcagatggtgggaggacagagactgggatatccctcgtcaccaggctgtgtgttggaagaggcatcattcttctactaaatccacagctcatggtgtgaggtcttctcctagagctacaggtgttagtgttttgctggtagttacttcctctggccctttcatgcctaggaatggaaatagctccctagtgctgccagccctggggtgcttcatcagctccctggtttcttatccttgcccacaccttgcaattagtcagtcttctcaatcactccgtttgagtatgccatctatttcctggcaggaccaggactgatacctactattttttttttttttttctggaaacggagtctcactctgtcacccaggctggagtgtagtggcacgatctcggctcactgcaacctgtgcctcccaggttcaagtgatgtttgtgtctcagcctcccaagtagctgggactacaggcacgcaccaccatgcccagataattttttgtatttttagtagagacagggttttmccatgttggccaggctggtctcgaactcctgacctcagatgattcgcccccactcggcctcccagagtgctgggattacaggtgtgagccaccgtgtccggcctcctgtttcttttctttctttctttatttttttttttttttttgagatggagtctcgccctgttacccaggctagagtgcagtggcgccatctcggctcactgcaaactctacctcccagattcaagcaattctcctgccttagcctccagagtagctgggattaaaggtgcttgccatcacatccggctaattttttatatttttgctagagacatggtttcatcatgttggccaggctggtcttgagccttctacttcttaatgattcttctaaaacatgatttttattggccatgtataatttcatcatgtagacttaaaaggatttctttaattccctattgttatatatacactttttatattgatttttatcacaatacatcaaagcatttattatgccattgaaaacttccaataaacacatttttaaaggactgttatattatggctggaccgtgaaccttgagttgtttatccagtagtgctaagagatttgttctratccacctgatttcttttgtgcagtgtttatagtgactaaagaaacgtattttcaagatgattgggctggctatactctgtagctgccacagaagaaagcaaggctatgccccaatcccaccacattaagatccccagttcagggctcttcattaaaacagctaaacaaactggtgtaaacagtacttttacttgaatttaacatcttttatgttttctgggccagactttgtgtggatattggataataggcttggtggcccttttatatcccttgtgtacttgtaattctaggaaaaatacaaagcatttagtgggaaggatttgtaagagaatacagtttgatcaccatgtaacttgagtaaaaatagcaccataattgaaaacactaagagtagggttttaaggaaagagagtaagattggaacaaagtaaccatgaacttttcagttckgagctgcgagttctgttcattattcagtgaccctttgtgagatcttgtcttagtccattcacgctactataacaaaataccatagactgggtgacttgtaaacaacaaaaatttacttctcatggatctggaggctgggatatccaagatcaaggtgccagcagattcagtgtctggttggggcttccttcttggttcatagacagctgtcttcttgctgtgtcctcacatggtgcaaagggtgagggagctctctagggtctatttaataagcrcattaagggaatgccttaatgcgcttattaaatgaagttttttgagaaaaaactcaaagtgctttctaaatttatctcactcaaccacaatcagtgcagacctgtgaccaaatgtaggtggtgtgaggggtgggtgggtgggtgggggaggagcatctccccaccaccaagcaagcaattagttttgtagcagataccaactggatatcctccaattcagttctgacactatctacttggagatagcatcagatcgttaccggaaaggggtcctgatccagaccctaagagagggttcttggaaataattcagggcaagtcggcggagtaaagtgaaagcaagcttattaggaaagtaaaggaatgaaagaatggctacttcagagatagagcagccccaagggctgctggttgcccactttttatggttatttcttgattatatgctaaacaaggggtggattattcatgcctcccttttttagaccatatagggtaacttcctgatgttgccatggcatttgtaaactgtcatggtgctggtgggagtgcagcaatgaggatgaccagaggtcactctcatcaccatcttggttttggtgggttttggctggcttcttgactgcagcctgttttatcagcaaggtctttatgacctgtatcttgtgctgacctcctgtctcatcctgtgacttaraatgtcttaactgtcggggaatgcagcccagtagttttgaggcttattttacccagctcctattcaagatggaatttttctagttgaaatgcctctgacaagatcccacagattgggggctcagtccccaaggttccctcttaagccctagaaatcagtagcaagtctcggcctctggaacttctgaccaactgactggcttcaagtgggggttcccatgacccctccttgaattcaattaattttctagggtagctcatagaacttggaaacttacatttaccagtttattrtaaaggatattaccaaggatgcagatttagagatgcatagtgcatgcagcttccatgctgtcctgggcgtaccaccctccagaagtctccaggtgcttagctatctggaagttctccaaaccctgtttatttatttctatttttatttttaattttttttaatggaggcttcattcagtagccatgattgattaatcattggccattggagatcagcttaacctttagcccccctcctttccctggaggttagcgggtggggctgaatatcttaaacctgttatcatgccttggtctttccagtgaccagcctccatcctgaagctaccacctgggggttgscaggcatcagtcaatcattagcatatgaaaagacatcacttcggagattctgaggattttaggagttctatgccagaaatctgtgatcaaagaccaaatatatatttgttggttttctttctttttgagacagagtcttgctgtgtcgcccaggctaaagtgtggtggcatgatcatggctcactgcagtttcaacctcctgggctsaaacaatcctcccacctcagcctcctgagtagctgggaccacaggcacacaccaccatgccaggctaatttttgtatttttttgtagagatgggattttgccatgttgcccaggtctgtctcgaactcctgagctcaagcagtcgcctgcctcagcctccgaaaattctgagatttcaggcgtgaaccactgcgcccagcccaaatatatatttgttaatatcacagacattcatcccattcatgaaggctcagccctcacaacctaatcacctttkaaaggacccacctccagatactctyacattgggcattggatttcaagataggaattttagagggacataaacattcagaccatagcagatctctttacttaggttaaccttgttttagtattacaaaaagcacttcagtgtgttcattcattgtattcaaaacatatttatcaagaaactactatgttcaaaacactaggatatggctgtgaacatctagaaaaattacccactctcataccattaacatttctcaagggagtcggataactaacaaataaacaagattattgtgaattgtgacaagtcctagaaggaaataaacaggatgatgaaagacagtaagtggggcaggacactttagactggatggtcagggataatacaaacctcattttatgtgttatggaaggtagtgtgtttgaatggagtgagagaaaactagaactgaagtccagctttatcaccttgtataagtttcttaaccttgctgaacaccatgacaggctgaaaatataacaagaacataatgataataatccctactacttatagtagtagcagaattaaaccagagaaaactcctggcattgtaagcatgactttctgccaggccccacataaatattaatttcctgttaactttcctaaaattacatataatctgaattctgtaatacccatttccaatgatataattttaagaaactgttctatacatcttcaaatcaatttaattcatcaaatatttattaagcacttactatgtgccagtctctggtgacctgatggtgaatagaataaacagtatccctgcctggtcagggtttaattattgttcttatttggctgagactcacaaagccatttctgtccactggttctcctgactagtagtaatgaatttttaccccactgctatgcacattttatgttaaacttttttttgttgtaaaataaaataaacatttaaaaaggttcataaaacataggccataaatcttaaaatctgatggaccctctcttacaaaaccctatatacttatttatgtgtcagtacaaacgtctaccattctgccactaaaaataacaaagaaaacagaaaaatagaagataattttttttttttttttttttttttttggttgaracggagttttgctttttcacccaggctggagtatggtggcacaatctcagctcactgtaacctcagccttcgggtttcaagtgattctcctgcctcagcctcccgagtagctgggattacaggcgcccgccaccacgtcagtctaatttttgtatttttagtagagacagagtttcgtcatgttggccaggctggtctcaaactcctgccctcatgatccacccgcctcagcctcccaaagtgctgggattacagggaagataaattttgttgttgttgttgacagagtctcactctgttgcccgggcgggaatacggttgcacaatcatggttcactgaagccttgaccttccaggctcaagcacttctctcaccttagccttctggctagctgggactacaggcatgcgtcaccacgcccagctattttttctattttttttgtagaggtagagtctgttgcccaggctggtcttgaactcctgggctcaagcagtcctcctgccttggcctcccaaagtcctggaattacaggtgtgagtgaccattcctggtagaagataaaatctgtgaccaccgtttggtgtctggacagccttgtctcttgggcctggaggggtaaagcagagtcagtcaygcaaagtcacataactggcagagactccttgaatttaraacagtttgtttaaccaagtggaagttgtttttttttctttttcttggcttattatttgcctatagcggcagtgcccatcttggggcagatccaggtttcacaaaacttaccagggagacctggccccatagctctggaaatacttcatatggaaaggataaaggatatctatgttaaaccaacatcaacatgataatgatgaaatgstaaaggcaaatataactcaagctaggaacaacttacagatatttgccatcaccaccatttaacataaacggcccacratccttatttccaaatcttgagttttaagtcaagttaataagctgttaaaggaaatatgttctgtatgttctatatctccgccttgataactaaacctttcatgacttataaatcaaacatacaaatcaaaattgtaaagctatggtttccatatgactataagttaacaaaatataaaaaatgattgaatttaataattgttatacatgtctgggtgttctgatgatgtggtagcatttttagatgagtaataagataatgagttgtaatttattctataaaatttattttccttgctttcatttcagcaaaatcattaagtttattataatcaagatattcatatcaggcacatggcttatgcctgtaatctcagcactttaggaggctgaggcagaaggatcacttgagcccagaatgttcaggctacagtgagctgtgattgcaccactgcacttcagcctgggcgacagagcgagacccggtctcaaaaaaaaaaagaaaaaaagattaacttcatttttttctattcacagtaatgacctcaaatattttaaaaatgtaattgtattaaaatgtgcctaatttgaacatattttcataaaagtaaattatagcaattgcaaaaatgtgaaatattaaattatatttttcaaaaatgtcatttatcttctaagatatctcaasttgtctattgtaagatgaactaccaattataatttatgaatgtatttaatctgaacatttaaactttaatctattgaaaatcttataatttaatcttatattttcatgaaaataaaattattcttaattttagtgctaagtgatcatctagttatcaaggtaaagaattggtatcacacttggagcatgttatagctacatgtacagatgttcacatttaagagtaatgcgagttatttctctagaatcacaaattggaaaccaaagagaagcaagatgatagatgctcaacacttccagaaagatacttccttatgcaagaatcttttgcattcgtttagtctaagagaaaggatttgacaaggtaatttgtcaattctttcacctaagcattcctacttagatcctcccagtagttggaagcagggtctgtctccaaggccacggtaatacaacatttagaaacagtaattttttattttgagaactcagggccagacatacaaagaaacatttctcagggacctgagtggtattagcaagagaatggatatttagcattgtgggttgcatttgccagttctaagcgccacattcggagtgacagaggcacttacacatattccttagtaagttaatttttttatatttttgttcatggggaccttatacagtgtgagccccaagcagcagacctcttgcttagccaagggcatcctggccaggacttccagttatataaaccagtaaatgttttcatgcttaagctagtttaaactaaaaaaagagaaagaaaaaaatcctaaatcatacaagtaggtagaaaatataacagaaaataagataccattcatggtagaactctaaataaaaatatctagaattaaataaacataggtgataaatacaaatatgataaatataattaaataaacgaatgtggtaaatagattatgtgcagaatatatgggaagacaatttactagcccttgctgaaatacatgttagaaaagcagaaaacttgaataaatgggaaggggtgctatgttttagaagaaaagackccatgttataacaatatcaattcatttcaaattaactaatgcatttaagcaatttttttttttttttttggagacaagagtttcactctgtcacccaggctggagtgcagtggcaccttctcggttcactgaaacctctgcctcccgggttcaagcagttctctgcctcagcctcccgagtagctgggattacaggtgcccaccaccacgcctggcttattttttgtatttttagtagagacggggtttcaccatcttggccaggctgatcttgaactccttaagcaattctaattataatgaaaattgtgattgtctccccaacatccattctatgccaggtctatgggtgcccctgattaatccaagcaaataatctaaatcctttccttagtcgtgattgataagagaatgggcaggtgacaggattcagattaatgacacacaaaaaatggtttgctggtagcttttactcttctgccagatgtgaatgaggatgcaatgatccaggctgctcctggcagccattctatgcccatgaggagatctagctgcagggtgagcttgacacagtggatggcagagctggaagataggagatgaaaatayatgtgttattcagtggtattgagggccattgttttgggaaaccctgaaatttggttatcaatgccaacaaatctctattgtttaagcctcttggaattgagcttttggttatttaccgcctaaagcatagggatttttttaaaaagaaacaacaaaaatttagaatgaggaattaaaaatcctacagtgattttagcagtctaatttaatacagatattggccagttaggttaatgaaatagaatagaaagtctagatagataaatatgcatttatttggtgaacaatgctgagaacattgatagttatttggaaaaataataaattcatttcctcctacaaaaccaatcatatgcagattaaaggattaaactattaaagagctggaagaatatacagacaccaagtcttagagttagtgagggcctaataagctgaaagtcaaataaaatatgaaggtgtaggatcgtcttgaagtatttaaaacattatatgccaaggaatactataagcaaaaggtaaattgttaaaatacagttgaaatatatgtattataaatataatattaaatatttgaaatataaaacactgcaaaaaacatccaaatataaaaaaagttcaggtagctcacaagagaagaaaaaacattgatctgcaaatgcatgcgaaatgtttaatatccctagtagttaacaaaattgaatataaagagagaacttttttaaaccattaaattggcaaagattaaaaagaatgctagcacaacattgtgaatgactaaatgtcattgagtaattgttcgctttaaaatgttgaattttatgttacatatgaaattcacctcaacttttagaaaaacaagaggagaaaaaaagaatataatggagtagccagagtgggaagtatatagagaaatagcttctctcaggcactgcagtttgtattgtaaattggtatgtaaattttgcaagactaattaacagtatgtagatgaagccttgaaaatgtttatattctttcctttcttcctataattacacgtatagaaatatgtacctaggaaataatcagatattagatttatatataaatagcattttgttgttgttgttgttgttatcgttttcagagatggagtttcgctcttgttgcccaggctggagtacaatggcgtggtctcagctcactgcaacctctgcctcccaggttcaagtgattcttctgcctcagcctcccgagtagctgggattacaggtgcccgtcaccatgcctggctaatttttgtatttttagtagagacggggcttcaccatgttggccaggctggtctcaaattcctgacctcaggtgatccacctgcctcagcctccccaagtgttggcattacaggtgtgagccaccgtacccggccaatagtgttatttttaaactgtgaaaattataattcgtgttcagtcatagcatagtagttaaataaattacaatatactatatagtaaaatactgttcattaattaaaaaaaaattatgtaaccaagtaatctttttgagttactgcaccatggaaggaagaggacaaaggcacattgtccagctttaagtttcaaattagaattttttttttcatccataggaaaataatagtcttaaaagctagccttgcctctaatttccaagaattcttcacacgtcaggaagaaaatttggcagcctgaatgtgtacgtttactataagccaagacgtaagggcacatgcaatctggggcaggtagcttcccccttctgaaggacagaaggaaggaagaaaggcttttaggggagctgttacagagagcagcaggggttcagattgcagtgtgtctctcttgccctcccagagttacaaacctcagggatgtcattggcgtgatccatggtggcaggccttggggaacccaagaacccaggagtggtctgtacttccttggtgtagtccgcacatcttgggagtggcagggtagtgttgccggagggagatgtctacgtggatggcctgagactacgtccagggattcacagcttgtgtgtgtgatgcagaaccaggggctgcttgcgaaagggctgagtgaacaggtaacagaaagagatgtagggaaggataagaaggtcacagaccagagcaaatagcaaggtccagggacatacatcagggctgccatgtgcctatgaagtcttggcagaatcagccattgcacagcaggcagcactgcatggtgcctggtaagcactgggcacaaggggcttctcagtagaggctggtgaggatccagggagccacacccagagaagaggccttccactgctatcagcataagccaagctctcctttgcactcttctaggtctgagggtgtcctccagaattcatgtgttggaaactgaatccctagtgccagtgttgggaggtggggcctaatgggaggagtttaggtgggatcctcactgatggataatgccgctatgaaaagggtgtgtgggaatgggctctacgtttcttttcctcttctgccatgtgagaacacaacatttctacccactggagaacacagccttcaaggtgctgccttagaagcagagagaccgggcacaaacctgtcgtagccctgatcttggacttcgcagcctccagaactgtgagagaaattaaatttctyctctttataaattatccaatctcaggtattctgttatagcagcagaaaagagacacacccaggtgtcatcctgggggaaaaggagtgggaagggagctttttggaagggagaaaatacagttytaatagagagtgtgaaccttaaatgatagcatatttacttaaaacacactctttaaaacctttaaaaatatccaggaactaatacatggagaaaagaatttaggatacatacacagaaactcaataaagttaaatattttttccatatctcagttcgtataacttgatttccttgaaatcatattttttaaaatgtttaaggaaattagaagatgctcactattatattgttaaaagagcaagcagtagatataatattcgaactttctaaaatgatagtagttattaatattatacacacaaacacataaacacatttttaaacctttgacaaatacttctaaatattaacaaggattatttctgggtatagaattttttatgtagtacttttcgtattataagatgaacatacatttcttcttataatcagaaattgttgtttaaagaaacaaaccatacagccttgctactcacaagtatggtccatggccagcaaccatgggagcgtgttagaaatgtggattctcaggccccaccccagacctcccaaatcagtgtcttcattttaayaagatccccaggattgtgtgcttgccagcagcactggcgtaggcttcacactcccgttcccagcctactgatgtccatacctgacgctctgctttctcctgtttctgcagacaaacagcccctccgctcgtactctggatcctagcccacctgcctacccaaggactttctcctgcacctgtcacctctctcttctcctggatcattcccattggcaaacaaacatgctgtgatatctctttcacaattttttaaaccaaattttattttatatgtttaaaatacacaacatgatgttctaagatacatgtggatagtaaaatggttactatagtgaagcaaattaacatacccatcatctcacagttgaccattttgtgtgtgtgatcagagcagctataatctactcatttagcaaaaatcccaaatataacatgctattattaactgtagtcatgttgtccattaggtctctagacctgttcatcctaatatctactactttttgtcctctgatctacatttccctgtttcctccccctcaccctccacctaaccactgccttattctctaactttgtatatttgactttttaagatttcacatagtaagtgatatcatgtaaaaattttctgtgtctggattattttacttagcataatgtcctccaggttcatccatgttgtggcaaatggcaggacctcctcttttttaaaggccaaattacatattctatagtattctatagatcctatattctctctataattctattatatttaatatgtatatctgtgttttttttccatccttctgtcaacggacattcagattgtttctctatcttggctattgtgaataacgctgcaatgagcatgagagtgcagatrtctttacaaggtggcaaattcatttcctctgggtgtatacccagaagagagattgctgggtcatatgacagtwctacttttaacttatttagaagcctccctactgttttacrtaatggctgcaccaatcttcatccccaccaacagtgtacaagggttctcttttctccacatccttgccaatacttgttatctctttttaattatggccagcctaatgggtgtgagatggtatctcacagcagctttgacttgtgtttccccaatgattagtgatattgagcatcttttcgtatacctgttggacatttttacgttttgttttttgagaaatgtccatttaggtccctttgcctattttaaaaatcaagttatatgttttcttgctattgagttgtatgagttctttataaattttgaatattaatcctttatcagatacagggtttgcaaatacttttttccaatccataatttgccttttcattttgttgattgtttcctttgctgtgcagaagctttttagtgtgatgtagtcctatttatttatttttgcttttgtagcctgagcttttggtgtgatatccagtctcatcctttaaaacaaacaaaacaaaaccccaatccactttccagacctctgtcttcttcacatattgtcccatttttttcctgctcttcatgtctaggaaaacttgaaagacttgtctctcattgtctcccctttctctcctccctttctctctcactaatccaccgatactgctcttgttaaagtcactgatgacctccaagtgttaagtccagtggccaattatctgtcttcrtatctcacttttacctctcagcaacatcttttacctctctcttctccttggctgccaggatactctactgccatgatcttctgcytctcttactgacagcccgcccctcccagtctccttccatggttcctcctcatctcctgtttctggataggctggagtcccagcgtatagtgcttttctccctctacagttccatggctttcagtctcctctataaatggatataccccagatgtttatatctagacctgaactccagagtcacatgtcaagctgcttcacttgagtgtctaacaggcatattaaacttagtgtgttcaaaaccaaagtcttaattttctcccccaactcattccttacccagtactycctatatgagcaaatgcctatatgagcaaaagtccctttcttatagttgctcaagtcacaagcttggtataatccatgaattttgtttctttctcttccatctctcagccattactaaattctgttctacttgcaaaatatatctggaatctagatatcaatttctcatgcccccactccagtgatcccctcctcagcctgagtcatcatcactctcttctgagactattgcagtagctgtaagactcagctccctgctttcccctgtgcccccaacagtcttttctytgcacaacagccaccctaaccccctttcactcagaataaaacccaaagtccttgccatgcagcagttcaaggccccatgtaaactgccccctgctytccgccgtaccatcctctctctctgatctgatcttttatgcccatccaccttgctccctgtactccagccatgctggcctctccttgctatttcttgatcttggcaaacaaacacacaaatgctgcctcagggtggcacttgctcttcccgctgacatgcagtagaacatagtggtagtggttaagagcaagactctttggagccagactctctggggttcacttttcagctctgctcttcactagctgtgtgaccttgcacaagttaattaacctttytgagcctcagttttctcatctataaaatggggataataaatgtacctatatacagtccttaagagaatttaatgaatttatgagaagcagttggaatagtcactggcacaggagtaaatgctgtgtaactattaaccattattattactggaggtgtccatataaccctctcatttcattcagagctctgctcaaatgtccccttgttgaagatttgtttgaataccctccctccccctccattattctctgtcatcttaacctgcttcatttttcttcttagcatggatcaatatgtaagcatacgcttgttattagacagataataaacatatgtagacaggtttgcctattatctgtccacccacaggaatgtgggctccactgagaaaatgctcacagtcctggtgtatggcaggcacccaatacatatttattgagtgaatttctgaccagtaatgtttccttcttcagtaattgataaatgtaattaatgacataaaatcttaaatctctcaaaaatcttgtttctacttaaggactcccaaatttaaatccaagaactaatacatggagaaaaaaatttaggatacatacacagaagacgtgtatatatgtgtgtatatacatacacacatatcagtgtacggaagccagctattctttcttgggaaatatttttttctcctgtatctgaaagtatgtccttctttttatagtgttagaatattctttctttaattaaatgctctagatagtagaagagagttttaaaattttccctagtatccctatatttattactgttttaaaatgtccctattacacagtacttatttttaatttttttaaatttcacatataaaatgttgtcaaccttatggtgcttttcaaaattaaaaattactagtctgtgaaatccgaaagtctgagcactgtttaaaatacaaatgaagataacatatccagttttattgatataagtttctaattccagccagaacctgggaagttgtgtcattagtcaaaaaactttgatgccactttgttcattatatcttacctgttatatttaaaaaaagaggcttgtaatattttttaaatagaagatgaaatatgggctttgtattagtctgttctcacactgctataaagaactgcccgagattgggtaatttataaagagaagaggttttattgactcacggttctgcatggctagggaggcctgaggaaacttacaatcatggtggaaggcaccccttcacagggcagcaggagagagaatgagtaccagcaggggaaatgccagacacttataaaaccatcagatctcctgagaactcactatctggagaacagcatgggggaaactacccccatgattcagttacctccacctggtcctacccttgacgtggggattattacaattcaagatgagatttgggtagagacacagagccaaaccatatcaggcttcaattagtagtccctatgaaaatattgcaaatgtgacttaaacatgaaaacaaaattgagcaaaacctttcacataatgctacacttggttcaagttgaagtcctggtttaaattgttttaagacttattgaagtgttaactgtccttttaaagaggaaaagagacctccattccctgtttgtcaagtaccgtactttttagttttattttgttctaataacagaagaagaagtggtaacatttgctgaatacttatgtatctgttaccacattaatatctttattatctcatttaattcttaaaacaagtctataaaatggaaatgatgatcaaacttcgttgatagaaggaaatgtaagtttagggagagtgaaataactcatttaaacagataccacttgttagatggtagtgctgggatgagctcccagagctgactctaccctccatctgaatcaggtgtgtatttcttgaattggcacacacttagtcgtgacaagtactcaaaagataaaataaaaattgtattgaatgaatacaatttagctttatatttgtttttttctttcagttgtattcttgttttgctcataaggccaaattttcatttaataatatgtgaatttatactcatgatgaaaatcaatcttatatttttaatctataatataggtkggaatgtagcctggaatgactgacagctgttattatacaaatagcacatgctggcaaaatggcagcaatttttgtgatctgtaattaggatattactgttgtctttatatctgcaaataagtagtaatgtattagaaagtaattggcataatgagttgggaaaaaatagaaacactctcatttatgattcatttaaaacttgcttaaacattatagagtaaaatattctgttcatgtgattttatttgtgctgtgcttaaaatattaaaaatcagatttccaaataggcatgatatatgaagccttaggactgatcatctttcaccccatcaacattttcttttttttctttttgagatggagtctccctctgtcacccaggctggagtgcaatggcacgatctaggctcactgcaacctctgtctcccaggttcaagtgatttctcctgcctcagcctcccaagtagctggtaccacaggggtgtgccaccgcacctggctaatttttgcatttttagtagagatggggtttcaccatgttggccaggctgatcttgaactcctgacctcaagtgatccacctgccttgggctcctaaagtgctgggattacaggcatgagccaccgcgcccagcccccatcaacattttcttttgggaacactgtgtaatggattttagtcaattctacaggaagtaaaacatcaatatttggaagtgaaaaaaattaactgcatacttttattgagttaaagctttcctttaactcagctttttcatccaggaggcacgttattaaaatcttgagtgcactcattgattatttttcttttatcaggaagtccataatgttatataataatatattatatgaacatatagtacaaattatatctattgagtaataagtaccatcaacatcaaagactatgttatttttcacctttaattttgttctttttttctctttaatatatttacaagttctgcaaacactttctgttgctttgtcatgttattatcaatttgtttgcaagtgtcatgtttggtattcctaactagatatgaaagctatttaggttaggaatgaactgtttccttcttttatgaacctttataccttcttacaatgctatccacatagtaggctgtcacttgactgtatattactagaagtgtatatattcagagttggtatcactagtggaaactctagaagctattttaggatgttgtgttttctgataatgaatattcaaatgaaggtaggaatagagagaaccatatgcattgacttatttttggtacctccccaaactaggtcagaatagagacctcaaaattcagtggctaaactgcttcactcttttctttttagtcatatttacaatggcagtttttgatcttcacagaacttcatgtgcatctgcctacagggtgtttctcttctgttggcctcattagctcctttgggaatgtggtcactgctataaaagggccgattgttagattytatggtatagagggcattgccagtcacaraccaatttacctagcttcatggacctccgcagatcttytcagatccttaaacttytttgttgctagtgataattaactgagagatgatattaatattttagatatatatcctttgacagtcagcttcctttcacgactatagttaatagatttaatcccttaagtaagtgtcactggaagcccaagtaatactagctgaaacaaaagagagggtggtttttctcttacgtaagagaagtacagagatacmcagttcatggctcgcatggcagttccctgcttacaaggatcccaaactccatcctccagggcacctcatggttgccatgtggcccccgcagccccagctatcacatccgcagccacgttgcaaraatgaagactggccaaaggcaaaaaaaaaaaaamamaacactgtactaactgggtcaattgtctttaaagctttttyttaggagctgttattcagtgacatgtgcttcatttagttgcaararaggatggttaaataattttttagaggggtacattgtcatcgttttgttgkgggkttttttttttttttttttttgagacagagttttgttccatcgcctaggctagagtgcaatggcgcgatcttggctcactgcaatttctgcctcctgggttccagcarttcttctgcctcagcctcctgagtagctgggattacaagcgcctgccaccacactcagctaatttttgtatttttagtaragacaaggtttcaacatgttggtcaggctggtctcaaactcctgacctcagatgatctacccaccttggcctcccaaagtgctgggattacgggcatgagccaccatgcccggcccacattgtcatcttaattaaaattggattttattactaaagagaaagggctgaatgtgtattaaatgggcatctagaacttctgccataccttgatatttaacatattttattttttcagacagggcctcactctgtcagccaggctcaagggcagtagcacaatcttggctcactgaaacctccgctcactgcaatctccacctcccaggctcaagccatcctcccacctcagcttcccgagtaactgggactacagacttaacctattttaagatttgtcctttaaaaaaaagatttgtcctttttcccaaatgagccatggatgtgtgctttatatggctttgtttctgtggtaaacatacacagacctccagccaagatttaattttcttcttctgatgtgattatttcaattttttttaagatttggtgaattacattaaataaatatttattaagctcctctcatcatcaggatactgtgctagatagggattctcagctttggtgctattggcatttggggctggataattctttgttgtgaggggctgtcctgtgcattaggatgtttagcagcttctctggccttcaccctctagttgcaactagcaacccccagtcgtggtcaccaaatttgtctccatatattggtcacatccccagtggggatgaaatcgcccccagaggaccatggtgctagaagatagccccacatttatgtgaattgcctgtttgatttcctgtgaaagtgtatcatggtagattaagtgttgcttgaactgttgcttgctgttggtattacgagcgaagtagtactggtggaattttcatgtgtgctggacaccatgatgagaactgtccacgtgtcacctcatttaatcctcatagcacaacactgagttaaaacagcactgtgttaggagaaggtactaacaagattaggtagtattataacccccctttacagaggagcaaaatgaggcttagagattattttagctgagatctccctgagagcaagcctgagacagtgagtggttcgttgggaggtgatttcaggaagcagaatgatggagaggggagaatgaaacagggaaggaagaaaagctaatacaggagttgatgttgggttgagagctacctcaggggtcacccagggcactgtatatctgaggactctgaggaacagtgaacaatgcatctcagaattagttctctctcccactccctacaggggttgcggkggaggaagctggaacttctccacrtactcccatcttccccaggggcatgaaccycctttccctttacctataagagtagtgagcagtatacacaaagatccagcttttgaggagcttmtagtcttgaggagaaagcaatacattagtaagcaacatagtatccaaaaccaatgcatgctctgagaagacagaacgaaggttgtgtgacaggagtgcttggggaactccttagatggggtggccaggatgagggatgagctgagaccccaatggcaaggagaagccagtcatacaaagatctagggtaaaggcattctaggcagaggaactgcatggtgcaaaggccccgaggcaggaacacattttctttgaggaataagtagaaggctagtggggtggaaggctgagaggaaggggatgtgtggtggaggatttggtcaaaagactggggagggacagtcaggtcttgggtaagaaacatattttattgtgcgtacttcttcctacactggagggttttaagcagggttcaagtgatctgcttaggattttattttattttattttattattttattttatttatgtatgtattatattgtattgtattgtattgtattgtattgtattgtattgtattgtattgtattgtattgtattgtattgtattttaagacagtttcacttttgtcacccaggctggagtgcagtggcacgatcttggctcactgcaaccttgggctcccgggttcaagtgattctcctgccttagcctcccaagtatctgggattacaggcctgcgccactgcacatggctaattttttatttttacagcatggtttcaccatgttggccaggytggtctcaaactcctgacctcaggtgatccacctgcctcggcctcccaaagtgctgggattacacgtgtgtgtgccactgcgcctgggcaacttatgattttaaaaagaacactctggctgctgtggagaaaggagtgtggcaggggaagagaggaagccaggaaccagttaggaaggaggctatcatatggttcccacagggccagctacatagtttgtggggcctccagcaaaatgaaaatgtgggggctcttgttcaaaaagcagggggaagagagtactattaaaggtactaaactataaaactttttgtttcacagtccatcaacttgtcatggtgtgtttttgtttgttttgttgtttaatgtcattctaagtaaagaaaaattaaagcttaaaatattagtatgaattttaccattcatctgtatattgtgcaatgctggttttaaatgcaaatataagacatttttagggataaaagacttataaaaaatgaacaaaaaccaataaatcaaagaaaacatttagctcatatccrgaatcactgatattaccgaacttacatttcatagttcatacatgcatatgtactttgttcttaccagaactgtggaaatgtggcacaaaacaagctcaactgttttatttcacttctcgttccgtgcccattctaccaacactctctcccctcagcttcctggtagataaaagatgggcaaggaaaaggagctctgggttgccctatgattccctttccttctctcgtcattttcagcatgggtgctaggttaacacagggaagtaacacaaataagagaggatattatagggtttcttggtcatttaggtttctcagaacaccattgccttttttctgtgctcacagtcaattctggttcaaaaggcaagcatggcccatcagccctgtgaacggtccttgctcgctgagttgtagatgtaacactcttacttcatacttgcttctaggctcactaagctcccatgcattgtggtaagctaaaattctgtgctcatgggacatcgtgaacaccatacccacatggggtcttgaggaaccacagacacacatggcacctgtctcctctgctcgtgcacacgtgtcattgtcccatcagatttcacttgcccaagatcaaagattattaagattttcaggatggtgacagcagagcatcagactaagtctgggacctaagtgaggggccctgaaccactgcacaggctacacacccatgaggcctagatcctggtgagagaagacaggatagagacttggctggtacaagtggagaaaaacaaagtgttgagtaagttttggggttagatggtattaccaagacttgttgtggattggatctgcttttggatagggacagaagagaaatcgaggatgacttacttctaggcttattacttaggaagatggaaaagactataggagaaataatttttgaagtgagggaaatacagagttgtgaagtttggatttaccttggtttaagaactatggagctgcagagccaggatttcaacccaggcagcctgacttcagagtcagtgcctttaaccactgcactgcactgttctgtcatgcgggacccacgctgatgggtgcctggtgatcgttgcaatggttctgtatcttactattctctgccctctctggacgatccaccaactgtgtgcagtgagcatccatgcagaggcatgcttgaatttaaacacagttttgtattgaaacctagttaacaaatattcctttaactcacaagcttctcttttgcatctcaattatatttgtttttatagaaaggatatcyttatacagctttgctcattcacatgaaaaggaaagtgtgttttcagttggaagatgtggagtcaaaaaatctgaagctgagtttggtatctctcaattgctagctgtgtgtccttgggctaattaattgctttgatctttggtttcttcatctataaagtacagatggttttgtgtgggtgtatgtgtttatatgtgtgtgtacatatatacatgtgcatatatctatatatatgcacatacttgccctcatcatatacaaggctactgtgaagattaaatgagattatagaggaaatccaactcaacaaggcttgagttggatacccattggcagtcactccctatttccctctaccctcaaaccctggcaaccactaatctactgtctgtctccatggatttgcctattatggacatttcatataaatggtatcatgcaatatatgccctttggtgtctggcttctttcactgaggataatgttttcaaggtttattcatgtagtagcatgtatcagtgatacattatattttatggccgaataacatgaatatgccacattttgttgatccattcatcagttgatggatatttgggctctttccactttttggctattacaaataatgctgctatgaacattcatgaacatacttttgtgtgtacatatgttatttgttctcttgagtgtatwcctaggagtagaattgctgggttatttggcaactctatgttaactttttgaggaactgccaggctgttttccawaagtgtctgtttcattttgcattcccactggcagtgtatgagtgttctaatttctctacatcctcaccaacacttgttattttgtcttttttattataactattctagagtggtaagtggtatctcattatggttttgatttgtatttccctggyggctgatcatgttaaaatcctttcatgtgcttatcagccatttgtatacactctttagggaaatgtctatccagattctttgcccattaaaaaatttgggttctctctctctttttttttttttttgagacagagtctcgctctgtcgcccaggctggagtgcagaggcgcaatctcggctcactgcaagctccgcctcctgggttcacgccattctcctgcctcagcttcccgagtagcagggaccataggcgcccgccaccacgcccgactaattttttgtatttttagtagagatggggtttcaccatgttagccaggatggtctcaatctcctgacctcgtgatccacctaccttggcctcccaaagtgctgagattacaggcgtgagccaccacgcctggctggttctctttgttttaattgtcgaatagtaagagttctttatatattttgaatactagaaccttatcagatatagaatttgcaaatattttctcccattctgtaggctgttttttcactttcttggtcttgtctttcgaagcacaaaagttttaaaattggatgatagccagcttctttttctttctttctttctttctttctttctttcttttctctttctttctttctttctttcttctttctttctttctttctttctttctttctttctttctttctttctttctttctttcttctctctctctctctcttttttcttttcttttctttcttctttttttgagacagtcttactctgtcacccaggctggagtacagtggcacagtctcagtcaccgcaacctccaccttccaggttcaagcaattctcctgcctcatcctcccaagtagcttggattacaggtgtgcgcccccacgcctggctaattttgtatttttagtagagacagggtttctccatgttggtcaagctggtcttaaactcctgacctgaggtgatccgcttgcctcgacctcccaaagtgctgggattacaggcatgagccactgtgcctggcccacttatttttcttctaagtttctgcttaaagccctgacgtttaggtattcgattcatcttgagttaacttttgcatacagtgtaaggtagaggtccaatttcattgttttgcgattggctatccagttgttccagtcacccaggctggtgcagatcgtgcagtggcacgatctcagctcactctccgcctcccaggttcaagcagttctccwgccttggcatcccaagtagctgggactacaggtgcgtgtcaccatgaccggctaatttttgtattttcagtagagacggagtttcaccatgctggccaggctggtcaaactcctgatctcaggtgatctacctgcctcggcctcccaaagtgctgggattacaggcatgagccactgtgcctggcttttttttttttttttttctgagatggaatcttgctytgtctcccagtctggagtgcaatggctcgatctcasctcgctgcaacctctgcctcccgggttcaagcaattytcctgccttagcctcccaagtagctgggattactggtgcccaccaatacgcctggctaatttttgtattttaagtrgagacagggttttgccatgttggccgggttggtttcgaactcctgacctcaggtgatccatytgcctcagtctcccaaagtgctgggattacaggtgtgagccmcagcgcctggctttttttttttttttttttttttttttttttttttttgagatgagtcttgctatgttgcccacgctggccttgaacttttgggctcaagtgatccttccaaggagctaggattacaggtgaacaccactgtgcctggctcagacagtcttgrttactgtagttttatagtaagttttcaaattgaaaagagtgagtcctccaactttagacttctttttagattgttayggctattcgtgttgccttgcaaatccatatgaattttaggatcagcttgtttatttctgcaaaaaaggctgttggaattttgataggtattttattgacactatagatcaactttgggagtattgctatcttaacagtattaagtcttccacttcataagcttgggattgtctttttatttatttagatctttttaaatttcttccaacaatgttttgtagtttcagtttatagtcttgcacttcttttgttaaatttattcctaaatatttattcttcttgaagataytgtaaatggaattatttgcttaattttattttaagattgtttattgataatgtataggaaaacaatttatttttgtatttgatcctgcaccctgcatacttgttgaacctgtttactacttctaacaggtttttggtggagtcctcagaatcatctatatataagatcatgtcatatgcaaayagagatagttttacttcttcctttctaatatgaatgacttttatttctttttcttgcctaattgctctggctagagttccagtaattgatgaatagaagtggcaagagtagacattcttgtcttgttattgattgtaggggaaaaataatttgttcttttataatcatgttagctgtgggtttcttgtagatgccctttctcaagtggagaaagcttctattactaaattgttgagtggtttttctcatgaaagggtgctagattttgttaagtgctttttctgcatctgttaaattggccagttggtttgtttttcctttttctactaatatggtatattaccttgattgcttatcatatgtcaaaactggaatactcttctaatacccccttttttttttcaaaaaggataagtggtgatttactttctgaatgcttataaatataaaatttcttccaatcaccttatagattatattaagcttgtccaacccacggcccaggatagttttgaatgcagtccagcacaaattcacaaattcataaactgtcttaaaacattatgaggtttttgttgttgttgttgttattgttgtttttaagacggagtctcgctctgtcacccmggctggagtgcagtggcacgatctcggctcactgcgacctctgcctcccacgttgaagtgattcacctgtctcagcctcctgagtagctgggactacaggcatgtgccaccatgcccagctaaattttttttgtatttttagtagagacggaatttcaccatattggccaggctggtctcgaactcctgacctcatgttccgcccacctcggccaaagtgctgggattactggcatgagccactgcgcccrgccatgggatttttttttttttatgattttttttttcagctcatcagctgtcagtaatattagtgtattttatgtgtggcccaacgcaatttttcttcttccagtgtggcccagggaagccaaaagattggacacccctggattatatcttgcctggacacaagattcttggaatgcagtccttttttcttaaaagtttatatacttattctaggttccagtgtggcatatgaaaggtccgatgccagttgtcattattttgcttttataagtaaatatcctgttcttgctgtcttgaagcctaaaagacttgttctttctagttggagtttaaaacttcaccataaaaatgtgaagaatgtgtcttttatttcccttataactgcctggcattcggtgagctcytttgatctaaaaaactcaattctttcttcacttcagggttttcctatttgattattgcttctgctcttttctctcttgctggaaatgctatttgcttattaggcctcctgaatctgtcctgtatgcctgttatattttcaccactgattgacatttcattatttctgctttgtgatgtgatagttcctttgcttcatattccagtttactagtttggtttttaataccagccattcattttacatccttttggaacttaagccccagagttcatgtttctcataggcaccttctccttgagttttcgtagttattctccttgtgtatccccttaaacattcttattacatttttattgtttcttccattaatttggcttttgtaaaagttrcctatctctccattctggtttccctcctttgaattgctaagtcccttaaatgtctacaaagtttctttgctttgttaggtcagggagtatgtattctcaagcacctgcataggcatggtgggtaaagtctgtgaggccatggtggatattgccagtaacccatgggagctggtctaaaaaattctgagacagcatctgggcctagagagggaaccaccagaaaaagcagtcagcatctgagatgatgcccggagagaagcagatagaccatctgcaaggaagagaaggcttggtttcttaragggtgacctactgttttctgttcttgtccttggkttctcacaaaacctttgcatatcctcttatgacatcagtatacattctcctctccccgcctactcctattatacatctacccttcacctctttgagatggcttgagttgatctgtcttcccagatgaggcagcagtcacatcctgttgctgtgaggtattttcagctcttccacaaagggcctagatggtaaagacccatctcttcaaaattctttctatagtgacttagatttaccttcccaagtatctcctttttaccaatgtcttccaaatattttcattcctttataaatcccttttctgaaatactcctcccctctacccctctgaagttcaactttcttctcagagcctttagtctacacagatttaccagagtgtttgcataattgggtcaggatattcatctgcagctaattttgcacttttaatgtgatacaagctttggtttagggttaatttgtatcaataattatgaataatgtacttatcaaacataaattccttttttgagtgtatatatttcctggatatttatggccatgttctctttaataattcctatatttatcattctaatttacttctattgcctagtccaaggatcattctgcctagtactgattctgcctagtactgatgcattcttttgagaaggaataaagttactgcattattttaatgtaagcttgctttttgatggggcatgcacactgcctcctcaccctcttatacctgaaactttccatatttttgttaattcccctrtccttgaagacatttggattttaagtttggggccttgggctcagtatatcgttgtaatttatttgtttgcaaataattttcttaaatattcataatgaatgacattgtgcattagaggcagataccatgaattgtaatttagatctgttatttaccaccattgctggtcgtgcttggaaaactactttgaattattctcctatccacttaaaatttattttcaagtcctgtgattctaaaatgcttttattcagattatgttatcatatgttcttgtttaattaggttgcctgtcactttgctaaaggtctaattagaaacgatatctctattgtgtttgattcagaatgaatgtactaaaaggcactttgaaaataagataatgtcctcgatgatgatatcctttatttatgccaggtgcctattagtattttgtaaactctccatttcactttagctcaatctaatcctctttgtgatttttttccataattgtagagtaaataaaattcacctactggctccaaaatgtaatttagaaatgcaaactaaatgttcccctgtagggggtgcaatctgttttaaactctcaatatgtgtaatgaaagctataaaccatagagggaactttcgtgggttccatccatattgttcggggcaggctttttgagtgatttgaaaactttgtaaatttgatggtagccaatgtttttctcaagttataaaatttacataatattaggatgaatgcagtacatttatttttttgttatgatttggggcattgtattagagttctctagagaagcagaaccaattgtgtgtgtgtgtatatgtgtgcatgtacatgtatatatatgtatatatgtagagggaaagtatgtgtctgtatatatgtttatatagatatctatatatagatatataggtatatatatgcctatatctcaagttattatatgtacatatatacaacatgtatatgtgtgtgtgtgtgtgtgtgtgtgtgtgtgtgtataaagagaatgtgaggaaatggctcatgcaattatgatggtgggcaagttggaatttgtagggaaggctggcaggctagaaattcaagtaagagytgatattgtagtcttgattctgaagcctggaaatggttagaacttstatgttgtagtctggaggcagaatttcctctctcagaagcctcagtctttgttctttaagttcttcaattggttgggtgacacccacccacattatggagggtaatttgctttacttaaattcaactgattgtaaatgttaatcatatctacaaaatacttttacagcaacttctagactaaaatttgaccaaacaattaagcaccatagtctagccaagttgacacataaaatgtaacatcacaggcctcttgcatatgttattgtcagtaagccaaattaaagataatggtagctagcatttttactaacttggattcaatatttagtgcaactctgcagtaatmaagatgtgaattatactgtagcactccaaaattgagtgaataggacatgaaacaaaagccatgaaccatgattcttatcagtttggattttttccagaacattttttgagtcggtcttctgcaatggtattgttctagtttgttctttgaaactcagctttcaagttctgtgtgtgcattcaatattgggcaattttgaacgcatacttagaagagcggccaaaatgtagattagagagagaaggtcaaacaacttctcatcctgtgcaatttctgcaatcctaagcctgttataacacagagtgttccaggacctcccacagatccatgaaatgtattctctgggttatggtctgcatgtgatttgctgttccttgatgtcaagcttgctgttcatctgaccctcaagatccagtcagagtcttcagtcacactcaccctctaatttttttgtrtgtgtgtcaccaagtttttgtcttctgtaattcagttcacactaaaaaaaaaaaaactttttatttcccccctatatccctaaagtggttcttcctctttccctcccctcttcttccctctgtctctctgatttctcagtttgatcctgatgtgaataacatactacccttagtcttacatttctaatttttactttctgtgggaaacttccatctatgtttttcttttttcttttttaaatccttagcatagtaaatggaggtttgttgtgtgggtgtgggagccgggggtgcagggggtgkgatgtttctttttaattgttagagcttgatctctacatgactttccattagmttggaatcatgtgactcccagggttgggcaggaaattagcttttgtccagaagagcaggatacaacaaaaattattttcttagctccaaaggcctctttgctgcagaagcccaaattgaaagagtggcttagtgattcacttaagtcattagacagcctgctgataagaattagtttagattttgaaaaaaaagggagacttttttttttcagggctaagtataggtctcagttatagagaaaagtaagaggaaaaattgtcatatgcatacagtattacataatattctatgtcataaatcaaattttatgggagtaggcatttgttgcattgtgtcctcatacccaattgtgtgattgtgtrtgtgtgtgcatatatgttcattgaggcaatttgtaatagaaagtttattggattttactttgatttctcctttattaaagtattgaggaaatgacaaaaacaattctttgcttttactttttttttttggcaagctccacttttaaaactgtttatttttacagatgtatttcatcagttcttaaraatgaagctaggaatgtttgctggcttctcagttagtaccacccagaaactgaaaaaaatctgttttcttaaaatatgacattggggggaagtagagaaacttttcatttttstgacctattggatttaaaaaaatatatttaaataatgcatttttaatattgctgtttaatgtactgcttatcttaattccatattgctttctgactcttggttgttgtacttattattttatagttaataattgtaatggaagggggataaaagttcatgttttattttctctggaaaatttgaataccctgtccatcctagaattgtttcttattcagagagcctcctccaggtaagtctccaagaattttgacacttaataatcaagtgtgactctctgatcagtcaacaagtacacttcttataaggtatgtcttaaaataacaatattaagacattgtttggactcattttctttggaccagactagaataagctgagtgagaaaatgacctggaatggttcattccttcatttcgcaaacatttattacgcttctcagttgtaacaggtgttggcaccgtcctatctcttcagaaactgacagttcagtttgagacaaaaaatgaaagcatttacaattcagtatagagactgttaaaaaaggggttccttttcctgattgcatcccaccatttctggccatcttcactctattcctgccatgttgagctttgaagttgaggaataaagcagaagcaaggatggaaaaaaacttactttgcaatcaataaataaaatttaaatcaaggccggcgcagtggctcacacctgtaatcccagcactgtgggaggctgaggctggcggatcgcttgaggccaggagttcaagaccagcctggccaacatggcgaaaccccgtctctactaaaaatacaaaaattagctgggcatggtggcgggcacttgtaatcccagatattccggaggctgaggcaggagaattgcttgaacctgggaggcaaaggttgcagtgagctgagattgcgcccctgtactccagcctgggtgacaagaatgagactgtgtctcaaaaaaaaaaaaaaaaaaaaaaaaaaattaacagagaaccatggtactacattccttttctcttaaatccttgataaaactaatgtatatcataaagcagagttccccaagttgagaaatagatcccatcctcttttagaaaaataaaatccctggacttccaatgttgactgaaattgcttttattatgttacttacattacttatattgtttattacattacttaatatatacaaacatataatttttgtgcttataactctatacaaataaaactaaaacaataaatataaatagaattacaaaaccattacattcaaatgagcrgtgttataattcacttccaatatgttttagtgggatgggtgactctgctttgttgaaatagttgttgatttaggggattatagtagaaagatgttgccacaagtctagttctatggttcatctgtttctgtatttgaattttgataatacatatctaacaaatacctatttgcacaagtattgtaagtacttatgagtattgtttattcaaaacagtattaataattttcagtctctaattggaaattaggctcattamgtctttttttttcagtaaaactctgccagtgaatagtcttggaatagcagattaaagatgtatcacttggtaactctttaaagctccattacttgagagtaaagttagcctrattgacatcttcattaaataggcatctgatgcaattgctgctaggcccaggaatagaaaaaaaatttttttgcatacttatgaccatacttatttccaataaattgatatgagttggtataagcaaagatggcactggtctctttcacctctctgcttatttggaccatagggccttccttctggccgtacagatttccctgaagtcaactgatgtaaactcaattgtacatacaaacgactgcacaaagatctcatgaagtactcagttgcatggggtcatctgaaagacgcagactatctttaaatttctttttatagattatcataaaaattaaaacagaaatattttttaaaacatcaataatttgaagacctttaataatagattcataaatttttgttttagaaatactgttagagtttcctgatggcaaaaaatgaataaatactttgggctccaaaaccaaatttctatgcatttaaacatgcaaatagtttttcaattctaaagccacttaaagtatagcattacagtgatatttaactaatatgaaatatgcattttatgtaagtttgatgtgtgttttattttaagagaaaaacctaactgctgttagttcttgctctgctaatcccatctacttggtatcctgatctacctagtttggtttaaagtatgattgggaagctcagctttggtgtcttttatatccagtcctggctatggttagtgttgtcagttctatgtttgagcatataatttttattttattttactttggaaactatgatgttcaaatcttcatgtattactggttatatttaatttgaatatttcaatattagaagaagtgatttgtttaccaaactctagactcaccagtgtttcaaatatctaaatgatgtctaccatttctttgtctatgtattgcattacagtgcaactttaaggctcattatttcatctttaattgaccagcagggtaagacataatcagtgcttgaaagtgcaaatagagcaaacttgtatgcttcatgatgccaggaactctgctttctttctgtctctctctctctctctttttttctgacttatttctagctaatttatttcgggcaggatttcaaccaggggctgattgtaagctccactcactgcctgccatagtgcttggcacatagtaggtgttcactgtagatgaatgaagggataaacaaatgaagaatgaatgactggtatactagtagtggtgatggcgtggcagtgttagttttttagcagaggcaaattttggatttttttwaaaaatctgaagctggagagttttatctcactgatcttcatattgcccaagcttttatttattttgggggatgcaaagtcttttagaaaatttgctaatttcattgactaatacacacagggtgaggatgatctttggaaaatcaagtggatggattgcctttcacattgtagtaaataattgtcatagattacatatcaaattgcacatagaatttctgcttttcaattttaatttgagttcacctgtcatcctgggacctcagctgtaatctccttttccctgcacggctgactgagaatgcatttccttgtgctttactaggactggaaaaacccagttatgatcatcttagtagtggtctgtcttccaggctttattatctgcttcccaactctcagcatcaaaacaggagttaccatatccaatgaatacaaagaaaatggcttaatttctgacacatagcttattgaatgtgacccaggcagcaaggatgtggtacagaggagctaatatgcattcctcattagtcagctcacccatgtggtcagcagattccttttytaaagtagttgtgtaatctgcagcagcacagtagccaaacacagttgataaattacgtttatttcattttgacaaaaagagtaaatatattcttgtacaaaaatattcaaaaagtttaatgtaaagaagtaaatttaaatcacctgtaatctcaccatctagaaatacactcatttaaatagaagctgccactttactttttttttttttttaaatgtcatggctgttttttctccaacttttattttaggttcaggggatacatgtgcagatttgttacatgggtaaattgcatgtcacagttgtttggtgtacacattatttcattactcaactaatgagcctagtacctgatagtttttcgatggtcaccctcctcccaccctccaccctcaagtggtcgctagtgtctgttgttcccttctttgtgtccatgtgtacccagtgtttagctcccattttkaagagagaacattggtatttggttttctgtttctgcattaattcgcttagcataatggcctccagttctatccatgttgctgcaaaggacatgatttcactcttttttgtggctgtgtagtattccatggtgtatatgtaccacattttctttatccattccaccattaatgggcatctagatggattccatgtctttgctcttatgaatagtactgtgataaacatatacgtgcacgtgtctttatggtagaatgatttatattcctttgggtatagacccagtaatgagatttctgggtcaaatagcagttctgttttaagttctttgagaaatctccaaactgctttctaatttattcccaccagcagtgtataagcattcccttttctctgcaacctcgccagcatctgttattttttgactttttaatagtagccattctgactggtatgaggtggtatctcattgtggttttgatatgcatttctctaatgattagtgatgttgagcattttttcatgtgctgttggctctgtgtatgcgttcatttgagaactatctgttgatgtcctttgccccccaccccacaccccctacttttttttgagacaggatatcactctattgcccaggcaggctggagtgcagtggcatgaacgctgctcactatagcctcaacctcccgggcccaagcgatcctcctgcctcagcctcccaagtagctaagaccacaggggcatgccaccacacctggttatttttttatttttatttttttgtagygacaagatctccctggtcttgaactcctggactcaagcagttctaccacctcagcctcctgaagtgctgggattacaggcatgagcgcccatgcctagccatctttgcccatttttttaatggggttgtttggtttttgcttgttaattygtttaagttccttatagattctggatattcgagctttgttggatgcataatttgcaaatattttcttccattccayaggttgtctgtttactctgctgatagtttattttgctstgcagaagctccttaatttaattaggtcctacttgtcaatttttgtttttgttgcaattgcttttggagtctttgtcatgaaatctttgccagggcctacgtctagaatctcatttcccaggttttcttctagggtttttatagttatacrtttcacgtttaagtctttaatccatcttgtgttgcttttttatatggtgaaaggaaggagtccagtttcaatcttctgcatatggctagccagttatctcagcaccacttatcgaatagggagtccttttcccattgcttgttattgtcaactttgtcaaagatcagatggctgaacatgtgtggctttatttctgggttctctaatctgtttcattggtctatgtgtctgtttttgtaccagtatagcacacttttggttactgtagccttgtagtgtagcttgaagtcaggcagtgtgatgtctctggatttgctttttctgtttttgttttctgcttaggattgctttggctattcaaacattttggttccatatgaattttagaagagttttttctaattctgtgaaaaatgtcattggtagtttgataggaatggcatcaaatctgcaaattgcttaggacagtatggccatcttaacaatatygattcttcctatctgtgagcatggaatgtttttccatttgtttgtatcatatctgatgtttttcagcagtgttttgtaattcttgttgtagagatctttcaccttcctagttagctatattactaggtattttattctttttgtggctactatgaatagaactgcaattttggtttggctctcagcttggatgttactgacacatagaaatgctactgatttttgtatattgattttgtatcctgaaacttcgaagttgtttatcagatctaggaacctttgggcagagactttggggttttctacgtatagaattacattgtctgctaagagagaaagtttgacttcctctcctcctgtttggaatccttttatttctttttcttgcctaattgctctggctaggacttctagtactatgttgaataggaatggtgagagagggcatccttgtcttgtgccagtcttcaaggagaatgcttccagcttttgcctattgagtatgatgttggctgtgggtttgttatagatggctcttattattttgaagtatgttcctttgatgcctggtttgttgagtgtcttggttattttatcaaaagaacttaaaaatacattttatttattacccaagtaatacatgtttacttttagaaaaatcagaagatatagattaaatcaaaagaaaaatacttaytatgataccatgataccatcttgtagatagctgctattgtggtttgggcatatattcttccagacttgtaacttcacaataaattgtgtaaatttataacaaggtatataatttcttataaaactggaagcatactatgcatagttaggtgtaatcatttttctgactctctttccatgtcagtaaatatatttccctgtaatcattactaatggctgcaagacattccattgtatttatgtataaaataaataaatgtatttaataaagcttatactgatgaaaattaggtcatttaaaaactgtctttatatggagtttgtgccaaaaaacacaaacattttacatttacatttacatttctgtgagtccaatctgtcagtcttgttatggtttctgcatttgggatcaggctgaggaattcctccctgatacaaatatttttaaattattcagctctgttttcatctgttttaacactaaagactttagccaatgtagaatttttcttatgtgttatgagccaggaatctaactttaattttttctaaaaaactttgttaaataattcatccccctgctaatttaagatgctggttttgtcacaagcaataatccatataaataattaggtctgtccctaaacttttatatttagttctatgatctatttctgtgccagatttatactgttttgattatcgagggtttataatatgcttcagttgatgtctggttgagcaaaacccctctttttctcaaagttttttggcttgtctaacagctgatcatcttccagatatgtctagaataatttgtcaaattatacaaatattttacaacttgacrttttattggaattatattaaatatgaagattaatttgggragagtgacatatttataatattgtcccatcaaataatataaaatatatctctattgatgaatcttttttttttaactcctaatcacgtttacatttttttttttttgagacagagtatcgctatgtcacctaggctggaacgcagtggcgcagtctcagctcactgcaacttcagcctcctgagttcaagcgattttcatgcctcagtctcctgagtagctgggactacagacacacaccaccacacctggctaatttttgtattttggtagagatggggttttaccatgttggccaggctagtctcaaactcttggcctcaagtgatccacccgccttggccttccaaagtgctggaattacaagcgtgagctactgcactgaggtctaatcacatttttagcttgtcatatagctactgcacattcttgttaagtttattttacaatatcttattctttgtttctattgtaagtggaagccctttctcacttgctctgatgattactagtgcaaatatatgtgaatctgattatatttgtttcatatcatacttgtaaatcatttatttgttctaatatatttttattttatttccttaggtttcccgtagaaacagtaattccattctttagatctcattttcctttcttgacccattgcatagattcaaacctggtctagaaaagtgctgaaaaactgtggtgatatcagggcttcctttccttattcccaacttcagagaggctttaggtcatcactgtccaatagaactttctgtaattacaggagtattctcccaatgtctaatacttgtggccactgagcacttgaactgtggctgatgatactgaaaaaattaattattttattcaagtaaaataatattattttggacagcacagctctaggttttttgtttgtttgtttgttttgagacagggtcttgctctgtcacccaggctggagttcagtggtgcaatcacagctcactgtggcctctacctcctgggctcaagcgactttcctaccttagcctcccgagtagctaggaccacaggtgcayaccactgtccctggctattttttttttgtatttttttggtatagatggggtttcaccgtgttgcccaggttggtcttgaattcctgagctcaagcgatccccctgcctcggcttcccaaagtactgagattacaggcgtgagcctgtatgtgcctggccagagtttcactattaattatttatttcagatgaatctttaacatgataaagtcagcttggggaaaagatcatgggttaaaaaaaagtaagagtattacgtagataattgtcaaacacatgcctttagcaggatgtgaaagggagtagagaatagcatgataactggagtgagatgagggttgaaaaaagctagttttttgtctgctttgttaagattaagtatggctccacatccaactctttatttatcttccccaaatataccatctcactgtattaccttctggtaatattgctaccattatgctactccaaaaccttgttaccactttttgagttctctttctcccttgtcccctaataatgcaaactctccctcattctacccccattcccacaacctgtatctcacccagttttcaagttccttcacaagtgtaccttctgcatgaaaaaacttgttcttgatctcctcagtgaaaagtagtcttgttcttcattaaaggtagaattaatttgtgtcttttttataccacttagtcctgcacattgtcttcttcctatttgttaacatatctatgagactgtacactctgaggatctcatccttgactccttgactgattgacctttctatccttgttggtccctctgctggtgtgctacatatatattgtatacctgtgcttagtaaatatttcttacatgaatcacaattcaacttgtattaatcatttatgtcttgtattcaattgacagcttctggagaacagggatcatatgtatttatttttgtatcttctgtgttacagcatgatactaaacattgaagagttgtttggtaattattttaaaatttttattcataaaagtcgtgttaagatgttttatttaggattgcattttgcttcatttggtggaaatccaatkaaagtaacataaccaaacaggaaggtttttgtgtttttttcctttcaaataacaagaagcctagaggtagtcagtctaggggtggtatagtggtactaggttctcatcagtgtccccagtttttctgtccttaacatgtagcttttgtccttgagatcacatgaggcttttccacctccaggcatccatatttatgttgtttctgtccctttctattaggaaaacagtagcttttctggaggtctctacaaataaacttctgctcttatctctttagtcagaactagggtcaaacgggcatcttccagggagttttgaaaggtattattaactgggtgctttccatccacattaaattgggatttttttttggaaggaagaaagaaaaaataaatcttggatgggaaatctagagtctatatcttggatatggaatttatacttaaagccattaggatctacaagggcatgatatgatacatgtgaagatttcaacaaatcaagacaattttgtaataaattccatatgcacagctggacagtaagtgctatcaaagattagaggtagatgagctccctgaaagatggagttgactagaaaatcttcagtgtaagaggtgggacttgagcagacccttaagagataggtcaaatattatasagaggcattgagtgcttgttttgcaagtgagaagcactttttttttgtttttgaatcattagaccagcttagcaaaaattaatgcactcatattatagggcaatagaaaataagattggaaaataagttgagacaacataatggaggtctttgaatgccaccgtgaagagtttgggtttgaggtkgttcaaacaagcaaatctaatgcaggtttctgaaaagaggaataatatgagggagtggaatagaaatgacatatattaaagtttaaaagaatcattcacagattagttcattcgaattaattaatcactaatgttatatctcctaccctgtagttaagttcatagcactttttttgttttgtttttgagacggagtctcgctctgttgcccaggctggagtgcagtgaggcgatctcagctcactgcaacctccacctcctgggttcaagcaattctcctgcctcagtctcccaagtggctgggattacaggtgtgcgccaccacacccagctaatttttatgtgtgtgtgtgtgtgtgtttgtgtrtgtgtgtgtgtatatatatgtgtatgtgtgtrtatatagtgtgtgtgtgtgtgtgtgtgtgtgtgtatatatatatatatatatatatattttttttttttttttagtagagatgggtttttgccatgttgggcaggctggtctccaactcctgacctcaggtgctccactcatctcagcctcccaaagtgcgggattacaggtgcaagccaccatgcctggccaagttcaaaacacttttgagcaaagcagttgattctaaggggtccaatacctaaaacagatatttgatattgttacatttgaggccctgagttatagaatagtgaagctctagaaatraaattttctgttaaacttattttttatattgccaaggaattctttgcttctgttatcattacagcatattttaaatattgtatcagcatattttatcatattaatacccaactgtaatctttcttaattagcttgcactaaatgatttataaaatgattgaaaacacttgtgtgcttttgactaaatgtgttttattgtctgttattttctcaacctagaattttaagtctattgaaaaatacttaaatttcaatgcagttatgttgactgaatgttttattttcctttttaaatcaatcttaatatattttgtagtttcttttaagtgaggtgtgctggagcatttcccagatacaattatgaattttttaaaatgacagatgtttattcaaatgtaaatctcatcaaatagtaaagatttttatcttctattttaataatatcaattacttctgatggtttgacatagtttgagtagagaaacagtctgattcaattgaaacacataaaatatgcttgatataatttcctacataattataaatgaacttctgaagtctgagttacctcatttagtatttggaatatcagaaattttcacttcagaacatyaaaattagtgccttgtgtctttagactctcctccttaattaccacaagatcttttctttcagggtcttattaatatgaatttgactctatgtaaaaatgtagatgtagaaataattyattgcagtttctcctaatcagttaaaattttagcattcattgttgggtactttttgattactgttcagccctatyccactgatgttgggtttggccataggatttgctttggtcagtggaatgaatgttagtgatgtgatataaagccttaaatatgcttgcatggtttggcttcagtttttttcactggtcatttgttatgagaagagctttccctgggcagctgctgccccttcaccttgggttccagaattaacacaagtgaatcgaacctgagcccaacctatagcctgaaccaagccacccaaccaaacccagcctagatcagtcaaactgtagtcaacatacagacttgtgagcatgaaaataaatgtttgttattgtaagtcactaaatttggggtgctttattatgtaggattgttgtcgcaatagctgactgatatgaccattactatttcaaaaagcacatctatatattttcattaagaaaaagtaaaattatagatggctaacctatcagttctctaktaattgaaaagtagtaacacttaaaacacgaattataaaacaccaattatttgagagtttttcttggctagtggccattacaaattttattgaataaaattctttttttttttttttttttaaacacggtctctctctgttgcccaggctagagtgcaggggcacaatcttggctcaaagtaacctctgcttcccaggttcaagcgattctcctgcctcagcctcctgagtaggtgggattacaggtgtgtgccaccacacctggctaatttttgtatttttagtagagacaaggttttcaccatgttggccaggctggtctcaaactcctgacctcaggtgatccactcgcctcagcctcccacagtgctgggattatagacataagccaccacaccccgccagaataaaattcttgtaatggaacttgaggaataagttgttgaggtacttattattagttttaaaataaacctggctggcactacaagtaatcacaaaatgaaatgacataggaaccatkgctrgcatttgttaagggcctggccacacaagtgtttggcattcttctcttctcctcacagcaaatctgtcaaatctgtcaggcagtcaacacatatttattgagcccttaccatatgccaggtattgcaaagtatgtattaccctatttttgttgcatgaagaaactgaggctcagaaaagttaaatgactagtttaagcctcacagctaggaaagggcttgagttttaggacttgacccaagtccatctgactccaaaaatcatgctattatcatcactgtgttatttgtgtttgggtggaactaggagaaaaatagaattacaggccrggcgtggtggctcatgcctgtagtcctagcactttgggaggccgaggcaagtggatcacttgmggccagaagttcaagagcagtctggtcaacatagcaaaaccccgtctctactaaaaatacaaaaattagccagttgtggtggcacatgcctgtaaacccagstactcaggaggctgaggcatgagcattgcttcaacccaggaggcggaggttgcagtgagccaagattgggccactgcacaccagcctgggtgacagagcgagactctgtctcaaaaaaaaaaaaaaaaaaaattacaaactgatttacctaacatttgttggtgtgttatctctagtcatttgctacataacccagaggtcacccagaatcactttagcattcagaaatctacatataaattagctcagacccaaattgctgttttttagcatgtgaaagtctsaagctgtccgtacaatttctactaattccccggccttacagtcatgtggtccccttcatatgtccttggaggccaccttgatttgccatgtcagtctgagtgtaaagctcaaccctttccagtttctaccagacataccttcaccaagcattttctgagttttggtgaggacctccatgcaaaacacgagatctccaccattctttccctctcaacgttgccccttgattgcaacaccatgccccttttcatattctttactctctgttttgcagattagcttttcccttctattgaagccttgatagcccagatacccaacaactttggagtcatgcctctaccctcaagctggagtgtcagtgagtgccttctttgactctgtctcattacaaagcaaaaatagtgagattctcttgggaaacagcatcagttggaattagtctcatcagtcagacagcccccatttagctcaattttaatttttaaaatggaatttcattgaattttcaacattgacaattttgttcaactaaccttaaatggtgagaacygaaagcatctaatataagagctactcttttcttcttagattagaaataagatactttacataactaagaaaaagtctatctttagaattttagttacttcctacctctttccaaaaatgtgacttataaaaactacagaataaatctggatataagctttttctgtagtttttcccagaccacttttcctattagctattcagagtgaattttaggagcttgaaaacttgatatgtttatgagcccagaatttagacactgctataaatttaaattgtctgaagcacttgattctacaacactgtgttggaaatggttgaagaactgatttccacttctggataagccaaactactctcttatcttgcaaatttgccactaaaatcttaattcctgtcagaattattttcagtgggagaaatctgagtacaaattgaccaaaagaactttagttctcactcatttctaatataattttaattagttcatctttaatttaggaaataatttttctagcaacttggcagacattggtttcttgccagatactaccttatcttgagcttgtgggaaactcatctttaatattccatgagtatagtaaaactgtgtttttaacgtaacaaatattgttttatttattaaataaaacatttatttggrggtatattcttacctaattaaagagaatgagtaaaagatgaggcagaccctgaatgtgagatgcgtttgaaaatggggtgtctcaagattctgtaccgggacattggggttaggcttctaaatactgttagtccagtcttattactaagattgcataaagagcattttatttttgtgtgacctagatcaaattattttgatgtaggatttttcttctcagtcactttccaagtccccagccagcaatgccccacccaggcctcattcagccacactggcatgccccagttttcctgtggtatagcttgtacctgtgttcagcagttcccgaactcttgtcctgcacccaagaagaatgaggatgtgctaaacattgaagggtgaggaaggtggagaagaattttatagagctatgaaacagttttcagcagagaaaggatgcgggggttgtccccctacccaaaggtgggaatgtcccctgtgcagccaggcatggggccttctatggactcagaatggggagtgcgtgctgattggtttgtgtgtatgcaaaaaaggttaaagcaaagacaccactcaaaggtgggcatgacagtgtagaaaaccaattagaaaagggtaggtatatgtaaaataggtgaagggtggggatcaatcaaaggaaagcatgccaaacaggaagacaagttcttaatccagtctgaggatttaacttgtagcttggctttcaggctttaaactttcttcgccttggaggtggggtttcaccgggtaccagcccgtctgcctaggcatttggctgcctcctttctgtatcaatttgaccttcctaaacttcttattcgttatctkttaaataagtattatgtctgccctccctaccttaaaacgttgtaaggtttagatgaaagaaatatacatgaaagtactttgtaacgtacagtacctacagacattagtgattatgtttgtggggcaaaaaaagtaggcaggatggaagaaaggaaagcaaggttgctcttaaattcattccagcagtatggctggaaatgaataatcttcaaatcctgagcagttgcaagataaggaaaggattaccattctgggggcacagcaatgacagggccctttaactggccacagtgawtgccagttccaaccatttcaggtaatattgtctacagtgtgctgagtgccatgttagttactagggatacacaccatgacaagaaacagtccttcgccctcaagaaattctctatctggctgtggacaacacggctgtgtgtctctagcaggggtgagccaggatatggcaggctgggtggagcatggttggagcagaaaaggagctggttattgtgacagggtctggcatgttttttccatcattaaatggagtgatttaaaaataatacaccatatttatatttttaagtcacagagaaaaacaagggtgttttaaaatttggttaattacaaaatcctgtaataacactttttttttcttttaatacatggggagtgacagcatcagcatgatcttctttacagttttgtcatgttttaggattttactatgctcattttaagtttcagggacattattgtcacgatgaagttctactctgttgcttgttggtgttctagtggtgcaacactaactctttggatgtcatttttaacttcgtcttttgtattcaaaagttgaattgctagtgatctttattttggtagtttttaaaggaaataagtgtataatatattayccatactaaatgagaggacccactgacaaggattacttccaattaatggtaatcattttggggtctggaataccttaagtattttttttttacttgtttcttagacaaataataaaataagcttttactttctgaatatacaacaacagggatggagtgaggggagacattccagaagatgccaatagtataagttgctaacctaggattaataactcattgcagaaaattcaggagatgrmggtctagtctggtactgaattaaattatctacggtatttaatgttttactctagtagatttgctggtttggtgtctaccttaacttaaatatttagagaaaaatatggaaaagtttgtgagaaaatgaagtcttgtataaacatccttgtcctaattgttcacctttactgcagaaatcccagactggcaccagtgtggccgaagttcacactgtgttactataaatttacatgatgtagtggatgtyttaagaggtggaggcaatcccatattcaaaattgaaaacaaaaaaaatatttaaatacccaagtgagtaaaaatggactctcctggataagtctggaccatctttcaaagatattgagcgtctggaatttttatgtgcatttcgaggctgcagtttcctctgacagacaatccattgttattactggctgtaggcagtcctgaaagggcagagtcaggaaagacaaagaatttacagtacagaactttcaataatgtgttgatgtcaggaaaagagttgagccatttctgataagaaagaagtgttaatgttaagcagctgtaaatgtactttctgtgatctactcctgcaaagtaacagcagggtatttcttaggcttgggtcacaggatgaatttgagtaatcaatccttaagtgaaagcaaagagagaatactggaagatgtgacagaggtcagccctgggaatggaacatgkagtcttttccaatttgatgttcttgtcccaggtttagatttggcagcagctacctccctcctttaagtcctcaccaccattcccttacaacaaatcaacatttatcagtaactgtgaaagcacagtatcaaaattatttctaaattagagtttgagaaatgattttgaaatttatatagcattcctagtactcaggccaactcttcatagcaacacactcattttgattcttaaagaaatgtgatatattttttcctaaatagatttaaaattttaatcaacacatttggcttatatgatgaaaaactgcctgaggctatggaattgggtaagaacttgttattttggtgaaggtgcatatattctgaagacgtatctgcaagccattgggtacaaatactgaatgtgagtaaaatttggaagttgactgcttcagggttccaaattgggccatcaatattaggatatatataattttaaatccagtcttaaacctgtgtatgttcagaaaatcttttgtcaaagagtgagtaataagtttctatttttccaaaagcagtttaactaagtattaggtgttcagggaccagattcttattcragtcttatttttaagagtttgaagtcaataacttattttctttgtccctcatctcttttattccacttataaagtatgcacactgggctgaacaaagtggctctcgcctgtatcccagcactttgggaggtcaatgtgggcagatcacgaggtcaggagatcgagaccatcctgaccaacatggtgaaagcccgtctctactaaaatacaaaaaattatccggttcatggtggcgcgtgcctgtagtcccagctacttgggaggctgaggcagaggaatcgcttgaacctggaaggccgagactgcgccactgcactccaccctggcaacagagcaagactccatttcaaaaaamaaaaaaatatgcacactaattctggctctcctgcttttgaaggtatcacacatataatactctttgtgataaagccttaaattatcagagtggtaatactttaaggctttattaatccaaagtaagttgtgatattttaaggctttatcaatccaaagtattgttacagatatgaatagtggtacctacattgcatagaataggaactgaatcatgtaaatcaatgctacatcatttgaagtcttgcaggaatggacaagaccagtactcaaagctaacaatattttggcytgattttacataactttcaaatcatcttctcagaaagctaaaccccagctgctcttcaagataagccatgatgacagagtagctataaaagtagtgtctcatagataaagagaagtatgaacaggttcaggctggctgaataatagcccttttctctttgaaaggaaatggaaggaatgtagctgtatttgcaggtaatgaatttcaatcccttattactttctttgggacacatttactacacactgcattaggaaggaggaatttacatttaagtatggaagtggatcagaaattagtagatatataagatcaggcagatctttatcattgagcaaaggtctaaagatagtagtgcagtctgtaattctgtaagtggatatattggaaccataacaacagcaacagctaacatttattaagtgctcattatttattagatacagtattatgtatcatctgttattcatgtgtaaggcaggtagtgtctttattcccattttggagatgaagaaatcaaggtatacagtagttaagaaacttacttaaggtcatacgatctgtgctagctttcakattcagggaacttgacttcagaaaccatactcttaaccagtatgccaaaccaccttctatgaatttgaaaccacctcccatgaattgatgaattcataattcatcagttggtgttaatggaagtggtggaatatagccctgaggccaagttctaaattgtttaggaagtgacccaaatactgagataatcataacaaaaaaagaggagagaaaagaaaaaaaaggaaggaagggagggagggagagaaagaaaaagtccattccaacaggcactgggtattggatattatgggagtctcccataaagtataaggggcccataaccaggrgactgagacttcacagtaaggaacccagccagtagaaactgggatacagggcaaggaaactttccagtaacagtggactggaataaaatcagagcaaaatcagagataaaataattcaaagtagaggcagcatttcttgacaaaagatttcttatgttatctcccctactgagggctgaagttggccccagagtgagatgcatagttataagtcagggttaatgtaatagattcagctcagaggcaaacagaagcaagggcaccgagccaggtaggccattacaaaatggcccaactgggttagagttccaggcaagagacttattttcctaactttactaacattatttctccattgtggcagctcccgcttctgtgggacatggcatcatgtagcagtgacattagatacccaaagactgtggaacagggagatgaagtttcataacataattacaaaatttaacagcaccctttcacatattttatggcccaatctatgttgttattcttttattattttttaagaaatgtagtatgttatgtaatatactgattgcagagttcacgaagccatttgggagattactgggaggaataatttgatatgaaattattatttaattatatcactttcttattctgtcttatactaacttttgcagaatgtatattatttggagagccttgtttgatatccttaacagacagagtaaacattcaagatagtacttttaggagagtagtttgaatagttttcatttgctaattccatcctcttttttctgtgaaagagaaaaacaaaaacattttattttgttttctttcatgtagtgtttatccattgcctccatattttataacagcaccaaagactagtttttctgttctgtttaaagctcatagtttcttagaactagttgtaaatactgttaagagtcccccaaacagttttttaagaacctaatttagtttcatttgtactaagaagctgttttctagatgactaacatcatatagtgttgtttccatcaaaaatattagtctggcatttgtcatgttctgtccactaaatagctttgttattattgaggtctaagctctgattttttatcttatccaaattcctaccttaggggtctagggagtcrtgtcctacaaaccataaattctcatgagatgggttttatttgaccctatatattgtgacttacttttcagtctgactctggcataacattatgagacaaggaaaaaatatttaaccccaaaatatatttccttgttataccttgaaattgccctgcaaagtttcttgtgggaaaaatccacattctatagagaatccccttccccttttgttttccttcctttctttccagatacaggagttaatcaactaagaggtaggcacccttttaagtcccaaaagaaacaatttacaacccccgctctctctgaagtctgctatctgagagcttcctctgcacaataaaagttggtctccacaatcctttaccttttttttgtttcgttttttgtttttttgagacggagttttgctcttgttgcccaagctggagtccaatggcgtgatctcgactcaccacagcctccgcctcttgggttcaagcaattctcctgcctcagccgcccgagtagctgggcgccaccacacccggctatgcgcctggccacacccggctaattttgtatttttagtagagacggggtttctccatgttggtcaggctggtcttgaacttccaacctcaggtgatttgcccacctcggcctcccaaagtgctgggattacaggcatgagccactgtgcctgcctcaatcctttatctttaacctgaacattcctttctgtcgatccaagtctttagacaaactccaccaattgtcaaccagaagatgttggaatttatttaaagcctggaagccccgctttgagttgtcccacctttctaaatcaaaccaatgtatttctttcttttcttttttttttttttttttgagtcaaagtcttgctcttgtcccccaggctggagtgcaatggcacaatctcggctcactgcaacctctgcctcccggattcaagcgattctcttgcctcagcctcccgagtagctgggattacaggcgcctgccaccacgcccagctaatttttgtatttttagtagagacggggtttcaccatgttgaccaggctggtcttaaactcctgacctcaggtgatctgcctgcctcggcctcccaaagtgctgggattacaaatgtggagccaccgcgcccggccaaaccaatgtgtttcttaaatgtatttgattaatgtctcakgccttcctaaaatacatgacaasaagctgtaccctgaccaccttgggcacacgttctcaggacctcctgagagctgtgtcacaggctgtggtcactcatatttggctcagaataaatctcttaaaatattttacagagtttgactcttttcgtcaatattatgaaatgtgtctgagatacatatacaaaagaaaaatactaagatatagcatgcatccaagaaatgcagtatctttctgttaacataaattatctaaattcatataattcatgtgcatttctgagtctcatctcacatcagacaggcagcctgagatgaagaatgagcacgggctcaggttgggacctggtaaaagcaggcatcaccatttaaggagcagagacctctgctaggttgtttcacctctctgagtttgtttcctcatgtatcagttgggaatgatatcgaatttgtatcatccttatgaaaaaacaaatatatatgaagttgcaaatataggttttcaacaaaagttaacagctatcactcattggcatctagactttaagatgattccactcaagagagcgacataattctaaataagaaaatgcttttgatgtaagagtccatttcctgcctctcgggcacgccaccacagcctgaggctccattagctgttgctatctgcagttagtgatttagcttggagcatatcgggcgctgtactaagtgatctacatatgttatttcatttaataacagcaatcctttcaggaaattttggtttctgactttctaccrtgactttgacctatgtacattttcttttagactatgtattcttttgacttttgtctgccttattctagccattgctttgcacaaattatggcactttatgtcatcaaaccatattagytaggaggctgtgggatgcmaataacagagaaccagacttgatctgtcaaaaaataaagggaatttttttcatatacacaactggataattcttcacygggttctatctctgtgattcttttcactctgtcttcctccatggctctgcttgttgtatcagaaatggctgcagcagttcctgacatgacatctttgtactacactctccagaggaatggagagttgctgttttcccagaamgaagctcttggcttccttcgacaggaccagtgtaggtcttgtgctacctctgacaccatcacttagaccaggggcttggggtcattgactggcttatccctgctcttccctgagtcaatcaacggacaagaggaatggtgttacattgcttagtttagacctacacccgaggttgtggtccatgtcacccaaatcgcatgggcatcatggagcaggaggtgaaatgggtacaggaaggccgtcttgcccccagtgtcaaaggaaatgggtattagtccattttcacactgttataaagagctgcttgagactgggtaatttataaattaaagaggtttaattgactcacagttctgcatggctggggaggcctcaggaaacgtacaatcatggcagaaggcaaagggaaagcaaggcatgtcttacatggcggcaagagagggagagcaaagggggaagtgccacacttttaaaccatcagatctcatgagaactcatttactatcacaggaacagcaagggggaaatccgcccccaagatgcagtcacctcccaccaggcccctcccttsacatatagggattacaattcgagatgagatttgggtggggacacacagccaagccctatcagaatggttacaacatttcacttttaattatgacatgttgctagagggtttcttttaaaatttttttatcagtttaaggaagtcatcttcacaattaagtttttttttttaatcatgaatggaagttgactttcatcaaatgttttttctaaatctgttgagatgatcatgtggatttttttctttattctattaatgtgataagttacactcatttttaaaaacaactttagctataatggcatataataaactgcacatatttaaagtatatagtttgatagcttttgacatatgtgtatacctgtgaaactatcaccataatcaaaataatgaacatatgtatcattcccttccaaactttttttttttttttttttgagacagggtctcacactgtggcccaagctggagtgcagtggctcactgcaacctctacttccctgggctcatgtgattctccagctttagcctcctatgtagctgggactacaggcatgagccaccacacctggctaacctggctaatttttgcattttttgtagaaatggggtttcaccatttcctcaggttggtcttgaactcctgagctcaaagtgatctgcccaccttggcctcccaaagtgctgggattacaggtgtgagccaacatgcctggccccaaamattttcttatccctcctgtaatccctgtctccagccccttccctcctacccctgctccacacctgatctactttctgtcactacagattagttgcattactaattgaagttttgaaggttaaattaactttccatttctgaaataaaccagtttgatcattatgtattagctctctctcttacattaagggaacttcaaaaaggtcacgggaaaatggaattaaaagataaaaagaaaaaatataaactttatttttcaacataagctctgtcaagtttaagacacttttataagtgacaatgtcagccatttagtccatccctaaagaactgagggtcctgggatttaaccatgtcagtgcagtctttttcacattagtaactgaagaaaagtgggtgccctttaatgatttattaagattagggaacaaaaagaagtcagaaggagccaaatcaggtctgtaggtggttgcctaatgattttcccgttgaaactctggcaaaattgtccttgtttgatgataggaataagaggagtattgtcatggtggagaaggaccccctgttgaagctttcctgggcatttttgtgctaagcttttggctttctcaaaacactctcattgtaaacrgattttatcattctttggctctccagaaagtcaacaagcaaaatgctttgagcattctcaaaaactgttgccatgacctttgctcatcactaatccacttttgctttgatgggccacctctacatcttggtagccattgctttgattgtgctttgtcttcatgatcatactggtamagccatgattcatctctttacaattctttgaagaaatgctttgggatcttgatcccacttgtttgcaacatccattgaatgctctgcttttgtctgcagctgatacgaagtgcaatggttttggcacctaccaagtggaaaatttgctcaactttaatttttcagtcagaattgtgtaagctgaaccaattgagatgtctgtggtgttggctgttattttttcggttaatcattggccctcttcaattaaggcatgaacaagattaattttttccttaaaaattgatgcagatggtctgcccactgtgggcttcatcttcaacattgtctcatcccttcttaaaatgagttatccatttgtacactactgatttctttgggggattgaccccacaaagtttttgtaaagcatcagggtttagccattcttccacccaagcttcaccataaatttaatgttcttgtttcaattttagcagaattcatgttcctctgatggggctcttttcaaactgatgtcttatccttcttagtgcctcaaactagatcctgttcagacattttatgacaagttagcataagtttattctgatgcaaaaaacccctgaaatctatgcataggtttttcaaaatacacattttccataaactttttgaagacccctattatttctgtatttgtttaaccaacattttgcttctatgtttataaatgagattggggtgtaagttttctttctagtaatgcccttctcatactttagtatcaaggttatgctagccttgtaagatgarctgaggatggggagaatgtttcctattctctgttttattctctggaagaatttatataagacaggtttttttttttaattaagttttggtttgaatcaaccagtgaaacctcctagactcacaagttttttttgttytgttttgttttgttttgagatggagtctcgctctgtcacccaggctggagtccagtggcgcaatctcggctcactgcaagctccgcctcccgggttcacaccattctcctgcctcagcctccagagtagctgggactataggcgcccaccaccatgcctggctaawtttttttgtatttttagtagaggcagggtttcaccatgttagccaggatggtctcgatctcctaacctcgtgatctgcctgccttggcctcccaaagtactgggattacaggcgtgagccaccgcgcctggccaacctatagggttttttttggaaagctttaagttattaattcaattttaaaataaataaggggttgttcacagttttcttcttgtgctgttagtttttataaaaggtatgttttcttgactttttaattgactgtatgcacgtaatatgcatgcagcatgagcaatgagagtgagaccctgtctcaaaaccaaccaaccaacaacaacaataaaactctataagctctgtagtgacgtttcctcttttatttctgatattggttatttaagcttgctttctgtatttcttcattattctccatgggggtttataaatttattcatcatttgaaagaaccaacttttacccttattgatcttctctattgtatttttgttttctgttttacttgttgctgttatctttttatttccttccttatattttctttagatttctggaattttttttgtttgttttttgttttttgagacagggtctcaccatgttgcccaggctggtctccaactcctgggctcaagtgatcctccttccttggcctcccaaagtgctgggattactaaataggtgtgagccactgtgcccagcctattttatttagatttaagttgttcttttcataactttttatcaaggatgtttagcttattgcttttcagcttttcttcttctctaatatatgaatttgggggccataaactttactcgtagaatagttttaatggtgcacctcataaattttaaagaacatttacttcaaaatgggctctaatttccactgtgacttttttctttggcctatgggttattagaaagtatatttcttaatttataagcattgtgaattttctaggtaaatttttgttattgatttctagtctaatttctttatggtaaaataatttgttttgtataaattcaattctttggaatttgtggcaatttgctttcacatatgattttgataatgatctatgcatatttgaagccaatgtgtatattctgatgtttcaaggtagagtattgtatttgtgactattaggtcaaatacgtaaaaagtattgttcaaattttacatatcgttataaattatctgatatacctgagagaggtatgttcagatttctcactatgatttttaaatttctctgttttgtcaatgttgtttaatatataattttgagctatgttactaggtgaattaaaatgtagaagtattatctcttaatagagaagttaaagttttatcattttgaaatgcagttgtccctccatatccataggttccatatctgtggattcaattggggatcaaaaatatttgggaaaaaattgcatctgtactgaacacatacagactttttgtcttgtcattattccctaaacaatacagtatgacaactatttatatagcatgtatattgtattaggtattataagtaatctagagatgatttaaaacacatgggaatacattatatgcaaatactattctgtcttatgtcagggacttgactatccatggattttggtatccataggaggtcttggaatcaatcccacatggatacctgaaggccttctttgtctgatataaatatagcttatatgctattggcacatgttttcattttatatatacttaaaatctcctaatgtattattataactattgctatatttggttaaaaatttaggtttatccacatgtttgcccttttcattgttctttatgccttcctgcatctttgagcttccatctgggagcggaatacacccttcagtgttgtctttaggttagactatcgatacaaattctctacatgaagtgaaaaatgttttttttctctacttcattattgaggagtaattttactggtagagaattttaggtttatagctatattccttcggcactttgaagataattccattttattctggcttctcttgattctttcaagaagtcagctgtcagtctgatacttgcacctttgatgttaatctgtcttttctctcaggtttcttttaatatgtcttctataacttttatttttagcattttttactatgttgtgcttttctttttccttatcttggtttaagtttggagatctacttgaatctgtgcttttggccaatttttgcaaagtctcagtcattatcttcttgaatatgcctctttcccattctctcttccctctcttctggataccttctatctatctaactttctggacatgcatgaatgggccccggcaacctatctgaccccatcccctgccgtactctcgttactcgcttgtctctatcttgctgtttttctaacatgccaagcatgcttcttactcctagatttttaaaaatattgcttccttagcctggaacactgttttcaagatatgtctaagactcattcccttacatgattcaggtctctgctcaaatgtggccttatcagagaggctttctctgacatttattcaaaattatcatccagacctctcctctcccatattgttctctaactctttacctggttttatgcttcttcatagcacttactacaatatgacacattatatatccaatatttatttgcttattctttgtctctctccatttgaatagaaattctgaagttctgtaagaggagagagctttttcccaccccctcctcacagttgtatcccatcccctggaatagtgcctggattagagtaaatgttcaataaatatttgtaggagaatgaatgaatgattaatagatagaagatataggaagagttctctacaggaagtaaagaaagtggagaaggcagaataacaaactaagtaagtctttyaatttgtatgrtctatattttaatctttcgartgtaaagatagtatcattgatcatatttctgttcatcaatgttacctaaaatagcaaaatgaaatattaatatgtttgaagatatagctttcattagtttaaattaactatctcatttagtttaggcatatgktccacaaatttttaagaacatttaattttaatttaaaaaattaagcctaccaaataagatgcattattttccagtgacttaatatgtatattcaagactttttcaattttttatagtataaaattattgtgattgcacatgaaaatttattatttaagcaaaatattatgagtgcttataagtacaaaggctaaaactgatatccctaccaaccacaaaaaaataggccaggcagctgggtactgcctagcctatttttttgtggttggcagagatatctctttattgtgtagatatttaaggactcatatagacccatcattttttatgggcaaaaatcccaactctggtcttctaaatgtcttttgtaaatttatttccctaaataaatcataaatccacttataatacctagacccacacaatgtgtattcgtcatagctgctcaaaaggaatccacagtgtaggtcagagctacttgatgagagaaagtcttgactctgctaataatgtttttacctcactggcacccacagtattttgccagattgcctgaagtcagcatgccttcctgatggtcatggactgttctgcttttccaggaatgtctcaaagggatcctgcctgaaaggaaagaggccatactgtgatatttcactgcttataaagagaccaagaatggcctctgtcttgttcttttagctagcttcaaacaaacttagccagcttaaaaacagaaatggaactgatgaagtcatcaacctagagcctcccgctactgcccatgtattttgtagtctagaatgaagctaataatctcaagaactgcttcctagaaaggttaaggagaaaagcatgccccatcccacttctcctcccatttcccactcttgaaatagcattgttagcatctgatgtgagccagaggagtatttgaggctgtgccatatgtccttgttagaaacactgagcttataatgactaagaaactccagggggttgtctaaaccaccaaggttataaagggcacagcatcatcacagctgaactaaaatttaatatgattcttactttaccacccatggtgacctaagaaggtggtaagggggacaaactctaaatagagggctcagttgtggctcaccaagaagctaaatatgctgttttcatggtagaatagggaagaagaaactggtaaatatttccaaatgtcatgtgtttacatatgaatctattcacttctttatttttaaaattcttctgagaagtactttagaagtaatccctaaatttaaagtatttataacaaaaattttacatattctcaccagtttagagcattacccagaaggaattgtgactccatggtccaggggattagagttagtcattaggggtgggaatttcttctcagaacgaagttagagctctgtaaccrtcttatgtgaccaagtagatgtttgagaaagatctggaattaacgtaatgaaggtgagtagcactgagaatgcccatagagtctgtagcttagatgggggtgggtgtcaccatgatcttagtgttgcactttttggaaactaggtttaggtgaggaatgaagtcacaatcccctaagaagggaataatgaataaactagttatatcagcttattactttagagtagaaaacagacctcatgcaggaatcattctgcatatgtggtgaagccttcttggtgagcagacaaacaaaaaagaaaattcactttttctaaaaaaatagcacatcagacctttgtagcctggagaactcattcttctctactttagaggtgtttctttttctaataactgggaagggctgtctctaaccggagctcctgtaccacccctaaagatatcaataatttctcattctccaacttttagttttcccatttttattggtcctcaaaactttgtctttgcggcactccctgcctcatcatacttgtgacaagttgaattcctaagactcaggctcgtattacaaaggatgcaatttagatgagcaactccctggtgagatgagtggctctctggcaaacggggtggggaacatagagaactaagagtcaggaaacttggggcctatatctagggcatctgttacctaacattctgacccagactatgttttycttgcttcagtggcttaggctgcaaaataaggtccctttcacctttgacacataatccagatcttgtactttactttagtaattttagaaagaagacatttaggccraggagatgaatgtctgttctcattgaggtaatgaggttttctaccactttatttttcttggtaaagtctttgcttataatctggcagcctttatttgtattcctttttcttcctttggctggctggagagcaagtgccattgacatggcccaaagagtatcatcttttcagccttggagcaaggagtctcagagtagagcacccccactccctccccaaatgcctgtgaatgacaaggcaggaaaaacattttttaattaagtcaattcagttgttacaagttgaattaatctctaatttagggatatcatgggaaactatttataatatatgccagctgacccttatccaaatttccatggaaatagcaatgttataacacagggtgttcttggactgctctaaaaattccagctggtttaagtatgatattgaaccgaaaaatgaagccttctactaacaaatgtgttgaagtatgcactcaggtgctcaggaggtataggcttagcttgaaaaaattcaaggcatgataccctgggctttccctcaaacctctttaattaagacctctgatattgttgtgttgtttctatctgaagtcaaatgggaattgcagaaagttttgcagttttttttttctcctccatgaggtagagattcgtctatgccaggagaagtgaagatagtcacgtctttctcttgaatgatgtaataaagttttgcaagggataaaccatgtttcacttgtatcagatttatttatcaaatgtgttgccattaagagtatgaaaatatttcagctgaggccaggcgcagtggctcacgcctgtaatcccagcactttgggaggccaaggcaggtggatcacctgaggtcaggagttcaggaccagcctggccaacgtggtgaaaccctgcctctactaaaaatayaaaaattagctgggcgtggtggcaggcacctataatcccatctactccagaggctaaggcagggagaattacttgaacccaggaggcagaggttgcagtgagccaagatcacgccattgcactccagcctaggtgacacagcaagacactgtatcaaaaaagaaaaaaattcagctgaaataatagcatatgggagaaattagccatgtatttataatacgcgtagtaaaagtgcagacgctatgactatattgcatgcttggtgaaagtaatggcaggtttgctatrttcaaaacatttgaattaatctgttcaaaccatgcacagcattacagaattgacattccagcacagtgactgcagtctgcagcagttgcagttttgtcatctatacaacgtcaaacaagatgcaaaccaccaggcttggtagatagaataccctttgagaattaagtaatcctgagatgactttgctcatcattgatgtcctgtgacgtcaactgaaggcttgtcttgcccatttcaccttgtcattgtggttattggttttctccattaaaatggaaaattggattatatttagcagaatgaacatatatttgatgctttaggtaaaatatatacagtcatatgccacataatgacttgatgttttaggtaaaatatatacagtcatatgccacataattcaacattttgatcaacgaygaactgcatatataacagtggtcccacaagattaaaattaatatttttactataccttttttatgtttagatacacaaatgtcattgtgttacagttgcctacactattcagtaacatggcatactatacactccattgcactccatgtgcgccattgcactccagtctaggcgacagcctaggtttgtagcctaggagcaaataggttataccacatatcctaggtgggtagtaagctataccatctagattcatgtaagcacagtctatgatgttcacacaacagtgtaatcacctaacgatgcatttctcagaatgtatcccagtcattaaatgatgcatgaccgtatgtattatctgaagttagcaccctttagcaaactcctgaatcattaatttgcaaccctttggttacatcttttttcttaccattataagaatttgcttaatatgaatttgtggattaaagtgatttaaagtgctctctatatyagggagattagccctttgtctgtgatatgagatgacaatattttttcccaagtttgacatttttcgtttgaaaaattttttttgtcatgtagattgaaaatttttttccagtacaataacgcgtttaacactggggatacattctgagaaatgcatcattaggcaatttctttgttgtgcaaatattgtagggtagacttacacaaacctagatggtagagcctactacacacctaggatgtgtggtatagcctattgctcctattttacagacctatatggcacgttattgtacttaatactgtaagcaatggcaacacaatggtaagtatttgtgtacctaaacatagaaaaggcacagtgaaaatatggtattataatcctatgggaccattgtcatacatagtccatcttatttatttatttatttrttcattcattcatttattttttgagatggagtctcgctctgtcgcccaggctggagtgtagtggcgcaatctcagctcattgcggcctctgcctcccaggttcaagtgattctcctgcctcagcctcctgagtaatccccacaatctcagctcactgcaacctctgcctccctggttcaagcgattctcctgccttagcttcccaagtacctgggattacagatgcatgccaccacggctggttaatttttgtatcttttttttagtagagatggggttttaccatgttggccaggcttgtctcgaactcctggcctcaagtgatctgcctgccttggccttccaaagtgctggaattastggcaggcccatagtccatcactgatggaaacactgttatgctgtgtgtgtgactatagttgttgctgttttttttttttaatccacagctgacctgaaagtcttttatgtctccagattttaacagaaagccttccccactctgagttagtagagatagtttcctttgttttcttctagtattttaattatttcatttttaaaatttaaatctttactcctttaraatttacctggtatatagtatgaggcatgaattcaacttaattttattaaaaacacctctccagttttctcaagacaattggagttgttcgtcttttcctcactgatttaacttatgtatttatgtatttatttatttatttagagatggggcctcactctgtcacccaggctggagtgcagtggtgcaatctcagttcactgcaacctccgcctcctgggttcaagcaattcttgcgccttagcctccccagtagctgggcttacaggtgtgcaccaccacacccggctaatttttatatttttagtagagatggagtttcaccatgttggccaggcttgtctcgaactcctgacctcaagtgatctgcctgcctcagcctcccaaagtgctgggattacagcactcccaaagtgctgggattacagtggcatgagccactgtgcctggcttagataccctgtgtatcatacaccaaattctgtatgcattgagatctatttctgaatttcctgttctgttttcttgatttgtctattcctgtgtcaggaatacaccttcaactattgtagctttatattattttataataaatgctaggaattgtccmcctcattttattctcttttagagatttctttgaaatccttgttttatttttttctgtataattttcatttttgaattgacacataataattgtacatattaatggagtacatagtgatgtttcaatatatacaatgcttagtgatcagatcaggataatcagcatatccataatctcaaacatttataatttctttgtattggaaaaattcaataccctctcttctagctatttgaaaatatgtaatattgttaactatagtcaccctatagtgctataaaacagaacttattcttcctgtacagctgtaattttgtgtcctttaacgtatctcaccatcttccccttcccccatctccctatcctctagtaacttcttttctactttttacttctawgagattggctttttttttagctcgtgcatatgaatgagaatatgaggtgtttaactttctgttcctggctattttcacttaacataatgttcttcagtcccatccatgttgcaggaatcacaggatttcattcttttttatggctgaattgtgttccattgggtatatataccacatttccttgattcatttatctattgttggacatttaagttgattccttatcttagctactttgaatggtgcagcaataaacatgggggtgcagatacctcttcaatgtacygatttcctttcctttggataaatgctgagtagtgggattgttggttcatatggcagttccatttgcagttttttgaggaatattgttctccatagtggttttgttggtttacattcccaccaacagtgtgtaagtgtttccttttctctgcatcgttgttttttgtctttttgataatagctatcctaactggggtaagatgatatctcactgtggttttgattggcatttccttcatgactagtgatgttgagcttttttttccatgtatttttttggataaatgtatgtctcttttgagaaatgtctattcagatcatttgcccattttttaatcagatttttttttttttgctgttgcgatgtttgatttccttgtatattctggatattaatcccctagtggatgaatagtttgcacatattttctccattctacaggttgccttttcactctgttgtttcttttgatgtgcggaagcttttcagttggatataatctgttcatttttgcttttgttgcctgtgcttttgaggtyttattcataaaatcttgccccagaccaatgtcctggaacttttctcctatgtttttctctaggagttttatagttttaggtattacatttaggtctttaatccacttgaagttgatttttatgtagagtgagagatggaggtctagtttcattcttctgcatgtggctatttagttttcccagcaccatttattgaaaagattgttctttcccccaattaaygttcttggcatctttgtcaaaaatgggttgcctgtagataaatggattaatttctgggttctctattctgttctactgatctgtgtgttattttttaatgtatactttagaatttgtttgtctcattctcccccsacccctacccttctccaatttttggccttgttactgtagttataattaattgctaaattagcttagggagaacaactttatgaggttgagtcttcctatctaactaacttggtatgtcttcccctttgtacaagtctttgtgtcttcaggaatgccttaaaattttattagtaaatatggcacatttctaaagctttttcttaagtatttcatctttttctgttgctattgtagatagtcttcccccatttcatcttccaactttctgtgtttgtaatctaaaatctattgatataataattctctatcgtgctgcctaagttttcttgtttactttttcaattgaatgtcatagggttttctatattcatcagaaattgtagtagttttattatgttctctaaatttttatacctctagtttctttctcttagtaattgtattgtctaatatctaatatctaggatgttaagtaatggtggtgacaaatgagcatccttctttgttcctgaattgagtgggaatacctctagtgttgtcctgctaggcataatagttactttgggatcaaggtatattttatcaagttaagaaggtatccacttatttctaccattgatttcaacatatttctaaatcatagtaaagccccagggctatgtacctgcaccatgataggataaaagctctaaaaggaaagacacttaagaccctctagtctaccttcctcccatcatgagtattaaattccaagcacaggaaggttgtaactattccctgccccaaagtcctaaaattagattagaagacaatttggaacactgtctcttaggtcttatagcagcgttttttggggtatgttaggctaacactatttctctataacattatttctcttcctttgtgctctctccttgagatttttccattttatccttctcttctcatctcacttctgggacttcacgtgtattgcttggctgtgcattcttcctccagcctgccattgctgacaagccaagtttatcttaggagagttctagacagtgacataatcccttccccacccaaaaagactctttgctatttgctcttcctggacaaagtacattgtcttccaaatgctgttggttacatctggaattaaagcagaaagctcattggagctgctgaacacctcaaaatatacttcagtttttacagtgcctttagcaaggtgattttagccaacagtgaaagtatcataggcactactgtatcktatattcatttgtaggtggtattcagatttcaaaagaaattgtcataatatttattatatttaaatggaaaacataaacaattacatattagtgctatacttctgattttagattcacctgtgtcataactttaacatcaaaattagtaaatgtttcatatgctaagaaaacttatatgcaaatggaaaaaatctaagccaattattattttcataatgttctactgtgaaacaaaagatagtatttctgtccatatgtagttatcagactctggagtcagatagacttgggttagaattctggatttaccaccacctggctgggtgactggacagaagtaacatattctcaactgagtctcacattcctcagctgcagaatggggacagaaatactttgtacagttatatgagaattaagaaaatgcacacaaagtgcttagccagtggctaccatgccctaagactttaacagatgataactattaccatagcctattgttaatggctgtaataaagcctgttgtttttaacttttattaacttaaagaataaatgttgcagtttgactcagtgtgggactataattgcaaagcaactcatttatccacacagcctcctttctgagaattagaactaatgtacttagaaggatttgactgaagttctgctctggattttcttaggaattatttgggcaaccatgtccattaacacttatctagaaccgcaaggctgaaagtatgttattgtttgattaggttttcattagccaattattatttattgaccatatgataggtggaatagataagtatcacaaaagacatacgattcctactctacacatttagaactaaaaacagaagggcatctttgatttacttaaagggtccactttgtgctagatataataccatgccctagggatacatagatgaaaagatagccccctactctgaagaaacttatggtctagtatggtgtctagaatggaacttagaagccacttcttataggaagccttccctaaacttcaggtagggaaaatttccctcttatgtcatagcccccaagcttacacttaagtttggcatttgtcacactgtagattgtctgtctcctatgctagactgtaggctgcttgagaacagggactatgtcttactcatcaccgaagaaaagaagatgactaaaacatmatcttggcccttgaagaacttaaaattgagtgacaaatataaactacraacatctgtaaacaactaagctcaaaatacatttttatgaattataaattctacagagtatatgctacaagaggtaggaggttttggaaagatgatttagaagayacggcatttcagtttagaaggaatggtgtgatttccatggttgaggtgggcaaatgaatccaaggttaaggaacatcatgagcaaaggcacagaatcgggactgtacatgggctacttaaggaatagtaaggagttccatgtgagtggactctggtaagaatgttaggtaggggattggttgtagctgatcttggatgcagtagtagggtgtttggattttcttctgcaggcagtggtgcattgacaaggatatttgagcaaaagggacatgattactttgtcaatagtgtaaatgatgggaaaagagagataatattcaggaaggggactcctgggactgccaataatgtagacaagaggtattaaggtgagaatagatatggaaagggaacaattctggaagcattgtgcaaattgacttgtcagactctaatttggaataagggcgattccaatttaaaagtccttatttcctacctcggtggagcttgcagtgagccaagatcgcgccactgcacaccagcctgggtgacagagtgagactccgtctcaaaaaaaaaaaaaaaagagtccttatttcaaaggtgatggctctagtttacattctccgtcatttacatgctctggccatggcatgggtaaagtcactcagaaagcgtttaaagaaaagccagagggaggtcacagaaccttgtggaaaacttatatttaaggggtaggtaaatcttcatatttagaagagattatgtttcaaaacttactaaaaagacaaaaatgggctgggcacagtggctcatgcctaaaatcccagcactctgaggccatggcaggaggattgcttgagcccaggagtgcaagatgagcttgggcaacacagtgagaccttatcactaccagaaaaaataaataaattagctgggcatggtggcatgtgcctgtagtcccagctactaggctggctgaggcagatcacttgagcccaggaacagtgaggctgcagtgagctgtgattgtaccactgcactccagccttggcaacagagcaagaccctgtctcaaaaaaaaaaaaaaaaaaaaaaaaaagaaaactcacatagttttcatcctttaagtggtttgcttaagttaacatctggtttatggcagagcccccaacccctgacatgtagctcagtgcactttctattttatgctctagattttagtttaatgctaaatgtgaggatatcacctaccttttccatcctcatctatcttagtaaaccggattaaatttgaattctggacccctctactttaagtatcttctatctcagccaggcgtggtggctcacgctataatcccagcactttgggaggccaaggctggcagatcacgaggtcaggagttcgagaccagcgtggccagcatggtgaaaccctgtttctactaaaaatactttagctcggcgtggtggcgcacgcctgtaatcccagctactcaggaggctgaggcaggagaatcacttgaacctggggaggtagaggttgcagtgagccgagattgtgccattgcactccagcagaactccgtctcagggcaggtgggtggggtggggggggygttgaaagtatcttctatctcatatgttgatagctaccaatagcaaagagaaaattgtgccactggaaaacagggcaagtcatctatatggatgccacttaaaattatgtgatatgaattgatataaaaagcctaattaaatctaccttatgtttcaaaggcggtaagttaatcttttacattattgtttttatactctactctttatgtaaaagaaaaactacttcattttcaaatggtaaattattatcacccaaatacattgctgtatacagaagtggaaagattttgctcaaataagccaaagctaatgatttcattataattctatagaagtttttgttggtactaatactgtaattgtctatagcatatgccataggtattgtttgaaattgtttttatctcttaattatcaaatgaaatatacctcaaagagggaggcctgaaaagacatgaaactttgaaatatagagcatcttaaaaagcaagtacatggtgacgccagtcttcagaatagcatcatccctgttgaacagcataaaaaatatatggatttgatgatctatttggctggaagataaaaaatgaaccatcatgagccattattaaagaggtgtttataactgaaaaactgtgataaaggtcagttgacaaaatgagtggagcactgtaaatactaagagttgatggcccatgcctagataattcagtgtttctattcttagaaaatggattttaaccatttgaatgggcctagtaaatgatcctattacaattttcacatatcaattcatggtttacccaaaaagatgtgcagcatacttttaaattggcctttttctggcagagagtttccagaaaaataatgtgtttttttttgttttgaatttatttgcttactttgggtttttcttaagcaagaatattaaagtacaatatacatacagagaagtatgttttctaaatgtacaactcagtgaagtttcacaagttgaatatacttacttatccagcacccagatcaagacacaaaacatcaccagcgcttcagaatctaccatctcttacttccttccaatcaataggtacttaccaccctaaaagtttattgggagacaattctcccatgtgtctcatgtttctgcatatcttgtgagcaaaggcactgactgcgtgtgttcagaatgtctttccaaggcagccttggaagaccatgtctccagagcaaagggcaggtgtgcttatagtcttgaaaatagagattatgtcccttagagagcaaagaacaggtttacttactattcggtataatagagatgtctcccttcaaagcgaaaaggacaggcatgcttactgcccattataaaagattcagattccctatgttccctacaggagttcctctcctgtaacacaatccactgtatgtacaggtgtcacttgactttctgttgccttgtgggaattagagctcagggaaccagtgcaaayactgacactctgactattgagttgtaaggtcctttgtctctgacctagcatgtaaggctaacttgttaagcttgcaaggagsgtaaatctcagacccgtcactgtccttggtagtaagcactattctgacttctaccaccatagattagttttacctgctgttacacttcatacataaaagaattatatagcatgtactctgtctggcttcttacatccaacaacatatttgtgagattcattcatattattgcatgtaggcataattctttcttaatagtataccattgtgtgaacattttaaaaaattgggtttttttttccactattgatggacattagggcagctcccagtgtcagctattaaaattctgttgttagaaatactttatgcatgtctttgagtgaatatatgtatatatttccgttgggtatattccyagaactagatcagagggttcgcactggtgctgccaaacaactttctaaagtatctgtacaaagctgctctcccataaacagtatatgrgccttttggtatctctgttattttcaacctttgttattttccatcatctttgttttgttttttttcagtgacatgcttcaattttaccatcatccattcataaggaaagatcccattggcataatggaattataccattggcataaaataaatatgccaatggtcgggcggatcacaaggtcaggagatttgagtccatccttgttaacacggtgaaaccccgtctctcctaaaaatacaaaaaattagccgggcgtggttgcgggcacctgtagtcccagctactcgggaggctgaggcaggagaacggtatgaacctgggaggcggagcttgcagtgagctgagatcgtgccactgcactccagcctgggcgactgagcgagactccgtctcaaaaaaaaaaaaaawatgccaatggtataattccaatttcacaaaacaatctcacaagcacttccactctttaggctgaggcaggtgaatcatgaggtcaggagttcaagaccagcctggccaacatggtgaaaccccatctctactaaaaatacaaaaattagccaggcgtggtggcacacrcctataatcccagctactgagraggctgagaaaagagacatgtcaattactaagttgttaccaggacaagttatcaaaaaggacaatgaaagccataaatattttgtartttatttacccatgaacacaatagtttccagtcttcmgcatcagataagaccaagttattcaaattaaaatgttaaagatacggttttaacagaaacaagaacaggctgaaaactgccatgaatatccatatccacataatgtacaaaaaagaaagactgatattattccaaatatttctatttgaaagtaaaagaaaatctgtacagctgaatcttcccagtaaacagaaagagaaaatattataacacagtattaatcttccacataagtaaggccatatgcaaacaagaaagagaacacccaaaattgcagtgtttcttcaaagaacccttctctagggaacatatttaacactccaaccatcttctattcttctacgtgcatactaaaaaaaagtacttctcttcccatcataactagtcaacccagtgtaaattctaggcccgattttcccctgaatcatttctgcctttttgttcagttttccctgcctagagcacccatcacaatctctttagttcttctatccactctgaactagaaatcayctttcattccatacagctctgtagtcctttaaaccctctaggaattgctaaagaggggtgaggggctgagaagaaaggagaatgggcaataagaggtctggcagtctattttacagaacagcctgcctctggacatgacaaagagagccaagaaactaaaaagcctgcttctgcggatgtttctgaactactacttttgttttttttaaaggaagacagaagagatttatgagagatgagagaaaagaaagtgtacactcactctggcacttcattaggttcaggaagggaggcaaataaaggtacctagattttgaatgaatccactggttgtggctgagaaagcctggtacttgtcaagaacaccaacatattaaccttgccatgaggatagggtctgacatgtcccctcaaccacctgtctaacaaacagtagggtttctgagtgatgagggtggtggtggtaaagagaggtcttttggaagaggaacaggtcttttgtgtgctgacaggaaagctgtgtccaccaccagtgttctggagatccctgtttattagaaaccagagagtggagctggcaatggtctgggatatgttcactcagcagggagctgcccaagtagcagtacttgggaatagccagtagcaggcagcaataggtgaccagtctcaggaaaagtaatggggtcccataattcacacagaccaasttgccccctgctgttctcccttgacttcattaatgcccagcaattgtccacaggccatgcacctgtactgtcagatgcagagcagggtgagctgaataggttcttagacacagctagaaatccaagtaggaggagccagaccagaggtcctgggaacaaaccgagtccaaacaaaggtaaatacagtgtaacctacagcatcattcgcttcgcttagaaggatgtgacccatcggctgggagcatgtgatgttaatgcagaatagcaagacgaccaggtgaaaggggagcagcacagccaccaaggtctcaatcttcaggttgagagaacggaaagtttaaacagagggtacaggaaagtcagaacaaaaaaagtaaagggcatacctaatgctgttgcccaagctcaggtccagctggtggtggcaggcaaccttctgcaggagtaattccaaaggcaaaggttaaccacactggaacccaaagggcctggggatctccactggctcccttaccaggcgacgtctagctctatgggcgtcttcacccaacaggtagtactgcagtggatttgaccagaggtcctctttaataatctgagcaatcctgtcggactctggaaggctgtggtctgaaaaccaggtgaagaagctgcagatgacatgtcggttcctatgaatgaaggactggggtccatggccccggcgccacatgattagagtggaaaaagacaccacttggccgaaggatctgacctcatacacctttacaatcagcttgtttctgaagtaagggtttctttgaaagaagaacttaaacttgcagcctgtcctagggtgtctgagctccttcacttccaaattggttaagtagcttaacatctcggcatcttggcctctaatcatggcagacagctgtgggtggtggcggaaagcagtgacccagaagcccgggatattgcraatgatgtcattcctctgctccaggtagtattcatgaatctgcccaaacctgcgctccacctgcaggagcgccctgtcagcctctgcattcacggagtccagttccagctggatggactccagggggttcaggtggagacccacgttcaggggcccgggcccgggcccaggccctgcctccctgtttacctcatctattgctctgttttcttccgccacgtccatttcttcgcctcctggcttctcatccactggggctgagaacatggcacactcctcaggcttcacrtcctcggccttcccctctgcaatcacttcagactccgacctccctgccccacaggtttctagagccttctccccacctaggccgtgcgtctcttcacccrgaaagccatttttgaggctgcygtcagttgtcagcgaggcagaggcygcttctaggccstccgcgggtggtggagtcacttcctgccccgctttgatggctccatgactgcgacccgcatcgaccaagatgtggaargtatggccaccatctgcgggatcctggggcrcgaccccctcctctggaagccggggcrgtgggaacacgattggctccaagcggccatcaaacatatctgccattacctctgtcgccttgctcttttctcgggacctctggccctggtgcgggtcttccagagcatagtcgagagtagcggggctgtgaggamtctccgggaggctcaygttggtagcggccagggcagcagtgggtagaggccaggccagaggtaggtagcgtcaacgttcctcacacaaaatggcgagtaaacacctcgcccatttgcrccgcccactcttcagtctcgcgacacccacccctcagtctcgcgacactcacycctcagtctcgcgagtctgtggtggtgtctttacgtctttgttattttagccatcgtgctggatgagtaatgatattacatggtggttttaatttgcatttagccaaagtctaatgagctgagaaccttctcatgtgtttgttggccactaggatattctctcttgtgcagtatccgaggcttctccctatttctctactgggctgacgttmtttttcatatggatttgtaggaagcctttgtacatgctagatactagtcagtcattcttccagtataggtattacaaatatttctcttccagtataggtattacaaatatttcctcccactctgtggggttacttttcttttggactcgtagtttcgctgtcgccgaggctggagtacaatggcatgatctcagctcactgaagctgccgcctcccaagttcaagcgattctcctgcttcagcctcccaagtagccgggattacaggcgcccaccaccatgcccggtttttttgtttgtttgttttgttttgttttgttttgtatttttagtcaagacatggttttgccatgttggccaggctggtctgaactcctggcctcaggtgatccgcccatcttggcctcccaaagtgctgggattacaggcatgagcaaccgtacctggcctactttttcaccatcttaatggtaccttttgaagaacaaaagtttttcatcttaatatgtgccaatttgtcattttcccctttaccttagtgtttttctgctctgtttaagaaatcttacctctcacctgggcacagtgcctcacacctgtaatcctagcactttgagaggcrgagaygggaggatcagttgagcctaggagttggagaccagcctgggcaacacagcaagaccccatctctatttttaaaaagaagaaaaaaagaggaatcttatctcaccaagattgttcaaatttatatatgccatccatctggaattgatttttatgagtggggtcacaatttctttttttccatatgaatatctaattgacccagcactgtttattgaaaagacaattctttccccatgcataggtttttaaatgtttctgtcaraagtgacataaatcattggctacagctagtcagttggccttgtctaactttaataggacagggaggtgtaatcttctcttgagcctggaaggaggaaactggaaatattggcaagtgctgtatcactcatcatgaaaaataatttgagaaatatataaaagaccaatagaattaggccaaaggacatagagaaaaggtaataataaacaggagaaatttatgtaagacaatacagagcattaaccaaagattaataataaaaggagagagaaaataagcaatatttggagagaaaattatagtcacattgatggtttaaataaatataagacaggatgttagacagctktatgccaatacattttcaaacttagatgaaatatatggcttcatagaaatgtataacttatcaacacggactgaaatgcaatagaaaatctaaatagacctagagacaataaacaaatggaatcagtagcttaaaaaaatgtttccacaaaaatagcatgaggttcaaatgattttgaggcgactgctaccaaaccttcaaggaacacataatccatttttatatttattaaacattcaacaaatatttattaaacattcaacaaatgtttattgggtacctactgtgtgcctggtactcttataggccctctggatataacggtgaacagaccaaagatttcttccctcttggggtttacattttagcaggggagaaagataataacaagaaaccaatattgcacattagaaagttataagtgctatggaaaaaacaatagrgcaaggagattgaaagtcctgggggtagggagtggggaggagattgtagtatgaaatagggtggtcagaggaagcctcattgaaaatatgagattttggcaaagagtcaaagaagttgagggagtcagctagtagaaatcctggaggagagcatttcagcacgagaagtgctaagcagaggcactaagacaggagcatgtctggaatgttcaagaaataacaaggaggccagcgtgactggagcacagtgaatgagggaggctagatcaagtagggtcttgtatgatagtgtaagaaatttggcttttattcttagtgaaatgggaaattactacaggattttgagyagaggacacaaaatctgacttaagttttgcgtgaatcactctggctcctgggtgaaaaataatctgtatggtggcaatggtagatttagggggatcttttgggaggctactgcagtaacccaggtgaaagatgtttctcagaccaggtggyagcaatggaggtggatggtggacatagtatgatggtagagtcagcctgatttaatggtaaattggctatgggatctcttagttcattttctgttgctgtaactgaatacctgagactgggtaatttataaagaaaagcttatttaactcacaattctggatgctgagaagtccaatatgctgtgctatgaagtagcatgacaaaaaagcagaagagcaagcaagcacctgggaaagaatggacaagagaggctgacttgcattatagcaacccactctctcaaaaactaatccattcccatgagaagttatccagccttgcaagaaaaacataaatccatcttaacaacctgatcacctcttaaaggccccacctcccagcatggggtgtaagagaaagagagaagtcaaggatgactccaatgattttgacatgagcaactggtaggatggagttactggaagcagagatggtgaaggttataatgaggaagatctttgcaggaaaatcagagttgtctctcttttttaacatattgtttgagatgattattggacaccagagttgagatgccaagtgggcataatgagtttagagctcaggagaggtctgagatagttattcacattttgggataatcagcatgcatggaatttaaagtcaaagggttggatgagaacactaagatagtgagtcctgataagctgggccctgaagactccaaaagtataaggtcaagaaaaagaggaaaaacagcaaggaagactgaagagagaccagcagggtaggaaggaaaccaagagagtgcaatgtgcttgaagccaaatgtgtaaaggaaggtgttcagctgtgtcacagggtgctcacatgtcagttagtatgaggtctgagaattgaccgtcggattttacaacaaagagtcactggtgactcaaaaagagcacttycagtggagtggtgggggttgaaatatgtttgaaagggaaagggagaaaagaaatggagattgaatattgacaattcttttgaggaatttttctccaaaaagaaacaaagaaatgggatcatgacaagagtagtcaagctactttcagtggagtggtgggataatagcttggctggaataagtttaagagaaaacaggaagcgaaaaagtgaaaacagcgagtatatacaactgttttgagaagttttgtttcaaagaaatgggatgatagctggtggggaaatggatcaaagaacgtgtttttaaaatgggagatgaagcatgtgtaaagaagcaggttgatgtgaatgatccagtagggagcataaaactaatgatgtaagagacagaaggaagcattattggagggatgtcctggaatagacaagaggaggtggaatctagtacctaagtggagaaggagatgtcagctttaggagcatggcaagttcactagtggtaactggcaggaagtcaaagtgtgaggtgtatatgctagtaaacaggtagaagtgatagtgagatttatgaaatcgtcttctgattgcttcattgttctcagtgaaatagaaagcaagatgatcaaatgagtgtgaggatggggcaacaggcagtgggagtctgaggacagagaagaaggtatgaaatagttgtctagagagaagagtgactagactgtgacctaaagtattgtcagacaatgttaaagtcatgaattggaaatgaggcccatcagcatggctatgaatttttctccagccgcattcaacttacagctgcagtgtgaataagcagagttggatttagacctgaaacaagaagggcaagagaataattataataattgatcttagagtttaagctggaggacggaagacatacaggatgaggtcagtgaaaaggtggtctgatcaatgaattggaagattcagggtactgaaggtctcctggggtcgagtcctagggagaataagctagagggctgagagacagtgrtttgagaatgacctgcaagggattagtcagaatcccattcatgaatccaaggtggtctctaatgaggyagacagaggatagggtaaggtcattgcaggggaggaggtcaatgagccaacaggccaggatgggaaggatagtctatgtgtatattgaaatcactgagagataagacaagagagaagtgagaatgaggcaggagctaaaaaacatgagaaatgagagggaatgacatgacagtagcaacgttttagggcaataggtggtccaaaccattgacaggagactcaaagctggatatgtattctagggccaaggtatakcaccactacctttcgataaaatcagttagtgggaaggcagacamctttagaattttatatttcttaatgtcacagaccctggtattatacatctccccaagggtacacatacattaggaaacatgtattttttaaaattgaaaggtgagtagtgatattattctttgagttcattgtgaagtgttattttcttttggggttccattctgctttgttttaaggcatggactagaaacagttgaaaagaataatayacaatttcaactttggagcctgaaatattctggctataatttttttttcctaaaaaaagggagaacaaggagagctatataaaatctctgaaatgttttgtcaactagaggcagaaataragatgtggagaaagagggagagggagaaaaaggaaagaaaaatgaaaaatgagtaagggaaggaagaacgatatggcttcttgggaagagtacaatttagccactaatctgcacatcacagaattgtaaagtgtttaaattctctgggaaacmgaaaaacatgatgttttaaaagataaactcaatattagatgactgaaaagagcctgygaattgtatagtcttgttttccttggactcctcaaatattctttttcagttcttgttttgaaagggatccctctctcttgacttaaattctttaaacaacattgtttatatagtgatttaacatacagaactatttttcttagaactaggccacccagtttagaaagctgagggcctgaatacaatatgttactttcgtaagattcaaaagaatgttggtaaacaagagagggagatgtacactttgctaatttcttctgtttcccatggaaagtttatcaaactgtttgtgaaggaaatggtcaaaaagaagttttaagtgattaaccaagtagctttacagctgcagtcgtctttattgtatataaatatagataagagaggagaaaaatatttgagttaccagggcatgggaaatgatttaccttggcaaagttaataaattatgatttaatcattttctactaatgtagcactcatagaaagaaaatatacattattgtgcctggtgaaactgtaaaaggctaaaaggtctatgtagagtcctggcctgatagactagccccagagtgtttcagccaggggtgagcagagccacaggcttgtgactggacctgtgtcctggctagtgtcaagcatccccaccastgaatgcgatacaggagcaaaatgatgcaactgctgttacagtgtttatgttacacaaaaccaaaataccagtatttataccagactcttattttaaaagtgttcagaattcaggaaatacaacagtgaaactaagtaatacgttttaaatgcaaattttaaaatagatattataaaatgtttctaatatctaagtgttagacataatcactctagcctaatttagataaaaatttttaagtattagaaaagaaattgatactacagtaaatgaataagttggttaatcatggaaaattgaaaatgaaaaagagtgcattgatgatgtcatcattaccataagagtattttttggagcaaattttttccagctgctataaaagcttccagtttctacactggtggcagagaggtgaacagagttttgctctaattcctattattttcttgagttgtcattttaggataatctctctgtgattactttttttttttagaaataactttttatggatggcaaactgtagtttttgtttcaagtaaagcatttctggttttaactktatcatctttaatttatcctgtttgaatatagattaggtacaactgtatcaacctaattaattactgtcccattcacattccactttattgaamggtctttgaagtaggagtaagatttatgtatgtgatagaaggtttagaagctgggtgtagtggctcatgcctgtgatgccagcactatggggggccaaagtgggagaatcacctgaggctggagtttgtgtccagcgtggacaaggtagtgagaccctgtgtgttaggtcattcttgaattgctataaaaaaatacttgagattgggtaatttataaagaaaaaagtgtaattggttcagcaggctttacaggaagcatagtgtggcatctgctcatcttctggggagacttaaggaagcttacaatcatggcggaaggcaaaggggcaasaggcacatggcaagaggaggagagagagggaggtgccacacacttaagtgaccagatcttgtgagaactcactcactgtcaagaggacaacatcaaggggatagtgctaaaccattcatgagaagctgcccccatgatccagtcatctcccaccaggctccacctcgaacactggggattacatttcaacatgagatttgagcagggacaaatatccaaccatatcaccgtgtctctacaaagaaatttaaaaatcagccaggcatggtgctgcatacctgtagtcctagctactcaggaggctgagatgggaggatcgcttgagcccaggagttggagcttccagtgagttatgattgccactggcactccagcttgggtgacatagtgacacaccctgtcgaaaaaaaagctttgggttgtccattgatattttctctttcctttggaggagtatagagttgctccttcattcttttcaaattttaatatagtgtataactctttgcatatgtttcaagatgataattcagcaccttttacagtactggataatcatagtaaaataaatataccagaatttcattattttaacatacaccatatactgaactgccagaatactgagaraagatattacaatcactagttgaaaccaggaagccagcttcagtcatcaaatccaaacaaacagtgagcacaggaagagcagtaagtgcctatttattgaccaccttttgtgtgtcagggaggtgatagatgtttagtggtgaatgaaacaggcatggatctgtgtccagaattggttccatctggtgggttcttggtctcrctgacttcaagaatgaaacgacggaccctcgcgatgagtgttcttaaagatggtgtgtgcagagtttgttccttcagatgttcagaagggtccggagtttcttccttccggtgggttcgtggtctcgcttgatttcaggagtgaagccgcagaccttctcagtgagtgctacaggtcataaaggtagtgcggacccaaagagtgagcagcagcaagatgtgttgtgaagagtgaaagaacaaagcttccacagcgtggaaggcgacccaagcaggttgccgctgctggctctggcggtcagcttttattcctttatttggccccrcccacatcctgctgattggtgtgtttacaatcctctagctaggcagaaaagttttccaactccccacccgacccagaagcccagctggcttcacctctcagatcctgctcagggagcttagaatgaagaaggcagaagcaggagactagccaggaagggcggaagccaggcagacagtgctgcaaactcacatgtaaaaaacaaggtgggaggaaagggagaaggtccaaggtaattgcccaaaaagggatgccggtctggagatgggtggatgcatattrtacagaaacaagtagaaatcttaatgccctttcaaaaatataagtataaatttaggtggtgagttgtttcaacaagatacatgatccttgtttggggtaggggacagtaaagctctcaaaagcattcttgggacagtggaggaaattaaaatagggactggatagtaaatgtttaaaagaattacatgaattttcttaggtgtgataaatggcattaaagtatagaaaacagcattcttattctcaggaaaggaattttagtatttagaagtcaagtgttaagrtatttccaacttaccttcacaaagttcaactacaatgccaaaaacaaacttatggggagagagggaggaaagaaaatatagcaaaytttaactaggtggaattatgtagctatttgattgtactatgctttctatgtatgtaggaaaatttgtataataaaaagtagggggtcaaaagataagcatgtgtattagtccattttctcactgctgataaagacatagctgagactgggaaatttacaaaagaaagaggtttaatggacttacagttccacgtggctggggaggcctcacaatcttggtggaaggcaaggaggagcaagtcacatcttacatggatggcagcaggcaaagagagasagcttgtaaatggaaactcccatttttaaaaccatcagatcttatgagacttattcactatcacaagaatagcatgggaaagacccacccccatgattcagtgatctcccaccaggttccttccacaacacatgggaattatgggagcttacaagatgagatatgggtggggacacagagccaaaccatatcagcatcctactctccttttgacaatggatgaggcagytgaaaggaataccaaggagaaaggggaagaatgcagggtgtggcctattatgactttgggcaaacgcttaacctctttgagcctgagttttcttcctctgcttcacagataaatatctacatacaggggtgatatgaagattaattaaataagttgaaatgtagtggttaagagtggtaagtccaaatctcaaactgcacttagttactaaataaccttgggaaagttacttttgtgcccagtttccttatctgtaaaactgacataataatagtgcctacctcccagaattgttgtgaagcacagaattgttctaaagagcgaagcttagcatatattaagtatttgataaatattggctctcattatttttgctatctaggactcagcatcctgaaaatagagaataccccttcttttcacgtgcccattggacattcacaaaaattgagaatttattatgcccataaaaaaacctcaatatattgcaaaaagtagagtgtgagcagcatgttctgagaacagttctgtaattgctgacataagtaactctctaaatcaactcttgggtcaaaaaggaaataaataaattacagaacaccttcaaaataacaataatggaaacctcatatactagaacttatggtctgcaactaaaggactwtttagtattacttgtgaatattgatacaaaaatactggataaaatatgagtaaacaagatccaccaacacactcaatcatttaccacaacccactggacatgcccatgccctttcaaaaatataagtatatgatccttgtttggggtaggggacaggaaaactctcaaaagcattcttgggacagtggaggaaattaaaatatggactggatagtaaatgtttttccaacaattttgttttagcaaattacatccttatcacaacaccctataaaccaggtactatcattggccctgttcaacagataagaaaactgaggtgcagaaatatatagatatagatatagctagataaagatagatagatagatagatatagatatctatctatctttttttttttttttttttttttttttttttgagacggagtctccctctgttgcccatgctggagtgcagtggcgcgatctcggctcactgcaagctccgccgtccgggttcacgccattctcctgcctcagcctcccaagtagctggtactacaggctcccaccaccacgcctggctaatttttttgtattttttttagtacagacggggtttcaccgtgttagccaggatgttctcaatctcctgacctcgtgatccgcccgcctcagcctcccaaagtgctgggattacaggcatgagccaccgcacccggccgaggtgcaraaatgttaatttgcagatggacacataggaaatggcgaggcgaaraaatgaacccaggcaatctgagcctataaagctcttccttttaaactctacggggtactctctgagccattctcagctacaaaagagggttagtaattcttatctcttgtggtggacaaggtaagatacggagttgagtggggagaggcattgatgctatctttatctgtttctgtattgttgagttgttataatgagcatgtattattcatgtattttttcatcaagaaaatgttttttaggggcctataaaagtgcctggcacaaagargctcccaataaaaacattattatgtctgaaaggaaattcaraatttccatttgacttaataggaattcatcagctccrgaagctgggtgaagaaaagaaacaagatagggcaacagctagaggagaattcaggtgagaggtttctactttcaaatgagaagggcttatacatcctaaagtaaggggtgggaacagaaggagggagaaggaattgggagctgggggaagagtggtcctaaagcctccctagatgaatttaattatttgggggaaggttactagtgaccaattgttgacatatatataagccccatttcatacatgccatgaataataggcctccctggggtaacaaaaatttaaagatcattctggaaaatgagacaggaattaaaagaactctatggcttgctttctttatctacctggttctggcaatgtgagaataggttttctgaagaggagccaatagtttgtttttccacttgtgggttacaatggtaaaatgattgttggcaaaagaacatcttttcaagcagcttcccttggtgtaggtcagaggggcaacaagcagagttatttctgcagctgggaaaaaggttcagagctatcttcctagaatcggctcttgtttcagaatctaaaatagatttgaaatattgtgctatttgggaattggggcctattcatgctaagcacatctgtgggtagctgttgaaattcaaataaattcaaataaagtccaagtaatgctcatactacacttaccaatttcaaattttaaaaatacatatatacaatacctgcaccccatttggtatcactacctaagacacaatatggaaagccttgattttctgccagccatagctgctttgaacctgaaccacaacatttaattcctttgaaaatgccccttcctccctacctgaacttttcaactgagattcattttcaaaagtttaaatatgaactatagcaaatagttctatattttggttttgatcatttgacagactttagtagctgcaatgaggttgttggactacttaagtcataaagccaggattgaataaatgcattttccttctcgtcatctttctgatttcagtaaatacagtttacttaggtgtggtgattaaggaaacctggtcgatttatttatacactattccattccatattcaaggtgtcttttaaaaggcaaagtaagggaacttgcctttttaaatttaaccatgactttcttatagtgatctacccaatgtatggaaagaagtagaactggctgggtgcagtgactgacacctgtaatcccagcaagttgggaggctgagacaggaagatcacttgagcccaggagttcgaaaccagcctgggcaacatagtgagacccagtctctaccaaaaaaaaaaaaaaaaaaaaattagctgggaatggtggcatgcgtctggagtcccagctacttgggaggctgaggtgggaggatgcttgagcccaggaggttaaggctgcagtgagccgtgttggcagcactgcactccagcctggagcaagacccctttctcaaacaaacaattattttaaggttgtgagtttttcttttttttccttaatagttaaaaatttgaaaggcatttaagtgacatattcatgtcataacctgagagtttacaatgttataagtaggtaacacattaagcacattatatgaattatctcttaatttaaacctcataattacccaatgaagtttgtgtcatcatttccatcttacttataaatgtatccaaggcttacaaataagtaatttgtccaaggtcacacactcagccaggagtgaaactgtgcccattattcaaattattaactgttttgatttttattattatttgtagagacaggggctcactatgttgcccaggctagtcttgaattcttggccttaagcgattattccaggtcagcctcccaaagtgctgggattacaggcatgagccactgtgcccagcctgagctgttaactcttaatctaaacaatgccttttacatgagaaacagtaaacaagatggcaagggatggcaaagaggatactgaaatatgttaggagctacatacaagaaataaattcacagttaaaagatgaagacctttatctaaatccaggcaaactgcaaactttaaaaagaattatgataagaataaagcatcaggaaggagaaagacaaactgatgacactgatatcccagaataaggccccatagacaaaggtataaccatcatcacatatggttggtgactcccacagcgtgttcctcaccttccccagtgcctttgggaaatgtgagtgttctctgtaaaagttctggcatggtgaaagatcgtaactctaggaagctgaataacttaccatttggcactaatatccctgatttcttctgtttaacttttttgctctcatctctatgttgaaaaatgcaatagatgttaaaatcagtaataatgttcaataactagtacagctgttcccttgttccacctcaattttatttatagaaaagccattattccactattctatatcaataacaattttcatttgtttttctacgtgtataatatgaattatattaartaacaaattttccagtttycataataataattctaatgactatataacagtctgttgagttgatgcactgtaatttatactgggtattttgtttccagttttttgctattataaatatccttccaagaatttatttaggcatctaatttacttaaatttcttcatatgcaaatagtatgtttatgtcctctgaccatttatctcttgaggttttaatatttttgaagatttggataagtccttaatttgttatgtatactaacttcttccctgtttcctaattatgtttcccttcttgtgtgtttcaatcattgttagtttttttatgttaaaatcactttttcttgatgtttttaagctatttttttgtgtgatttccattgttgccataagcttttcaaaaatgctgtctaaagatttcacagatatttgatgcatatttctcctagtttgctaaaaattaaaggatatagttaactctttaatgcactatgatcttactctgctatgtaccataagtgctaatttaaattactttttgtttttgtgttttttagccagttatcctggcaattattaaaacataattagccagacatggtggcacacatctgtagtcccacctgtttgggaggctgaagtgggaagatcatttgagctcagtagacgaggctacagtgagccatgatcacacaactacactccagcctgggtgacaaagcgagatatrtctcaaaattttaaaaataaagataaaaaataaaaatgaatacaatgaataaaatgtaattactaacttattttttcctaattttatgatagtatatgttgaatttatttctacatgtcttacactgctttattcaattagtgtaataacttatactttaggttttaggatttcctggggaaattctggagactagagcagcatcataagtcacactttctttgttagtgtggaatttcaatatttaacaaacagtaaataacttcacttggtgaacattgtttttctrtataatatatatctaaatctgtttatcttgttttgtatagtccattaaagctttgtacttttctttacatatggcacatacaattctttatcattttctttataaatgtcatggtttgaaaccacgtttgcagagatgataaaagtgagagactgaggcaagatgcttcttgcctcacaggtggygctccttgctcattccagggcataggccaagctcactatggaagaaatttagtttatagtttgactttgaaccaaggatgataatagtccctccctaaractgatcccctccttgtccgggactgaagccacctttgtaaaactaatgaaaggccacaagattagtattatgggaggagcctcaattctgctcaaatgtaggcatagtttctataatcccttactgctcagtactcatgtggccagaggtcacaagatttaagacttccccaattgcgcccatagataacatcactattgtagaacctacgattgggtttttgagatgttttttcacttttgttttctggcaactgactgaccatatccaaccagtgactcatgactcaaccagtgtgtcctgtggccccccacccaaaggaggactcagcacactgggatcattttccatacccctgtgatttcatcccaaatcaatcatcggcacccattccctatccctctgtgcaccaaattatccatacaaaccctagccccttatcagagagactgatttgagtgataaccccagtccttctgcttggcagccttgcattaattaaactctttaactgcaataccaggacctcagtaaagtggttttttctgtgtcccctccacccttttttgtggctatgttaaatgggatttcttctctttttgttaaactagtggttaccacaataaagaaatcccctaattatagtgaattcactataaacctagtcactttgataaactcacataggctaataagcaaatttcttaggatttttagacatgcattgctttctgcaaataatcatagttttctctcaccccttaatgtatcattctgttgtcacgaagtgaatgcagttgccattattcctgtattagagtgctaggctggaaaggcaagaaacatacatgttactttcagttcctcaactgaggaagccattgatgaagcaccttcttttcatggatcaagcaccatgctaaacacttcatatcgaccatcttgcccaaggctgagaacaagcctaccaagtatacaattattaaatatcagtgttgaggaaactgaagtttagcagatgyaggctgcccrtgttaggccccaagaagcaataaaaaatggaacactgaggggcctaactatgggggtctgtgaatgaaaggctgtgagtctgtgtctctgggctcctgtgactggcaggtttatctctacccaggagctgcattgaccatgaactttggccagtgatctatgaggaactagggagggatctcagagctgaatccgctcgcytgcatctgtgtcttgtgcatatgcttcacacttcctgtttctaggtcatagtaagtctatgtgaaagtaatcctgaaggtagtctatgttcttgttttcactgctctccaacccatcagccctttgaggttaatttatctcagatcttagaaatagcaaacgatggagtaagtggcttccttcacgaccagtggtctttccattgtaccaatgatgtcctcatccaaatgtaagtcagataagatgatccaattttgacaggctgactgttcctgaatatgcattatacaaattctcacagaggctatactgtccacatccttgagttgcttatattgctttgcacataacaagtattcaataaatatttgttgatgcagaatgaatgaatgaatgaggcaaagacaacagtcttaatgcttttcctacaagagagactttcaatgatagaatacaaactcatgtggtatctcctaaaaatctcaccatttcacatttcaaatgtggaagcttctataaagaytgtatttgtcatgagccttttcacaagaagatgtttagtaccaggtcagcttgttttcatcttgttttcaaagaattggggttaggaaagcaggaaactaggaaggatcaaggtgggaacagtggtaggcaggcttttctctgacaaagttgtttgggttatttttatctttctgcttctgttacagcaacaatatgagaaaactgactgttcaaatttaataaatagagtctgtccaaacccaattttgaacaaatgacaaactatggtgcacatgcattaacatttctgtttgggtatgcaatgggaaactaagtcttatgttctcgtctgtaatttaaacatacaaagttttaaatgttccattagaagatatactacaatactagtacattaattgagtgttctttgttatgccaaaaaattccaaaggaagttacacagcccctagaaggcatagaatctgtagattttgtaattatggtttttaaacttaaaatctcattgaagtcattagttaacatttctaaactttttgtttgtttttgttttagacagattctggctctgttgccaggctggagtgcagtgggacagtctcacctcactacaacctctgcctcctggattcaagcaattctcctgcctcagcctcccgattagctaagattacaggtgcccaccacyacgcccatctaattttttatatttttagtagagatggcatttcaccatgtttgccaggctggtcgtgaactcctgacctcaggtgattcacctgcctcgacctgccagtgttgggattacaggcatgagccctcgcacctggccacatttctaaacttttatgcctgaataattctgaacagatattccaataaccttcctgccctccacctcatcccagccaaagccgggagagagggaagacctatactaccaatagttacaaacarttatttttggaattaaaaacaggaatttgcaccatgaacaagtgtctcgttttgtcttctgagcttctcaaaaaccaccattatattgagactataaaattgttctttaggctgggcaagatggcttatgcctgttgtattagtctgttttcacaccgctgataaagacatacctgagactgagcaatttacaaaagaaagaggtttataatggacttacagtttcacgtggctggggaagcctcataattatggtggaaggcaaggaggagcagtcacatcttacatggatggcagcaggcaagaaaagagagcttgtgcagtaaaactcccccttataataaccatcagatctcgtgagacttaccattgcaagaacagggcaggaaagacctgcccctataattcaatcacctcccaccaggttcctcctatgacacatgagagttgtggagatgagatttggtaggggacacagccaaaccatatcaactgtaatcccagcactttgggaggctgaggtgggaggattgcttgagcccagaggtttaagaccagcctgggcaacatagtgagcccatttctacaaaataaaataaaaaattaaccaggtayggtggtgcacacctgtggtcccagctagtgggaggatcacttgagcctgaaaggccaaggctgcagtgagccatgktcacaccactgccctcaggctgggtgacagagcaagactccatctcaaaaaaaaaaaaaaaaaaaaaaaaaaaaagttctctgaaactaaaakaaaaatctagggaaattaaacattttttattgcaaatcacttaaccttagaatgtcaaagattttccctaagtttttatataaaaagaagcatgggagagagccatagggaatcaaaatttatgagccacaatatttgcaagaagagaaaacattacatcagccatgcacggtttctccaacatggatacaaagcagaatgatgtaatagcagctgcagttttgtgctaccacattaaacagtggtgctttygatatcatttaactaaaccaaaatatgcagttcaacctcacatagctcaaaatactcagttcaacctgagatggtcctgaattaactagaccatgtttcaggcttctgaatattatttttaagttctgtgtaaggtaaggtataaaagaagaaaaaaaacctccttgcctcaataactttggttttaataaatgcaccaataaatttatttgaaccctgagttaaaatgattcagctctagtggatgaccaaattgaggctgcttttctttatttattcaagttagatttcatgtaaacccttaaattgtatgaattcaactatcatttctaaagcagccagactaatatgaacctaaatctgagtatacttttccagaaacagctgactatttaggtctcgttatctgtcctgtatctcactatcttcttcccaaccacaggaaactgaggattggctactgactatttgaaattggctatttcatagaggtaaaaatctcatcagtatgctggcaacagtctttaattttgaaagaggaatagtcccacttgactatttctagcttccagtattaggtcaggagagaaaacatttctttagaaccttttccataaaatcagggaataatttaggaatggggaaatcttctagtgttttatttcagctctcctagggatgtgcttcccaaggctttgacagggagaaactgatagctatcagtgtgaatcagctttgtgtctaacaatttcctttctaaggaacatcaagcatagagaaatgattaagcatatttatataatctaacatattaagtgaattacatttaggtgaaattggaaagtcagcacrtattgctttataatgaacatccaagccctgcttgatttgcctaatggactatttgataagggcaaaatacattctgatttaatggaatttctaattagttaatatttagtcaaagtgcaacattaagcgtatccctaattatatgtatgataggagtttacaaagcaattggtatgggttttatatttayatttatatgtcatatatctttttctgaaaaaaagttgaaactagaacttaaatagcttacatgtttatcctttctatccttgttaggaaaaattcctttaaagagattacaattattactgtaccccgataatcattattatccttgtgcttaattttcattcctctaacctatcctttaccttgagtttttatcccaaaatacaacttcatccatgtctttacagaaaaaaaagtccttagcaagctgtgcaagacccttcccctctggccattgtcccaatagcatattttagttaataaaagtctctcactcaaaatgtctggtgtctccatgttgttagtgtaggtatttcagacagcattctcctttgttaaacatcctacatacattagtctaatagttgtcaatgttataacacttatttacacactgggggaaaaattacccttgcattaccatgatggagttactaaacccactgagaagactcaataccatgggtagaatcttcattagtgtttaactctggatgtcattacctcccagctagagacattgtcaataaaatttcagcatttattgtaatgactttgactttgatcatgaaaaccacatttcatctttttctttgggttcagattgttctttcacacacacacacacacacacacacacacacacacacaccacacacaagaaaaattgtttttttcctttagggactttctcaaaccctttcataatcttttgttaattttaaattgatatttactggagaaatttgaaaataattaaaaaaggaaagaatgaaagccattcttatttcacggggtaaccactattatccctttgatgcacatttcccaaatattttcctgtccatatgttattttctcacaaaagtggggtcatccgctacatcctgttttgcaacttgctttttaaaaaagcataataccatattacaatcatctttatatattagtaaaaattcatcttcataaatttaatggctattatttctatttatggaaataacatataaaaaatcctaattattagacatttaaattgcttgaaacactttcctgttacgtacaatgctgtaatgaccattcttgaggcaaaatctttacctacatccttgattattaggatagaattttaggagcaggatcgctgaatcaaagtgcatgctcattttatttgtttacctatttaataaggcaacacaggcaagatgtacaaaaattcagaaggaccaatgggagattcagtgacaaataactctccctccttccttttccctcctaggagacagctacttttaatagtttccatttatttttccagagatatttaatgcatttatataaacacacacaaatcctttaatatgcctattaagaaattagtaaaatgggccgggtgcagtgactcacatctgcaatcccagcactttgggaggttgaggcgggtggatcatgaggtcaggagttcgagaccagcctgaccaacatggtgaaaccccgtctctactaaaaatacaaaaattagccaggtgtggtggcatgcgcctgtaatcccagctactcaggaggctgaggcaggagaatctgttgwacttgggaggcggaggttgcagtgagccacagtcgtgctactgcaccccagcctgggcgatagagagagactccgtcttaaaaaaaaaaatgatttcaataatgaaaattgttttataatttcatgtgctagataatcataggcacaaagctttctacaattaggcaacattcattatttcagttctatattatttcttaatttatattttaccttacctttatgtaataatatattacttgtcatttaccatgatatttttatcttcattgaatactttaaaaacattttattataggaagtttcaaatgtacccaaaaagagaatgcgataaatccccaagtctccaactactatgcacattttaattaattaatttatttatttatgtatttatttatgacggagtctcgctctgtcacccaggctggactccagtggctcactcggctcactgcaagctctgcctcccaggttsatgccattctcccgcctcagcctcctgagtagctgggactacaggcgcccgccaccatgccgagctaatttttttgtgtttttagtagagacagggtttcaccgtgttagccaggatggtctcaatctcctgacctcgtgatccgcccgcctcggactcccaaattgctgggattacaggcgtcagccaccgcacctagcccattttaagtctttcaataaacaatgccaggtttttctctatgaaaggttttttagtgagacttaccctatcttcattttgttgagttgaattttatagctgctgaagccagggttacatcttttagcaagaataaattggtggttggaatagaaaaagtatagtaacttttgttgcactgtgacaatagattttatctggcatggtaatgccaatcaacttggcatcatttcctggctcagcgagttggaataattatgagaatccattcagagtctgtggggaaaactgctaggattkattagcaatgtctaccattggaaaagtagagaattgttggcttttatgacatagacagtttgccgattctgctttagcttacatgcataacagcatacttttttttaaaccattcttttgcttagtagccataaaaatcaatttggcttatttaaaagtttcataatgaaacatacctatttacctataggtttcttttgccagatattatattaacaacttttcttaaaaataattttattttttgaaaggaactaaataatgtcagtatatagatgctgctgtactatcattaaggaagcatgtgctgaggttgtgttctcagaaacaaggaagaatgacatttgtccagtcayggagctctgtggctccatgcagggccatgaatttgttgatgtctgtgatgtacagtcatggaacagagagaagctaactgacccatgataagttaaacctcaaatcttaccacttttaatgccacagtaaaattttctaarctggtcaaccacaacaaargtatatttaaaaactaatatgaagtatatcaagaatttaagaactgctgtttcatgaacctatggaatggcagatctgaaagtcatcgtggagatcgtttagaccaggagcttgcaaacgatagccagtgggccatatccagcccactgcttgtttttgtaaatcaagttgtactggaatactgccaggcttatttgtttatgtattatctgtggctgcttgtgcactatagtgacccagttgagtaaatgcaacaaggctatatggaccacaagcctaccacatataccgaggctatatgaaccacaatgcctaacacatttactatctggccttttattgaaaaagtttgccaactcccgattttaaccaacttttcattttagaattatggaaattagaaatcacagaggttgtgtaacttgtttgggataattctaccacttgagaaaatagccaacagaattcccagaacccccagtggcaggatccagagctgcagtctctatctgaaagagagcattttcacgtctctggaagccctaccctaccttgtcagccatgctgccactccctccctccccacttcacacacttaatgcaataaaggcaaaatgaatacatggatgaaaactctcctgtattcatagaatatttctcacattccttcatcattccaagtattatacggaattgtaatcatttgcctttcccactagaacatgagtgcactggggacagggacaatgccatatttgtctttgtatcccagatgcttagcacagattacagaataggtatctattacctgtttgttaaatgctttggatttgctatcttatcttcttccatgcccattttaagataaacttcaactacagggaagataaatgcaagttgtggtttgtaattttcatcattcctgaccaagacccaccactgagacccaacaataggagatatccagarccaaacaccatgataggaaagttacaaatctgtttttttcattgcacctactaaggaatggcccaaagcctccaaggcaatcttgacctgcatccctggcaaacagatgagaacctgatgtaagtcagggataataagagtgaagaagagagagakatgaaagattattaaaatcaagaggacatcatggttgattgactgtccagggggtggttgaaagtctgtgactgcccagattctgccaagtttcagaatgcaggaggaagagcacattgggtaagggaggtgtgggtgggaagggggcatggaggtagaggcagataggatacaagcggggaggttcagtagtcaatggtatatgaagctgcagctttcatgataaacatgggttcagatgaagtcattcagagagtaaatcaagattaagagaacacaaaattaagcctagagatcaccaaaaggattgaacaaagtaaaaaggaactcccacttagaaggatcacctagagacacaggagggaggcaaaagggtagtgtcccaaaagccgtgggcagagaaaaggaaaaatgtcaagtaagatggcaaaacaatatatgcctttcatttagcaacttggtggtctgtgacaaccttcctgagagccgttttagtggaggagttgtcttggaagcctgattcaatgggtagaagagtaagtgtgaacttgggaagagacattgagtatattttactcttaagaaacttaatcgataggaagaaagagaaatgagatggtaactggaagataggtttgtattccactgagtgggtagcatcattgatttgtgaattctttgaagagaatctaccaggtgtcagaatcatagagggaaggtatataaaagccaggtgggaraggaaacatcaccaagaagaggaggaatttatctctatgaggctaggtcttttcacttataaatggaaataataatagcttcctcagagagaagttggaggtttaaacgaaataacataatttaaaacattttgaaaacagcaaagcactattcaaaaccagattattctatatattatcaactccagttgattaccttgactcaatatctgattagtctcaatcttagagtccaattatgattaactttgtcattgcagctcagaagtcagggatcaatttccttttcctgacagtgggatatattctgatgccttggatgccagataattcttatttacttcagttatcaaattaagtaccatgtttaaagcaaatcagtggtgctgccacagtgcacatgcatagtcaatggatgttataggagatacagatgtctctgtcagtaggctaaggggtgcaagttactagcctacatgatgatacccaggacaggtaaagatgagatgatgttggtggctagacaagatttcagtcgagtaagacttcccatctccttagaattatagtagcaaagatatcatgtggcagaaatcaccagagctagactctggtgaaacccttatgctcaattttttgtgatgtggaagttccttctaggctctggtattacgaagtaaaattaaaaagccaaaatcaaaagcttactcttgtgaatcagagtgttacaactcctggtgagagaactaggaaggagatcttgattatgggaccattttctaaggagttaaatacagattgtagcaacatagatcctagattatgaaaaatgctttactaagttttgctttttttccattacacaaattcaatttgtttgaacaagattataaaaatagtaattataccctatcagctaattatttttttagaatgaatgagttataacagaagcaagcaacacagttagcaagcatcattactgtttattttcattttttcatgtatacacttacttatttatatcctatgttcttccacaaaggagccaaagtgactgttgctatttatttcatatgttgttattcataattcattacccagaagacaccagttctcttggtagtgaaatatatgttaatttaagtatttttttgcctcaaacatctcaaatagtaaattaaaatctcttatgaaataacagaagaatatacaagttctccaagtccttcaaagaataaaaatattatttacactcctgtatctgttagggttagagattggggactttaaataaaataactaaaataacaaatgaccaccaaatcccaccgtcacggacgatgggaaactaaaatcagctttaacattttcagacaatttccaacctctcatccactcctcttttgtgtcctcaccctgctccacattttgctttrctctgccctgctctaagcagatggcccttgtggtcatatgtcaagatcctaaaactatttctgacctggaacaaagttctgcctgatttgatcttagttcaggtcacatgtttttctccatctattcctatgaatgtttaagaaaacttattcacttccttattaatagaacaaaaacatttgtttttgttctattgcttgctcttacatggttagccaactacaatgaaccactcactcctggggaaatcactagaaacaaagatttaatggataaaaacaccagactagtgacaattttttctgatggaaattgtttggaagttttttttttcttaaatatgaaagtagagctgtgtgacttataattaaatgctgattatcctctgtatggacatattcacaggtagctgtgtgtatacttgtatatgcacaggaaaggtgtgaaagaatacaccttcaaagagtggccatatctaagagtggggctgggagatgagaaaggagagctttcacttcctgcttcctgtatatcctgtttgaagttttacaatgatcaaatattattgttttaattaataatgtgaagaatgaaaatatttctaacattcacaaattaaagatgatagcatggttgatttgaaattttttatactttgcacagtggtgttttcaattcagtgatttatgacacattttgggctttatcctaatgcacgaatgattgaaaataaaaagatgaaacttaccctaattatcatacatatacaattcctgttagatatgaatatcttgcctcaagatttttattaaagagttctaatttagtcctatctctgtgactaggattataaccttttaatattgttaccaagatcttatacaaattactcattgaacaagcaattcattgaacaccttgtcaacccctgggctgagcattgagggcagagatgggtagacgtgagccccttcagttgtatgagctagctttcattgcatgctttccatgccccaggactctgtgtagtgctttacatatattaactcctttcatcttcacaacactcctgtaaggtataaatattattaaacccattttactcagatkaagaccctgagacagatttagaatcccagaggtctagctctgactcaaaagcccatggttttaaaccgtgacttcgtagtgccttctggatcataaagtagatgtaatatagtaggagttttacaagtaaatatttaagtatattttaacatttgtaattatttaacaattggaacaactygaatttccaacaataggaagttgattaaatacaacggagtctacccatacaatggaagacttaagaagcatttgaaatgatgatgtagaatgtagacactgatctattaacattaaaaaactatctttggcctggtgcactggctcacgcctgtaatcccagcactttgggaggccaaggcgagtggatcacctgaagtcaggagttcaagaccagccaggccaacatggagaaaccccgtctctactaaaaatacaaatattagctgggcatcgtggcacctgtaatcccagctactctggaggctgaggcaggagaatcacttgaacccaggaggcggaggtttcagtgagccgagatcgtgccactgcactccagccttagygacaactctctttatattaagtggaaaagattataacagttcttataatatgatttaaactttgtaaaaaaaaatcatataattaaaagccaaagccagactcataaaaagcatccacatgcttgtaggccaaagcaggctccataaacgattcaggtcagaatactgggggatgcatcactgatcactgcactttctcccatggagcctggacaaagcttcactcgtctcctcaacatacagccccaggcatccactaccagtctatctgaggtggccctcaagagaatcctctttatcttttgagcatttgctaccctcaattccactgctagaatctattcatctagtatttcctcttggtctcattcttatcccttatttcattctcctgtgtgtctccaygtgactcctttgtgtacacttttcttgtgactcagttttaccctggatcctggtttgctacttctattattgctctctttcacatcatcacctttttttttatcccatcattcccataggcacacaaatatgctcttgtatctasaattgttttttaaaagatgtcctctagagctacatcatctccagccctttatagcacatctccttgataaagctatgttgactgtttcttctttctcacccacctatttttctcttcattccctcccagcaggctttgctttctacctctccattgtaaccaggatcaactagtgtccttgactttgaacttgccaaatccagtgatcagttctttggcctgtgttacttaaacattcagcaacccatgagactgttgagacccccttcttgaaataccttctttgctgagcatcttcgtttcttcaggctgctgtaacagaayaccatagactgggtaatttataaacaacataaatttactgctcacaggtctggaggctgggaagttcacgatcaaggcactagcagattcagcgtctggtgacagctctgctctgcttcaaagattttgccttccagctgtgccctcatatggtggaaggggctgacaagctcccttgggccctcttttataagggtactggtccctttggaatcctcatgagctaatcatctcacaaaggccctatctcttaataacaacacattaggaattaggtttcaacatacaaattttgggaggacacaaacattcagaccacagcactgagtttctaggataccacggtctcctggctttccttctgcctcacttgctccatcttctcagcctattctgtgggatgctcctcttgctgaccacttctcttctgtttccatttattcccaggtattgccatctagccctgtggcattaaatatcatctgtaatcagttcccaatttataattccagtttcaatctctctcctaaattctgttgttaacgtaggtgtctaaaaagcatctcatgcttactgtgtccaaaacagaacactcaatttccaccctgtggctaagactgctagctgtcctccagtaatcatcctctccttctattgtaatacatgtgkttttactgggcacacagccactcagaataaagcctacattgacaacatctcagtctcttttgtagctgagttctggccaatgagatgtaatcagaagtattgtgtggcagctgctagaaaacctttttaacatactgcaaacatatatmatcttcctcctctttgccttcatctatcctgctgtctggaacacagatgtgatggttggaactttagcatccatcttgggttatgagaatggaggacaacatcctagaaatcatggagtggtgagttggaaaggtstctgaaggtatggagttgtcatacytgtcctggactgcccaccttcaggcttcctttatatgataaaggaatacagatgcttcttgacttatgatagggttatgtaccaataaacccattgtaagttgaaaatactgtaagtgagaaatgcatttaatacacctaacctactgaacaccatagcttagcctagcctaccttaaatgtgctcagggccaggcgcagtggcctttgggaggccaagatgggaggatttcttgagcccaggcattcaagaccaaccctatagctgggctaaactatttggcaatgcagtacattgtagagtatccactgtttaccctcgtgatctgggagctgtggtttgctgctgttgcccaacattgtgagagaatatcaatgcatattgctagcctggaaaaagatcaaaattcaacatttgaagtaagatttctactaaatgtttatcatgttagcaccaccagaaagtctaaaaaatgtgagttgaaccattacaaagagtccccccatcagggactctctgtaaactaccttcttcaagccactattactgtgcttcaaagctgaatctaaccctaactaatagtcatctatgtctatcagagaacaatcctcctttcacataccaggcaactgaaaatataaaattggtagaaaagatgatccrtttttacactactttgctcaacagataacttttctagaatataattgtactgattaaggatttatacttccattttctcaggttttaaatgaattctaataaaaatctttatgctgttttgattatactcctctctaaatggatttgtcctcatctgacattttgtgctggtttgaaaactttcaaagacaggcctaaaacaaaatacagccttctcaatacataaaatcatatccaaatgtgagttttctcaggctataatatctagaattttttaactttgaaatgcaatgtttattcaatatatggtaaaaagctccgtaagtatttgtgaatgaatgacttagtaaagagtatactatcacataattatttaactacataaaattaccctggtgatttaaaaacatgttccccaattttttgatactcttttcactaaaggtgagtgcatttgtgctgctataacaaaatatcttagactgggtaatgtatacagaaacttatttcccacagttctggaggcttggatgtccaagatcaaagtgctggcaagttcagtgtctgataatggcctgatctcttcttccaaggtggcaccttgaacaccatttcctccagagggggctaactctatgtcctcatagcagaagaggtggaaggaatggaaggaacagacttacccattcaagccctttttataagtggctaatcccatgcataagggccccccctcatgacctaatcacctcctaaatgccttacttcttaatactgtcacactggcaattaaattttaccatatgaaatttgggggatacattcagaccacagtaggtgagatctaatttccttccccttgaacatgggycagccttagtgactgacttcaaactcatagaatgtgttagaggtgacactgagtgtcttccaagactaggttagagcaggcagtacagtttctgcctggctctactggacatacctttggatccctgtgacaacacacacataaaatgtctggctactttgaagccgccatgctgaagargtcatgtagggatagagggagacgactgaggagccagagctgttgcagaacccagctgactgagttttcccagcatcatctgccagacttgtaagtgattccagttattccagtcctcagcctcagagctgctcttggcaagtactgcaaagatgagstttccctgttgagccctgaccaaattgcagacttgtaagctggctaaacagtgtttgttatttctaggtgtgagggtagtttgaacagcacccacagtattgggaacattccctcatcagcacgttgactctctatgctgcttgcttgattgtcttggagaacataatgaccctttcagtcattccctttgggttaattccctctgtggaaaaggggtattcttgcacttgcctgccactcctgtagccacaatttagagagggctttgttcccttcacctttcctctatccagggaaaatatcagacctgttgccttccaaaatggaaacaaaatcacctgtttcaaagcaagctgccttaagatgtggtctgtaaagatactacaattaagtgatargctttcccttttctttaccctagaaacagaaacagactgtgtttcagcataatgcaggtgaccaaggcatatcctccatataggaacagagcaactaaaaagaaaactatagcctcattaacttgtctgaggtagtgatttgttaagtgaaaagcagtgggtggtgtagtttttaaaaaggtgggccatattaccatttcttcagtgcttcctggggaaaaggatactatcattatgtatattctctaggccaggtttcacctaggctagagaaagaacaatctaatgtaattctgtctcattagtgcattagtgcatttccctcaaaaggaaaattattttataaatggctgatatacttgcctactataaatgatgcatggtattctagtttataaattgatctcctaggaaatcaggtgtttgttcccctaaacttgatcattccagagagcttttaggatcaattccttgaccagagaagagctttggcaactccaccgatgtaacrgtgccttgtaggatcccacagaaagctgctaactagtttttttctttctgtgatgtacatttagctgtagcaggaaatagtgtgtaattagaagaggctcccaaaggttgaggccttatctggatgattgccaagtccaaactgcactttgtagacccaatctcagggagtccagtttcttccacagcaggacccacctactggctttagtttcatggttgtaacttctgcgaccccaagcttttaattctattcaaagcctcatcatctaaaagtcatttggaaaactaaagaatgacagctatcaactatatataagtrgctttcaattcaaaagagggaggtgtaatataatgaagttaaattacattttgattctggttgctagatattctttgatcattaatggtgtcagcaaaattgagcacaccttaaagtcagacaacctcttccatgaaatgtttctctcctctccctttcagcctcacatccttccttcttctactttgtcacctcccactagataagcaacttggatatattgatgacgtcctcttatttgccaaaaattcaccaagctgttaataacttagatttatttatgaaaactacagcagatttaagtcaaccaacaggcccaagctctttaaattttttgttactagggtgacaattctacacccaattttagttttcaaaatctaggcagaaacacctttattgggatttagcaatgactttgttttataacctgcagagattattaggaagatacatatttcttcctcaccttctattttgttctatatttttgttaaaagttggcatatgagtacaaaaaggaaaacgttttttatgatcatctctgtctacataacagactgaaatttgtgagcatttaacacatttgtgccgaaaaatattgaaattataaaagtaccatttacaggcagccacctaccaactaaaacattactatggcattcttaccttccatcatgagcctccctatgaactgagtcacataggagaatctaaaaaaaaaatcctgggaggttcaaaaggtagccatttccctaacaatgagacatgtccataaagaagggcttcattatttttgattctcgtcaaatatttcaaggcattccgagagcccccatcttcagggttaaccacatgtagtatgctcaatacagccggtgtctaatacacagccaaacagtcgtctttccattaaaatgtgatttttgcttctgcttttccatctagcacatctgttcttctagcggttcttgtgtcgttagccgcctttccatcccaccttggcgctattcttttaattcaattgtgcgcaaattgcatcaggctgtcagggcttcgctttatgaatttccctttgaggacttgcacattcctctcggcacagaggtcggagccggtgggtgcccgsstgccgccgccccgcgatcaatggcacctgaagcttccccgggcgaggccgtggctgcctggcttggtcccggagtccacggccacagagactggtgccttgaagacgtggtttttataaccatagaacgttgcatgccttattttaatggaaaaggtatctaacgaagtcggccgtaaagcaaaactccttaaataaatctgttcccccacccctaccatttccattataaaatcaaacaaacagtatcagcaagccgggaaaatacagagctttttatgtttgcacctcactttgttcccagcaggatttaaagtgatttgtaagcgtatgtaaaacaagagcatgtacatttaaaagtgaaaagggattaaaaactagggtggggacataaaatagagccaggacaaggcttaagtgatgcctaaaataacaacctctgctatgagtgggccacaatttggcactagattatctagtagttctctatcggctaatggcatcccccaaccccaactcaatttgtttatgagcatttttgrtgggagatggagagatcagggtgagggtgaaaacgsaggcgtgtctggccaactcatttttcatttggcttcatgtaggagtcgattttaacataactggaaragagaacatcctggactgtgcatccttaaagcaatcttcctcaaatattgctcttctgagacaaaggcgctcgtaaatattggaaggcattgaattcaaaatctaggcagscttgccttgccaagaacagaaccgtaaagatgtatacagctgctctctctcctctccttcacaggcagacagctagaaagatgatctattcttgctgtcttagattcttaacttccccctcactctaaaaccatgcaaatctagcttccacccccaccacttcactgaagctgagcttgctgaggtccccaaagcacttttcagttattttacttgggtcctgacagcatttggacactgactgctcccttcttaaaatacctttgccttgggttttcctaacagcacacgttggtggctatcatctccctcttctctggtcatgccttctacatgtcctctgttgccttcttctgcacctgacccttcaatgttggttgggatgctgttctagtgctgagaaccctgtaccagaaagggtccacagaagtgtggccaccatacagaccggcaaaaaaaatctaattcctctgaatcccagagtgaagaatttcatgaagctcttgttaactgaataatggctgcagtagacgtggtatattggcttggtcgacctctattccaaactccttctggggtctttcacgtactgcagacactggagagctaggagctacatttcctgactgcctcgcagcaagagtttcaaatgtgatttagtcattattaatcagaggtattcctgtgaaatttgaatttgggactgagttcagtggagaaagaggcagcagtgcctgaggcatccatttagctggtgtgaagatctagcccatgtggctcgggggccaacaattctggtggtgccttcctgatacctggactgatagttagggtagtatattcataaatacagtatttttcctggcagtcagattcccctaataggcctatcaggaaaaattgtccaaggcttgaaattgggtcatagagatcgggagtgtctttcaggaaaattctgatatggtctggtagaaactttaggaattttctaattctataggggtatgcactggtgacttcctattaactaaactattttacaactctgtaaggtagaaatttatttgcagcaaactatagaaatccagatagttttgttttttactttttaattttatttgaatgtagcagaaacaggatctcattctgttgtccaggctggtctcaaactcctgagctcaagcaatcctcctgcctcggactcccaaagtgctggaattaccagcatgaccagccacaaataattcttatccatagcaaaacaaatcttttttttttggtagatataaaattgattttagccctgaagaaaagataattccaaacattattttttattgccctaaagctacattgtctaatatgaaagctactagctatgtagttattgaactcttataatgtggcaagtttgaattgagatgtcttataggtataaaatatacaccagatttcaaagactcgatatgaaaaagtatgtaaaaagatctcattgattttattatattgataacatcttgaaataattatatcttggatagagtgggttaaataagatattattaaaattaattttaactatttttacttcttaaaatgtgactcttagaaaatttaaattacagatgaggcttgcattatggttctgtcagacagtgctgtcctgtagaattttagccagttttgcatctattaaccagttgattgaaacatttctgattgtgtgtgtatatatgtatacacacacacacacacacacacacacacacacgtgtatgtatctctgaattctcctttgaactggacttaacatcttacagattccctcattaattaatgtattaaataaaatatttgtgacatgtcattttatacttgcatgagaatcacagttctaacatttatactttagcagtcaattctgcagagttgctccaacaggcccaatctagatttgttattccagttcttscaattattttgtaagtacctaattccctgtattaaattccatcctaaaatggctaaggtggttttagttacctgctactgcaccctgactataccctgacattagcttaaaattgaacatttactattttccagatactgtgttaaacactttacagattattttatttaatcgtcaccgcaactctgtgagggaggcagtatactcctcattttacagatgaggcactgagagtttaagaaacttctccaagacaaccaggaagtagtagctggactcacacctaagcatactgactctaaagtcyacttccatccattaccactgtgccagcacctattctgttccaccaaataaaacagaaagaagggcatatctgtcactagatatgtgttgacctagaagctgcggtgcggcaaggaagttacaggttatagtcatcccctcacttgttctgccttctctactcctaggacctttgattcaattagctggttctcagaatcctgggcatagctcaagcctgagtggctcttccagactctcacccaactgaggaggttggatgatgcgccattttccgctgcaagctgagaagcacctctgccaagaccaagaggtctcactggtggagatgcactagaagtatgtgactctgagggtcacagagcttgctaaacaggctgtctaccatctttggcaaaggcaggaaacaattacactgtaataatagttattaatggccagatgttgcactaagtgatttacatacattctctctaatcctttcaatagctcagtggggtgagtagcagtatcatccttttaaaaatgaggaatcttaggtcttaggttaattatggatgctctaggatttcctggataatcactgaactcactaatcaagggctacatatctgacaaatatttcagacattaaaacatttgataataaaggagtctatggtattatttgtccacatgtaactgaataaagaaacttgttaaagaaaggagaatggcaaaaatgttatatattatccttccattattaatgctagtttaaaagcttgaaattgacaggcaactcagtattttccaacatgcatcacattagcttttaattcattatctgtctttattttttactgtctcctttcttgctatggtcttcattttatactggcgctgaagagacatctgaaaggattatgccaccccactttagtcccagggaatagaactactatgaattattgatagtgttagctttctagtgctttaatttcacctctgtttcagacaaggatattagttaaatggaattttttatatcaccccaggagcttactayacaggaaatactgactgacttgaattattgaaaagacagtcctatgttgatttccatttctacataggatggattcttcatacattccactcccctatatttttgcttagtgttaggttaatagggcagttttcaaatggagtccctcagaacccgcgggattcctcagagatgcttgcagtacaactggagaagcaagagggctcggtgggatggtatctgcaggtagacatacacatgagtgcacacatatgcccccaaccattgccttgcttcaragaaaaacttcacttgtctaccgtaagtattaagcctttgtgcaagattatgttggaagaaaggtttcttctcttcacaaatcttgaggctgtgtatggtggctcactcctgtaattgcagctcttgggaggctgaggtgtgagaagtgcttaaggccaggagtttgagaccagcctgagcaacatagtgagaccccatctctacaaaaaattaaaaaaaaaaattagccaggtgtggtggcacacatttatagtcccagctactctggaggctgaggcgggcggatcccctgagcccaggaggttgaggccacagtgagtcatgatcacaccactgcatttcagcctgggtgacagagtaagatcctgtctcttaaaaaaaaaaaagagtaaaatatcctgagttaatacaataaatacaatagatgtttgcacatctttgagatactaagaaaacatgtctaaggggttttatactatatagttgagtgtatacagctgtgcactggacttgacagaagctgatggcatgtcatatgactaggcttgcaggatggacttggccctcctgtggtattgtaagaattaccccgaattctgggtaaagccagttaccatgtatatttatgtaatgaataaactcacaagcgcaaaaaaatgcaataatattggggaatggcaccgataaatgaaccaattgcacaagtaaacttggttcacctgcttctattcgggtcattaggcccctgaatccataggcctccaatgttctttaagagaaggaatatagtcattgcttgtgttcttcagaagggactaccatgagtaaaatattttctgagtttctgtaataagagcaaatatttctctaacttgcaaagagtattttaaaatgtgagggttttgttttttgtgagttaatgagttaaaaagtagcattcagggttcctttctgtatgtggatggtataggtgcctagaaattgccctcctcccacgcatggaagctgtagacctgaagaaggtaggcagatgacaaaggctcattcattcagtatacatttatttcttcggggtcggggggtatttctttaagttttattttatttgtaattgacctatgattgtacatatttatgaatatgtatttattgagtacccactattaccaggcatcatgctaggtgttgggaatctaatagtaagacctatcctgccaccttcttttttgtgtgtgtgagacagagtatcactctgtcgcccaggctggagtgcagtggcgcgatctcggctcactgcaacctccgcctcccgggttcaagcaattctcgtacctcagcctcccacatagctggaattacaggcacccaccgccatgcctggctaatttttgtatttttagtagagacagagtttcaccatgttagccaggatggtctcgcattcctggcytcaagtgatctgccacttccacttcccaaagtgctcgaattacagcatgagccacagcacccagcctgatcctgccaccttcttagaatttgcattctgttgtggaggaggcatataataaacacatagacaatcacataaacatagcaattacaraatgtgatcgttgacatcatgcatgcaacagagtaggggtggggcccttttcacataggggcagtcaaagaggaggccctagaacagcagaaagctaagtgcattttagaaggccacagctggcctctctgctggcttccaaagcaataaatgcgtggtgcttactgtatttgatggctaaatacatgccatctgtactcaagaattagaatgctgtggaaactctgaggggaccaatagttggtgacttcttgtataggaacaaaaaatatggcacagttaatttattacacaaatagatttttccttagttatttaacatttatcagcactgtgttttatttatttcttaacgcaaaggtgggctgagggataattaaaagtaatatacccaagatcattgtccttttccattccataaaaaaattgtctccaccactgtttatgatcctcatcaaacatataaaaaatgcatccataatgaaatctcctcttatattgttactttataactgttaaaggcaacatgatttttgtaaaggataaaatagactacaaaaattagtttcattttcaaaacctctacataagcatgtaaaatatattagagtgaagagggacacatggttatcaaataacctgacttctatcaacagaagtttccagtttacattattattctttcatttttactagatgaaccttcttttttgtttttataagcttatcagtggatcacccttcttaaatagaaatacctggaagatatatgcacacaaaactgattcagatttaccgcagaaatactagatttcaatgggacattcaagcaaatataattcatccatctacccatccatccattcaatatttattgagtaagctaaactaataggtaaaatatgctggaaccagagcagtgtattgtggttgtgttggctccttgggtgggtgaaacacttttcctgtttttttttttcattcttttgcacacttactgtagaaattttctgaaaggcaagtagtcaaactgactggatagcctaagaaatttgaaattatctggccgagtgcagtggctcacacctgtaatcctaacactttaggaggccaaggtgggaggatcacttgagcccaggagtttaagaccagcctgggcaacatactgagactccatctccacacacaaaaaaatttttaattagccaggcatggtggctcattcctgtagtcccagatacttgagaggctgagatgggaggatagctgaagctcaggagttcgagattacagtgcactattattgtgccactgcattccaacctgggtgacaaagtgagacccccatctcaacaacaaaaaatgaacaaacaaaaaaattatccagtccagccaatgtgataaaatggactaacagaatgaatttggggaaaataattcaggaaaaatacatggagtggtttactggcaaccccaagaaaaagagaaactattatactactaaaggagttcagtaaggcatctgattacaatacaagaaattactagttttcctgtatcttgtttaaaaacataatgattaaaaagcatcttgttcaaaatagcaagaaaaatataagagtataaatttatcaagaaatatacaggacctgaattaaacaaactataaaattttagtgagaaacttaaagacttgagcaaaactggagaaaattttcactcttgaggacaagctgaaatgttagaattgccacttttctccaaattatttttagatttaaaaggggatgtgaaaggactggatgaaattatgctaaactctaatagaatgtatgacacaaacacggacatttaaaactagaagaataatgaggtggcggtatagggactaatggacattaaaatatattctaaaactataataattagaatagtttggtactggttttatattctaaaaccataataattagaatagtttggtactggtttagggattaagtaaatatatcaatggtgccaaatagaatgcctataaacagactcaggcatatgcacaaatttagtgtaacagttacatttggaatctgtagaaaaggataaattatttagtaaaagatgcaggaggaaatgtctattcaaaattaagacatctttttcatataaggcaatcacataattccagatttatgaaagatttaaatataaaggataaagccatacttttatatgaagatggcatattttgaacgcatgcatttgcctctgctccctcctcaaccctacttaagtatcagtaaaaatgatttttaaaaacccttaaaaacacccacaaggacaaataacgggagataaagctacagcaataaaaccttggaaactagaaagcagatgagcgggtggtaatgcaaatttgattgtaagcattgcaggctaccaaagcagagaaatggtccagttaacacagtggaaatccctcaaggctcaggctactggaagtgggcatgaaggtggggctaaaaataaaagcactgattccaaatctgcttactaagcagttgtgccccatgtcacacaggagagcagctgccctgtctgctcaggcagaagccagagttcatttgttttgagacagtcttactcactctgtcgcctaggctggagtgcagtggtgtgatctcggctcattgcaacctctgcctcccaggttgaagcgattctcttgcctcagcctcctgagtagctggacttaacggtgcacaccaccatgcccagctactttttttattttttggcagagatggggtttcacygtgttggccaggctggtcttgaactcctgacctcaactgatccacccacctcagcctcccaaagtgctgggattacaggtgtgagccactgcacccagccagagtttcacttttatagacacagttgaaaaaatgatgtagtgctgaagacagggattcagtgaaagttaatccctggaatgttgaggccttaaccttcttcccagatttttaaagcacacataaccagactcatagcttctaggcaggaaatagggtgtatcttccctggagaatatgaccagtccaaggaaaaagatatcaagataccaacgtcagaggctcccagatgcaatggtcaccctagaaaacctaagactggccgggcacggtggctcatgcctgtaatcccagcactttgggaggccgaggcgggcagatcacgaggtcaggagtttgagagcggcctgaccaacacagtgaaaccctatctctactaaaaatacaaaaattagctgggcacggtggcgcatgcctgtaatcccagttactcaggaggctgaggtgggagaattgcttgaacttgggaggcggagattgcagtaagcccagattgcgccgtggtactccagcctgggcgacagagcgagactctgtctcaaaaaaaaaaaaaaaaagaaaagaaaaaaaagaaaacctaagaccacagctcagcagtagggcaaaagagaaatccattgcagattggtggatggggaggctcacactccttcacccactccgggaaacatctgactgaattgttaaatctgccctctgaaatggattgttcctgctgaaaaaaactctggcccaggcattgatcccaggccccagtggtttggaccctgcttgcaggacaggcacctgaagagcacactgcattgcaggcaggtgtgtttgcaggtccctggccatctagactaactttaagggtcctcaatgctctttcacaattcctttaacatttgtcaactcctttagtgattattacaccttttcactttattcaatccctcaactcttcctccaccccacttattctcattaaattaccttacctccctcacactgagaaaatgaaagctatctcatgtgaatgcctctccctatccaaattgctctccaatttttaaaatccactgtcttctcttccatacagagaaaatatgtcctcttttctatacctaatgagtccactcatctcttgatcctgtttcttctgacagctctgggccttgttccatcaattaccactcctttgctcgaatcttcaattcattccctttgcctacttatgagagtatgtgtagtggacactgatctaccactcagattccctttcaagattgaaggattcagtcccccagaagccaggaatgctgctggaagatggcccttagccatcagccttcttcaggaattgcctcagcagaagaaagtcacctcactagagttcatgtattcttccctgggcagctctcctctaacaactgggttaatgtggggaatataaagaccagccctctcaccttgagacaactgtgaagggtcttcccagtttcagagctccttaagtcttggctaaggtcttcattgagactgcatcattgcccagcttctcccttagtccaatcttgtctcctttcctttcctcgctttccacaaattgttaaatgtgacagcactccctaattaacttcctgcatgctaatcatctcagagcctgtatcccagggtaccctccttatgacagtaygtttgtaagacaaggacttttaataatttgttaggtagtaccaagttgccctttcaaaaagctgtacaattttgcactcccattaccaatgtagaaaagtgcctcttttcctacaccctaattgccactactggatattatcaagcttttaaatcttcccattccataagtgacagatggtggcttattcttgctttatttgtatttttaaaaattatgagtatgagtgagaatgtttttacacattacttactggctatttatattcctttccctttcatttgcttgtgttatttgcccatttttctattgcacggccatacatattggtaatataccatatgccatacgtatattaattttcaagtaccatttgtatagtaagaaagttgcaaataagttgtttcagtttgctgtttgtttggctttaagactttcttctggccattcaaatgttttgcattttttaaatttgctaacattaccaacatttttcctgtgcttcttggttttctgtcaggcttaaattggcatttcccattctaagatttggggaaaaaaaccaaaacactaatgtcttccttaaaacttagctcaaatgtcattgctctcacaaagatgtctctgagtaccttgaccagagttaaccccccaattcccttctccctttatataatataaatcacattgcctatcatattctgccttaacattatggccatttttattattttccaaactcttctattggaatgtaagttactgaggaaaggaattccattttaaatctctatgtatgccctccagtatctagaatgacttgcgtaaagtcctacttaaatatttactgaattgtaataactagtactgtttgattatgtggctctgacactaagggtgagtgattttatatatatgtatacatacacacgtgtttgtatatgtatacatatacacgtacatacatatatttcacactctttctcattagacataaattttgtgaaattttgtgactatttttttgcttggagaactcttagttctgccatctttagacctcagccacacttaccaaagactgactgcaaaaacagcacttgagagtcaggtctcagggcctgccaagtgacaggtgaccagaacactcctagctgaggaggcagatcaggcagggtggttcctagcaacaggggaagcatatatggagccatgacacaaagtggccatcctccccacagggtaaacagagctcagtctcccaacaccatgaccatctgccccatcagtggcatagattcctcccaggccatacttttggctggggaagaagtccctgatgatgttgaggacaagatacaggcaggtatctcaactaggtcaatacattgagttatcagctcaggtggattagtcgttgcccagttcctatgcccagtagccctagtcttggattccatggtttcaatttctcccttttcattctcttgagcccattcaaatatggttttcatgccaccacaactgctcctgctcctgccaaagtcacaggtgacatcgacgttgctaaacacaatggccagttctcatttctcacctcactggccctgccagcagcattggcctggtggatccctctctacttcctgagggcttgattgggctccctgggcaccagtttttcctcatacctcactggatgcttccttctctgcctttcctggttcttcctctgcttcctgagcacttcacattggagaacccccaaagtacagtcattggacctatcttttctatctagattcattttcttgatgatcccagccaatcttataactttcgatactktctatctgctgacaaattccaaattttatatcctctaaccagactcataggtccaactgcctactcaccatctcgctttggatgtctaacagacatctcaaatgtaacattccaaaactgagcctctgatcttccccttcccccaaaatctgctccyctcacagtctctccatttcagtaaatgacaaccctatccaactagttactcacaccaaaaactctggtgtcatccttcactcctctccttttctcacacccacattcaatctgtcagcaaatctacttttactataccttcaaaatatactcagaatctgaatcctcctgacaaccactctgctaaccaccctgtgcaagttactatctcttaagtgtctctcttttctcatcaataactgggggcaataatagcctatgacttacagggttcttgtgtggaataaaagataagacatgtaaagaacttagcatagtgccgaacaaattgttagtgcttggccagtcatggtggctcacacctgtcatccaagcactttgggaggctgaggagggaggattgcttgaggccaggagaccagcctaggcaacatggtgagatcttgtctctactaaaattcaaaaaaattagccaggtgtgatggtgcgtgcctgtagtcccagctacctggggtactgaggctggtggattacttgagccctgaaggtcaaggctgcagtgagccatgatcatgccactgcactccagcctgggtgacagagtgagaccctgtctgcaccctcccccctccaaaaaaaaagttgttagtgcttaataaattttagctttcattattatttgtggcgtcagttttctaggaggtttcaagaagacgtggctagtaaagttgaagctatcagttccttttcataagaactgagttttttcttcaacacatgaaattttcattttaaaggttttacctaaatgagctaaagagaaagaagtccaaactaatctcacccagtaaaactgtcacagataagatccaaataaagggttaaaaagcacaatagcaatttgaatcattggaattcttctctataaaagtaattttcagctaacctagaaaatattttaaatctaaagttatataagattgtcacatatcatactgcatagctgtctacagccctagcttcacaacctgaaataatttggggatatgaggaaactcataggatgtttctacaacagcaactgagataacagccatcatttgtataaaacagccttgttttataaacctaaagtcccagctaattagtaataggtagaaagattctggaaaatcctcagtgttatctgagatgtcagcaatatacaataggcctgaactatataggaaatatcttgggtaagtgacctaatgcataaattagatgtgtggatatcactaataagataaaccattgcactaaataagaagaaaaatatttcagagcattcaacttgtcctttaatgcaatcactttgttaatatatgtggtaagaaacagtatttgaatagataaaagtagatgagcattttttcttaatatttttcaaaaattatgtttcttctttattctttaagtatggatctctttcattatatatatgtctgtgtgtgtgtgtgtgtgtgtgtgtgtgtgkagagatatatgtatctctctatatacacataaatacatgaaacatctaccacgtgctgagtaatgaggaaacaatagtgaattgtttttattactaagctccttataaaaatattttgatcgttttgagtataagagccaggtaacagtggccttggagtgttttaagttggcgggtgggggagataaccctaatataaaatcatcaggaattgactgtgcttaatttattagattttcttcatctgtatttaattatacattatactctgtggtattcttagagtgatatatacaatgtaaacaaatttaaatatcacatatatgcaaaaattacttagtaaaggtaaactcccattaatacctactgtgggctcattttagctgatccatgtatactttgtatgctaattttatttatttatctgtttttttataggaagtcctggctgagcaaggttggaagccctagttctcgcattgaccgcacaaacttttctaatgaaaaaaccatctctaagcttgaatactctaattttagtattagatactaatagaagagaaaaattgtaacacactgaacaatagatactgtatgttcttaagactatgtatactagaataatagtagcaragtagggtgaaaaggaactttctgttctgaaagctaagcgactgtacgtgctactaawaatgtctgacactgaaataattttactcaactatgtttycaacaagcaaaaatatagtattctaagattaaaatgtcattacaaartatttagtgtgaacatttaatttaaacttgtctcatggaatctttaatttcaatgaacattacagcatatatatgttatttggcgagacatcaaataaagttaaccatttaaaaattattttcatatactgttgtctatgttgaattataaaatcctctgaataatttgttactacggttatttgttattaaactcttcaaaaagaaccagtgattagaaataaatgtgatgatcaatataaccataaaatattatcaacaaagagttttaaaattctggttaatgtgaacattatttggttggagctactttaatgccttctatattgttgtgtgcagtgaacattcaggctgaatgatggtggctaacaagaactcgcaatttcagtatagcaagcagcaagattttcaaccaccacccacaatagatgtcctattaaccagaaaagaaaccgagagtctaaatgaatccatacaatactgtcccctaaacttggcctatctcttgggaagcttcacatgtaactgataaagcaatggagaatttaaaggggaaggttttttctatagcataaaatgataatgttaaaaaaggaagacctttaatgaaaaacactggggaatttcaagtgttgtaggcatatacttgcacatattccatgattttcaaactttttatatcaatggaatccttccttaaaccaaaattttatatagaattgaatacgtaagtttttaaaaaaagcaaaaacaaagcacagctggtgaaaataaagtggagatgggcgtccccagagccttgcatacttggtgtccctttctctacttggacagtttcaaataccttgctagtacactttgaaaactactattctatctaaggaacaaatctctattgctatcctccatggcctggagaacgaatgcaggcctctttctcttctacctatgcaagataagaaatgaggagagatgaagggggcgggggtgagtttgttcattggaaaggttaactccttgatgataatattgttatcaaatgtatataaaacaacacaacattagggaatgactttccaaataaaggactaaagaactttcctattattctaataccatcatcatgttaagtattacatgtttcaaatgtcacgcaggagaagctattgagatgttcttttggattttgctctccttctgtttccccactcctgattcaagaaaggttgacaagtctttgtgttcccttatttcaggggaagctttgggtgccagatccccctgaagacaacctttcttccaaaatttcattttaaagagggcattatcctgtgagttgaggagaaagacaaatgctgggcttttagggggtaaaagagaagcagaagttgtgagagccaaagaagacaaggagattatccaagactttggaaaggaaccaaaggctgtggattacccaagtcatggagacctgcacctttctccccagtggcacctctacctatagctaaacctgaaagggaagcagctgtagttcccagagaagctagatcccaggcccaggggcttccagcattagcaggattcctgtccccaaaaatgcttcaaagcatcctacaaacaccagggtggttacaagggaccatggtggtttgaacagtgatcatagcaattggtatgcgctggacaccgagaggtatttccttaatgttttctctgcatataaccctttgcatgctgcttctgagagagggaacaaagcaccagggatgactaagatatccacctccagacaggatgaggcttgaagcaggctcgctttgatttggagaaaataaaatagacatttttttcacccacaagtttgaaaacaaaacctctatctctccacacatagaaaggctaagtgattgaaaaaaatgtatgatctcagaagtgacaccaatatgttacttcttattatcctgatatcctttggtagctcccttcccagctttcttcataagaaaatcacacttcactagaacaatcttctaactgcacaaagtgaatcacactagtcaagattgcttaatgattagtacataactaaattctattacttgatgaaaaatgtagataatgattgaaaaataggtgttcaggagtgggtagaaagcaagagaaatcaggataaagcaatataaaaatatgttatggggaccaggtaacacatctcaacggtaaacttgtcaaatttcatgttgaatttacacagtgaatttttaatttacatacattttaggtaacaaattttgatacatttatttgtatcagaattagacattttagaaaccaagaaaaaattaagcaaaaactggatacctacatttcagtgactatcaacctgcgatctcaacactccatgtgcccatgctgttcccctcaagatgcaacatatcagaattaggggagaagtgtgatttctaaaatcatattatttttcacacttatacaaaaatatctatctttttgtttttgagacagggtcttgctctgttgcccaggctggagtgcagtggcatgatatttgttcactgcagcctcgacttcctggactcaagtgatcctctcacctctgcctcccaagaagctaggactacaggtgcatgccaccacactggctaattttttttgtagagacgaggtctcactatgttgcccaggctggtctcaaactcctagactcgagcgatccccctgcctcagccttccaaagtgctgggattacaggcgctcagtgagccactaccgtgcccggccttttttttttttttttttttttttttttttgagacagtctcgctctgttgccaggctggagtgcagtggtgtgatctcggctcactgcaacctccaactcccgggttcaagcgcttctcctgcctcagtctcccaagtagctgggactatgcgcaccaccatgcccagctaatttttgtatttttagtagagatgaggtttcaccatgttggccaggatggtctcgatctcttgaccttgtgatccacccacctcggtctcccaaagtgctgggattacaggcgtgagccactgcgcctggccaacatgctgattttttaaactcaggaagttcagtagaatctccttggctggagagaatgtgaaaaaaaaaaaaaaggctctttactggtggggcacataggaacaacggtggtgtaggaggaacgacaggggtgtaggagagaagtgagatttttatctgaggaagggtgtgggcctctcaggttgaggagaagcaatgcaagtttcatctggtagtgggaatctttaagttcagagagtaccctcatgcctgaagaatgcggcatagcacctcacggtagaagggcagaaaacactgaagaaggcacgaacaggcagtgggtggagacaggcagcagtatcggttagtttgactttgctgcaagctggtcactattttttatgactaagtatttttaactttgtctactgaaggaatttttcaaaagcatatatcagtaaactcataattagggacaacagaaaaacagaattcacttcaaaaaattagcttgtatttgaaagtatacaggccacaaatgtatttatacagtaactctccttggtttctgttgataaaaaaatgttctctatttggttaaaaggaaacattttaatgtctggaactaatttcaggagctgaaaacaggcagcatggtatagtagacaatgctctgctctaggaagaagacctgcattctggcccaggccatccaccgattacctgtgtgtctcagtttcctcaactgcaaagtcaagaagttagactaaatcaggattttgtacaggattccactgagccacaggacttccacggggtggtactaggaggactacagaaaggcagtcagaaagagaggcaatttgaccttggcccagggccctgatccctgctctaatcagagcagctccaccccsatctcttccatacattaggattgtccataagacatctttggagaagaattctgcctcaaagaaataaaaaaaaaaaaaaacacaaagacactgaatttagatctagggtcttcttttctaaatgtctataaatgctaaactcaaatgcagttcctattctcttgattacttctgtcaagcccatgtggtatgtatacttaaccttaagctatttctgttgaaaacatgcataattcatgaaaagtactattggaaaaaaattcttcttcataatggcttccataaaggtgcacggtggctaaggtggttaaaatctgttttgttttgttttttgtctgtcacccaagctggagtacagtgacatagtaagggctcactgcagcctcaacctcctgggctcaaatagccctcctgcctaagcctcctgagtagctgggactacaggtgccaccagtaatccagcctacttctttttaagtttttttgtagagacagtgtcttgctatgttgcccaggctggtctcaaactcctggcctcaagcaattctcctgtcttggcttcccaaagtgctgggattataggtatgagctgccatgccctgtcagctaaaatatttctgaaattaattttctgttgtctttcattcctattcttatcttactgtgatttaaaaaagtgcaagaggaaatacacatatataatttgtgggttaattaaaaagtgtttttataagcatgtcttggagatgttaacctaacatttagaatcatacataagaactacttttctttttcttaactggttcaaatggttttgaataaaactgacatctgaaaaaattttaaattttagaattaaaaattctagtcactgtgtgatctctttagctggtttttctatagaaatagggtgttttttatttgccttttagagagcctgacttatgctttattctctgctggaaatatcagtatacatttttggttggatgttcaaggtccttctttcatcctcaaactacatttttctttgattagtgttattttccatgttggcaaaatggactttgcaagtagcagtgaatacaagcctgtagtatagctttttctctctcattcccattttctacaaaaattagaagacacctagagaaaatgagaaggtgcaggagatttattgtattgaaaatttagtgttatttcaaaacaattataaagagcaagaatcatagtcatttcatcatttgttaacatcaaggcagaatttctaccaaattcagtgcagattaatctgcattaaaaatatgcctgcaacggttaaccaggacactgacaaagtgagcagacactgcgtaatattacatcaaccagaaaaaaaaaatggagcagaaatcattctactcctcagggatgattttctgaggcagcaaaagaagaatcaaccattctctcttttcccacatcccaactacccctccttctccactgagtgggctaacatgactcataagtcacagcacataggaatgagaaggtcacaggtactggcatagcgggtagtcccttttttcaaagcatggaactggaggcaaagaaaagagcctcagtggcagagcatgctagaaattgcattgagagatgctaacagcaataacagaactataaacaaaagcaagggggtgattatcacaaaacaaggataatggttattctgggttaggggaaaggggttgtgttccaggacaggtacatgaaggcttcctcaactagctggtggtcttacttttctccacttgaatggtagctccataggggttcactttataattatttaaactctacaaaatattttatacattttttgtatgtgtatttcatagttttttttaaacaaatgttaaggctcctagaaatttcatagcaaaaaaaaaaaaaaaaaaaaaaaaaaaaaaaaaaccctaaacactggattacagtagatagaccattctaaggtgttagacctgaggaatactctctattggcaaatgtcagtgtatcaccagtctcctcattaaaaaatgaagaaacaggaaacaaaagccagccttgcaattcacaaaaagcgctatacagccca

SEQ ID NO: 94370 - DNA, 21413 bp, Homo sapiens
ctgggactacaggtgcccaccaccacgcccagctaattttttgtatttttagtagggatggggtttcacagtgttagccaggatggtctcgatctcctgacctcatgatccgcccgcctcggcctcccaaagtgctgggattacaggcgggagccaccgcgcctggccccaataaaattttatttacagaaacaggaggtggctggacttggtgacccctgcactaagcggccccatccattcccacggcttgtgcacgcctctcagttcagcatctccgacctggacctctccgctacgtctgccatgaacatcactgggtggcagacgacatctcaagcctgctgtgctcacatcaggactcttgattttccactgtgctggatgtggtccattgtgttcagcttccattctcacctccttttgtttattttcctgtattttagaacctaaaatacaaatgcggcaatactgtgttttacagatccccttgcagccacagttccgggcgaggctgttggattcagtgcagttgtgtaagatgtgaaaggcagaaatgactcggaggcctccgccctgcgctgactgctggcagacagggctgtggacactcagccgtcgctgagggaggcctgggcagcaggggtgcggcatcaggattcccggcaggttcctgatctcagaatcacagctacccaagtttcctcttaagctcggtagtcccaaaggccacctctcagctattataccaccaactcatccagcgattctataatattccccataataaatccatttctacccctgcctgatacactcaccgaacctctctcatcttcccctccgaaaatctctatcacgacttagttccaaacagaagggaacagccacaccaggaatgtgaacaggaaaaacattaacatagcgaatcgttacctagtaagatgacgttaacagcggaagtcaagaaaagaggacacaaagggattcagaagcagcaaatgcagaaagatgccgcgatggctgggcttcaggagcaaggaaggggccgggaatgcacagagctgccaggggtgcgtggcccagccaacctggtgcatcaaattaactgtcgcatgcggttaatacctaagaacccttttattcttttcctgttttagaatttttttgacaattgaacacatttttgcatatgaactttaaatttgtgttttcctatttttaacattggaaatcttactggaattaaatatttatattcatttgaggagctgtttgtttgtttgtgacagagtctcgctctgtcccccaggctggagtgcagtggtgcagtcttggctcactgcaacctccacctcccaggttcaagcgattctcctgcctcagcctccctaagtagctaggattacaggtgcctgacaccaagtccggttaattttgtatttttagtagagatgggttttcactatgttggccaggctggtttccaactcctgaccgcaagtgatctacctgcctcggcctcccaaagtgccgcgattacaggcatgagccacagcgcccagtctcgtcttcccatcttgttcagaggattaccggtagggtaatgaaaatcgtaaagcgttagccatctgaacaggtaaccttaacctgttctgttttatcaaaaacataatttaaatccaactgtcctttcacacacccgtgaatttatatttttatgttttactgtttttgtttttgcttttgtttttgtttcgagacagagttttgctcttgttgcccaggctgaagtgaaatggtgcaatctcggctcactgaaacctccgcctcccggatttaagtgattctcctgcttcagcctcccgagtagctgggatgacaggcacgcaccaccacatctggctaatttttgtatttttagcaaagacagggtttctccatgttggtcaggttggtctcgaactcctgacctcaagtgatctgcccacctcggcctcccaaagtgctgggattacaggcatgagccaccgtgcctggcctactgttttataactaaaattttcaagtgaaaagccacaagatctttgtgttgtctatgtttttgtgtctttatgtctatatgtgattttaatttacaaagaactctatttaattggcataaagaaaaaaagcacttaaatcaagtaatctaagagcatacagtgtatactatttttatactatatttaagaaatatagggacaagcacagtggctcatgcctataatccctgaactttgggaggccaatgcaggaggattgtttgaagtcagtttgataccagcctgggcaacaaagtaagacctcttctctacaacaaaaacaaaaatagctgagtgtctctattaaagtatagatagatagatagatagaagaaaatacaaaaataaaatcattctgcaaactgagttcatcatattacttcactctgtgtcattcttttaaaaccctgcacctgcccaacctctgcaaaagtacaactgctaacaagtaatgctggcgcagcactttgacatgatagggaacacctgtgagactgatcaaatgaaaggccgacttaacccaatagctactccttccaaatttccttccagctgctcaaatgtggttcaaatggttttgacactgacttaaaattgctggccattctcccaacatggcaccaagtcaacctggacaggaagggataatcgaaacctaaccacaggataattgatcagtgatgtcttcagagaattttttttttttttttttggggactgagtctcactatcacccaggctggagtgcaatggcacggtctcagcttactgcaaactccgcctcccgggatcaagtgattctcctgcctcagcctcccaagtagctgggattacaggcacttgccaccatgcccagctaatttttgtatttttagaggaaacgtaaaaattgccaatatcaagatggagtcacttgtgtcgaacccaaacaaaataagaggttaagaaggggtgggggccttcatgcacacatgcctatgaaaagaaccatgacaaaactctctgagtggctggacgcggtggctcacgcctataatcccagcactttgggaggccgaggcgggcagatcacaaggtcaagagatcgagaccatcctggccaacatggtgaaaccccatctctactaaaaatacaaaaattagctgggcatggtggcgggcgcctgtaatcccagctattcgggaggataaggcagaagaattgcttgaatccgggaggcggaggttgcagtgagccgagattgtgccactgcactccagcctggcgacagagcgagactctgtctcaaaaatatacatatatagttattatattttatctactactttgtgttagttcctgtttcattcctttatgttacttattttttttccatttgtaagatatatactaagctttttgaatcgtttcttcattaataatgtagtcacgaggctgggtggcttacttctgtaatcccagcactttgggaagccaaggccggtggatctttcgagcccaggtgttcaaggccggcctgggcaacatggtgaaaccccacctctcccaaaaatacaaaacaagtagccgagtgtggtggtgcatgtctgtggtcccagctacttgggaggctgacaagggaagattgtttgagcctgggaggcagaggttgcagcgagctgagatgctccactgcaccccagcctggttgacagagtgagactctgtctaaaataataataatgaagtctttttttttttttttttgagatggagtcttgctctgtcgcccaggctggagtgcagtggtgcaatctccgctcactgcaagctccgcctcctgggttcacgccattctcctgcctcagcctcccgagtagctgagactacaggcgcccgccactatgactggctaatttttttttgtatttttagtagagacggggttccaccatgttagccaggatagtctcgatctcctgacctcgtgatccacccgcctcggcctcccaaagtgctgggattacaggcgtgagccaccgcacccagccataatgaagtcatcttaaaatgactataaattttcctcagaacatgtagggtccagccgtacggggcttagtgggtgttctccccgtgtgcggagatgagagattataataaataaagacacaagacaaagagataaagagaaaacagctgggcccgggggaccactaccatcaagaggaggagaccggtagtggccccaaacggctgatatttattgcatacaagacaaggggacagggtaaggagggtgaatcttctgagtgattgacaaggtgaagcatgtcacgtgatcacaggacaggggccccttcccttttaggtagctgaagcagagagggaaggcagcaaacgtcagcgttttcttctatgcatttctaagaaagatcaaatactttaagactttaactatttcttctaccgctatctactgtgaacttcaaagaggaaccaggagtatgggaggagcatgaaagtggacaaggagcgtgaccagtgaagcaccacagggagggggttaggcctccggatgactgcgggcaggcctggaaaatatccagcctcccacaagaagctggtggagcagagtgttccctgactccttcaaagaaaggagactgcctttcgcagtctgctaagtaacgggtgccttcccagacactggcgttaccgcttgaccaaggagccctcaaacggcccttatatgggcgtgacagacggctcacctcttgccttctaggtcacttctcacaatgtcccttcagcacctgaccctatacccgccggtgattcctaggttatattaatgatgcaacaaagagtaatattaaaagttaatgactaatgtctacactaatgattgataatgtccatggtcatctctatatctaatttgtatgataactattcttactgtaactattttctttattatactgaaacagtttgtgccttcagtctcttgcctcggcacctgggtaatcctccgcccacaagaacacagctttagctgcctcctgtaggagttcagtaggaagggaatctacctttgtagtgtttgatatgtagttttaaggaaggagaccacccctcatatatatgtcttatgcccaatttctgcctccaaagaaagaaaaagtaaaacctaaaagacagaaataaaatccacaggcagacagcccagtgccgcgccctgggcctggtagttaaagagggacccctgacctaaccggttatgttatctgtagattccagacattgcatggaaaagcactgtgaaaatccctgtcctgttctgttccgttctgattacccggtgcacgcagaccccagtcacgtaccccctgcttgctcaatcgatcatgacctctcacgcagacccccttagagttgtgagcccttaaaagggacaggaattgctcactcagggagctcggttcttgagacaggagtcttgccgatgcccccggccgaataaatcccttccttctttaacttggtgtctgaggagttttgtctgcggctcttcctgctacagtgtgtaaccagattatttctgacaagttttgatccagggttttttttaaaagatttgtcaatttcaaaatatttgtttgctcctgcttcctgttctctctctcccttttttttttcttttttttttttaagacaaggtctcactctgtcacccaggccggagtctagtggtgggatcactgctcactgcaggatccaactcccagactcaacagatcctgccgactcagccaccgaccccatagctgggactacagatgtacatcatcacacccagctaatttttaaagttttttgtcgagatgggtctcactgtattgcccaggctgagttttcttcttcttttttttacattttgtttgcctagaattgtatttgattgtaatcaaatcatgtgtcacatctttttttcaatttgtgtgattattttgtggcccaatacatgattttttttgcgaatatttcatggacttaaatagataagtcctctctctrcacataattaaatggagtgtgtgctttgcattattcagttcctttattcccatccttgcttttgtctgcagatttgtcctattccagaatgggtatactgaaacttgggtaagggtgaggccagcgttctgggtggcccaggctactatcccacccgtgccacagaatccacacagaggcccagcggcggcactgggtggtggggaagggggaggcggrcccaggttgggggggcaggcagtcagtgcggttgccaggaagcgggaaagggccacaatggggtctgggaggtgggcggggcggagcggggatgtccagccacgtcgctttgttttcccacgctaggagctaccacaacaggtcagtgcacctcggggcaccgggtcccccacgcaggcccttcccggggcaccctttcccaacagcacgaaaatctcctgcccccaccccacccccaggtgaytcccttcaccaagtctgggtctagacttggcccccgcgagttcacgtccctgcctaatgcgcctggagtccgggtgatggccctggatmcgctcccggccccaagctccacacagccgggaaggaagctcgcgtttgttttgctggcgccagggatacggtccaggccccgccccgccccgcgctgatcccagggtagtgggaaagtgcgctccccaagaatttgcggtgcaggggccgcggccaccgccttctgtccgcaggtgctgcgagccgtaagcgccccccacccgcgctatgggctcggacgcctgggtgggcctttggcggccacaccggccccgcggccccatcgcggcgcactacggaggccccgggcccaaatacaagctgccgcccaacaccggtagaaggggcaggccccgggattgaggggtgggacggcgcctgggggagggaaggggaagagaccagggaggcctgcgctcggggctgaaccgtgcctgctagaggggagagggggtctgtgccgggggagggtccgtgttgcagatggggcttggggctgggcccggccagacgctractcggatgctcccaggctacgccctgcatgacccgtcgcggccgcgcgcccccgccttcaccttcggcgcgcgcttccccacgcagcagacgacgtgcggccccgggccaggccacctggtgcccgctcgcatgaccgtgcgcggcaccgacggcgcccccgcctactccatctacggccgcccacgccgctcagcgcccttcctcactccgggacctggtcaggacccccgggcccctggccaccccaacgccgaactgcctccagggaggcccacctgggaacccccgacctgaaccccgagtccccctcggataccctaacaccgcatattcggtacccccatatccggatctcaaatcccaaaccccgaaccccacggggctttgataaatcgtggctcagactccccactagtcccaggaccccatctcgggtacccaccaggctcccacgcagttctagscccccacacccttgatccgccccgcaggcaggtacttcccggagcgagcggggaacgcgacgtaccccagtgcgcctcggcacaccattgctccccgaaactggggtgtccaggcggaacagcagagcccaggtgaggtcagaacggcccatcccagaactgtgggccttcccactcgagaccggggaccgccctccgggagctgggaccaccctgcgcctgtccgcggagacccactacccccgagccctgcctcctccccaggtcccgcggcctatacggtgccctcgctcttgggtccgcgcgtcatcggcaaagtctccgccccaacttgctccatctacggccgcagagcggctggcagtttcttcgaggacctcagcaaggtgggggaggggccggggcggacgcagggggtccctggtccgcggcagtggaggcggcagccagcaccctctgccctctcgcagaccccgggcccctgcgcctatcaggtcgtgagtccaggggtctacaagtcccgggccccccagttcacgattctggcgcggacttcgctcccccaagacaacactcggaagccagggcccgcggcctacaacgtggatcaggtggcctggagcccagggtcaagggtcagagtcaggagagtggggagggcctgaggtcsgagtgatgggatcagagtccccgggggtccaggggtcccggcgcggagaggatsccggccccgcgaggtcagcggtgtctccgggcccgcagcaccggaagccccgcggctggagtttcgggatccggcactcggactacctggccccgctggtgaccgacgcggacaactgacccgccaggcgggagcggccccacacgtgtttgcttaaagtctgcgagtccgcatcgtgtccgcctctctctctctctctctgcgcgtcctggcgcaaggcctggggtggagccacggctggggccgtgtcccaactccgaacccagcggggcggggcccgagcgtcgggcgaggccgggaccccagcgctgcgccgcgtccgaacgtcgagaccccaccgagggcgggagggggactctcgggagccacagacgcccgagacccacgccgggcgggaccggccagggatcacccccgccgacggccccgggccccgacggcccggaagttccgcgtgtccgggggcaccgggggattggccggggcgcggcgtgcaaggcttcccgggggcggcgactgccgagctccgccctccaggcggccccacccgcctgccgtcctggggcgccgccgccccgccgccggcagtggaccgctgtgcgcgaaccctgaaccctacggtcccgacccgcgggcgaggccgggtacctgggctgggatccggagcaagcgggcgagggcagcgccctaagcaggtacgggcggggctcaagtcgcgaggcggggaagcgggaggcagacacggacgagggcgacacagacacgggaccgaggggcggacaccggagagacacgggaaaggggtcgggacaggagcacgtggctcagacaccgacgccgggaggccgcagaccccggacgtgtcaggcatccccgcaggcccggagcgatggcagccttgatgaccccgggaaccggggccccacccgcgcctggtgacttctccggggaagggagccagggacttcccgacccttcgccagagcccaagcagctcccggagctgatccgcatgaagcgagacggaggccgcctgagcgaagcggacatsaggggcttcgtggccgctgtggtgaatgggagcgcgcagggygcacagatcggtgcgtggggagggttgggcgttcctgaccccgactgggaggtcagcccgagagactttgggtccctgggggtgcgacggtgccccactaccagcaccggccccagggtgccccaccgctgtgggctgccaccctcacgcgtacccccacataccaggggccatgctgatggccatccgacttcggggcatggatctggaggagacctcggtgctgacccaggccctggctcagtcgggacagcagctggagtggccagaggcctggcgccagcagcttgtggacaagcattccacagggggtgtgggtgacaaggtcagcctggtcctcgcacctgccctggcggcatgtggctgcaaggttagaaaccacctcctttccagacgggagcctataccgcacatgcagcaaccagtccatccacaggcagctcccaacctcaagcctggcccaaagcctccaagaccctaccaaggcttctccccaccctgctccccagcacagttctccccaccccgttccccagcacagcgcttggggcccctctggctccagaccaggccccttggagcaggaaaaagatccactgatggaattcagacccctttccccttgggtccccagacagctcccccaagggaggagctgaggacttycctccctctgcccsaagccttgtttccccaaggacaggtaccaacctcctcccctactgacacttctcaaccaagaaaacttcctttccattccctcaccagctgggcacccctatagctgcttaaatactttccaaatccagctgcactcctagccagggaaggtgaagggatgcacagaggtgggggaggggtactgtgcagggtactcagcatccctgaccaccaggtgccaatgatcagcrgacgtggtctggggcacacaggargcaccttggataagctggagtctattcctggattcaatgtcatccagagcccagagcaggtacggggcgccacggatcagtcattratccaggttgatgatssagaccctggccagaatcactaaaagatcactggtggatcattagggtcactaatgagaacactggtcaaggttactcatgagtcactgggcctgggccgaaatcatcagtggaactttgattaggatcataaaatgggaagttggtcaaaatcacagatggctggcggggcacggtggctcacacctgtagtcctagcacttggggaggccgaagagggcagatcccttgaacccaggagttcaaaaccagcctggataacamggcaaaaccccatctctacaaaatagttcgctgcgtgtggtggtgcacgcatgtggttccagctactcaggaggctgaggcaggaggaycacttgagcctgggaggtctaggctgcagtgagccgggacgatgccactgcactccagcctgggcaacagagtgagaccctgtcccagcactctgggaggcagaggagcccagttggagatcagcctgggtaatatagtgaaacttgatctctacaaaaaaaagaagaaaaaaaaaagccgcgtgtggtggtgcgcacctgtagtcccagctactgggaagctgaggtgggaggatcacttaagcccaggaggcagaggtcacaatgagccgaaattgtgccaactgcactccagcctgggcaacagaggaagactcttcacagaaaaaaaaaaaaaaaaaaaaaaagctgctaagtcatttaccataagtcactgagaacaggggatgtctgaccagakgcaagtgctgctggaccaggcgggctgctgtatcgtgggtcagagtgagcagctggttcctgcggacggaatcctatatgcagccagagatgtgacagccaccgtggacagcctgccactcatcacaggtgacctgactccatggcctgcttctgcatgttcacaggctcctgacctccaaactcaagtcaagggcctctcgttaggagttacccgtcacctgaccgtgtgcccccctacccccatcacaagatgcctgaccaccaccatgtggggtggcctgatactcaacccaccaggtgctgccacccccataataagggacttgaccctcaatgctcagggcccctgaccccaaagtcggcatccccgaactctcccaagaagctccaggttctccattgtctccaacctcctctgcctcccccaaagcctccattctcagtaagaractcgtggaggggctgtccgctctggtggtggacgttaagttcggaggggccgccgtcttccccaaccaggagcaggcccgggagctggcaaagacgctggtgagcggtgtggcctttccctgggcaagcgtcttgatgcgggcccagcctacccttcacccctcccgtccccactgcctccctccactcagcagtcctgcctaaccccagtcccaccctcttctgcccgaagtccctccctccttcacggcttcctaacctgctgtgactttagaggtcaaggctggcccggcctggacctggggaagccctctgtggcgttcctgccccagaccaagtacaagttcctcctggccccatggcgaggtgtcgcacttcactcgtgtctcttccccaccccaatccttccctgacttcatgctggggggctggcaacccagggtgcagcaggggctggagttcgaccaagaaccggctgcagaaggccccgccatggggggtccacgctgagcctcctctccgcaggttggcgtgggagccagcctagggcttcgggtcgcggcagcgctgaccgccatggacaagcccctgggtcgctgcgtgggccacgccctggaggtggagrmggcgctgctctgcatggacggcgcaggcccgccagacttaagggacctggtcaccacgctcggtgagggggacggggtgtaggggagcggaggcggcggggggtgcttcccgctggggccgccccgacccggccgcgcctaagacccgtccccgcccgcagggggcgccctgctctggctcagcggacacgcggggactcaggcycagggcgctgcccgggtggccgcggcgctggacgacggctcggcccttggccgcttcgagcggatgctggcggcgcagggcgtggatcccggtctggcccgagccctgtgctcgggaagtcccgcagaacgccggcagctgctgcctcgcgcccgggagcaggaggagctgctggcgcccgcagatggtgagcgtcgggggagtccccgtccttccgcctccgccatccccttcccttcccgaggccccgccccttcccgagcccgcgcctctcagcccctctccccgcaggcaccgtggagctggtccgggcgctgccgctggcgctggtgctgcacgagctcggggccgggcgcagccgcgctggggagccgctccgcctgggggtgggcgcagagctgctggtcgacgtgggwcagaggctgcgccgtggtgagcgccgcccccgccctgctggccccgcacccccgcccagctccggccgcgcggcctctaacagcccctcgctctgcagggaccccctggctccgcgtgcaccgggacggccccgcgctcagcggcccgcagagccgcgccctgcaggaggcgctcgtactctccgaccgcrcgccattygccgccccctygcccttcgcagagctcgttctgccgccgcagcaataaagctcctttgccgcgaaaccttgtcagtgcttgggcgggagcggarggatccagggctgcggaggcgggggccgtctcgatgaacacgtgacccccggcgggctccgccttccgcgcacgcgctgagagcctgtcagcggctgcgcccgtgtgcgcatgcgcagctccggggacgcctgcgccctgcctgtgagcgtgtggcgcccgctttccctgagccggcggggcagagcscagggagctggaggtcggcgcttcctctcgtgcttggtccactgacgcgcggccccgccgcgaggtgcggacgccggggctgggaggggaggaggtagccctgaggactcgctggactccggggtagtttcccagctccggctactgcgcggggctggcggggcacaccccagggcgcgctggaggccggagcgaggctggggcgcccgtgggaggctcccagcaggcaccggtgttctcgcggccaagcacagttataacgcgctcgcgcggcgcttcgagtggtcctggaacctttctggccacgagggcgctggccttgctggggagggcacaaacccagaaccgcccgggcgggggtgcagtgagtcctcgggagggtgccctcagcaggagggggcagtgaccgggagtcctgagacctscacctagcaaaccttctgcgggggcccgtgggaaaggctcaaaggtcaccaacgcaaaggcagggcgtcggctgtgagcccggaggagctgctgggaagcctggatgtgaggagggtggggttttgtggcgggtggaagtgtcgtgcgtctctgccaggagaggttaaacacagccggcgggsagagtctgagctccgggggtaggtcgtgcaggttttctgctgggagtgtggaggaaggccgcggttggttgaagtggctggaggtaacaggaaagtgttggaggaatcggttgctctcggggattgcaagccagagagttacccacctccttttaagaaaygggtttattgcaaatagataacgtggttagttcaggcaaggcatgcacttggaatgctttccgtcagcaagaggttcaccttgctgaggtgcaggtgcagggcagggtgcggtgacaggctggtgatcccaggtagaggacaggagtgacaggtgtggttgcccaggtgtggatgtttggtggaggtggagttctgagctcaggtgagcagctgcaaatgcctgttaagcctgaacgtgggctgggtccttcagatgggtggctggtctcaagtcgcaggggcagcccaggcactgtcctgggccttcccttctggctcctgacgcctgtgcttgtttccaggagcatcagatccatgctgctgctgactcggagccccacagcttggcacaggctctctcagctcaagcctcsggtcctccctgggaccctgggaggccaggccctgcatctgaggtcctggcttttgtcaaggcagggccctgcagagacaggtgggcagggccagcccyagggccctgggcttcgaacccggctgctgatcacaggcctgttcggggctggactcggtggggcctggctggccctgagggctgagaaggagaggctgcagcagcaaaagygaacagaagccctgcgccaggcagctgtgggccagggcgacttccacctgctggatcayagaggccgggctcgctgcaaggctgacttccggggccagtgggtgctgatgtactttggcttcactcactgccctgacatctgcccagacragctggagaagctggtgcaggtggtgcggcagctggaagcagagcctggtttgcctccagtgcagcctgtcttcatcactgtggaccccgagygggacgacgttgaagccatggcccgctacgtccaggacttccacccaagactgttgggtctgaccggctcyaccaaacaggttgcccaggctagtcacagttaccgcgtgtactacaatgcmggccccaaggatgaggaccaggactacatcgtggaccactycattgccatctacctgctcaaccctgacggcctcttcacggattactacggccggagcagatcggctgagcagatctcagacagtgtgcggcggcacatggcggctttccgcagtgtcctgtcttgagccactgcagtctgggccccatcattaaacgggctgcgtttaatctgtgtgtgtgtgtgatctgtaccagcggcccagggaggccaggcagccctcttctctgcgcaggtgtacataaaagggtttttagggggaagatgagatggcaacactgctttattaggccgggccagccaggagcagacacacggctcctcagtacacattcccccacccctgcctcggtgctccccactcagggctgggccatggagggggcagcgtaggtctggaagcgcttgtgcgctcgctggtgcgtgagcagtctcagggacatggtgtccacggccatctccagcccgggctgctgggttatctccactgtgtagtcattggcctgcaggggtggcacatcagcagggtctggggaccgtctccccctcccacgtatcccaggctactcaccagctgcagggaggccagcatggaacgacacacctcgaaggccggctggccagccaccagctccgcaaagggacaccactcattgagctgggggaaccgtgagaccagctggtccccataggtgtggatgtcaaagggcacatgctgctcctgcacaggggaggggcatgttggctgcggagagaggcaaggccctggacagacccgtggcacacagctctggttcccagcggccccgcctcacctgctcctggagcagaggctgcactgtgtcctcccagtccctgatgcgctggctcagctctgtctcctggacaaacttctgggaggtggcgatgaagagctcctaggggaggatcagcaggagctactgcctcccaagcaggggcctgggcaccgctcacctgtccccctcccctccccgtctccctctaacccaggcctaccacattccttcgaaccagctcctcgtagctcagggacatcggcactgcgtctgggaaggggtagctgtgagctgggcagctaaggggccacgctctcccctgcccccagctccagtggcccctcagcactcctagcccgctgcccacctaccaaggtcagcggcttccctggggtctgctccctcgggctccatgtactcctcaggctctagaaagtcatctgctgggaggtgggagagtgaacagcacgcaggcagctagtcggcaggtgccaagccccaccccaccccctggcaggcacccacctgctgcccccaggtcttccagggaatcctccaggtggtcctcctctgcaggccgcagccactgctcagccacctgtccagagaaagcatctgtgaggggcactgtcacctcccatcagggccaccacggggtcctagatcacagctgaccagctgggacttgcctccctcctctgcagcttccggagagtttccaactgctccttcacgtgtgtccagtacaggacctccatgtctgcagacaaaggccttgtgagggctccctcgtccttcccaggccccgtgccagtccacccaaggctttgggtgacaccaggtgggggaagaggtaggggaaggagagtaaaactgtcttccccgaggacttcagcctcacctgcaaaggacggaccctttcgccgaagccgcctgctgtcggcatggtctgcatctgtgaaagaacatgctcagcaccagccaggccaagagctgcccacagcattgggaaaagggtgctgatcctcctccactggccctggcccagcccccagctcccagtggtccggagtgcacaccacacccactcacaggcagccaggtaccactggtggaagtcctgcagcttggcagcgcccttcctcttgcgcttctgtcccagagcctcctccacacaggggggcacagagtaaggcctacctgggggcaaacagggactgtcttagagccgctgggggatcagggtgcaaagcccactcccacccccccacctcatgccccaggaaacccagccaggggtacctgagtggaggtaccttccacccaattacctttcttgaagggcttagactccaaggagtcaaaggggtccaggctctgccaggggtctggagtctcctgggcacagagcacaagaaggcgctggagaagtagggggtgcacagccgtccctcccaaaggagtaggggatgcacagccaccctcccaaaggaagagtagggggtacacagccgcgctcccaaaggaggagtagggggtgcacagccaccctcccaaaggaggagtagggggttcacagccaccctcccaaaggagtagggggtacacagccaccctcccagaggagtagggggtgcacagccgccttcccaaagcccaggcaacaagtgcagtgacagcctggggcagagccgaccacactcaaatcctggatcacagaggggaacactagagagagggtgggagcccagagtcgcatgagggggtctttaagagagcaagtgcaaagggccacaggctgggaacaccacaggccagcaggagcaagagcatgatgggcaggcagccagtcctcgaatccgcccatccctccctgccgggggtcagggccccaacactcctaccttcacgcaggatgcaggctctggggccccctcccgctcccgcagcatgtacctcctgggcagggcagcactctgcaaagacagtcacagggtccccacttctcctctttctcccctcaaggctctgggtaccccaggaactccaccttgggttaacatcaagaaccctacaagggtcgggcgtggtggctcatgcctgtaatcccagcactttgggaggccaaggcgggcagatcacccgaggtcaagagtttgagaccagcctggccaacatggtgaaacccccgcctctactaaaaatgcaaaaaaaattagccgggtgtggtggcgcacacctgtaatcccacctactcgggaggccgaggcaggagaatcgcttgaacccaggaggcagaggttgcagtgagccgatatcacaccactgcactccagcctgggcaaaagaacaagactccgtccaaaaaaaaaaaaaaaacctacagggaccggacacagtggctcacgcctataatcccagtgctttgagaggccaaggcgggtagatcacttgagcccaggagttcaagaccagcctgggcaatgcagtgagaccccgtctctacaaaaaatacaaaaattagccgggtgtggtggtacacgcctgtagtcccagctactcgggaggctgaggtggaaggatcacctgagcctagagagagtcaaggctgcaatgagccaagatcaggccactgcactctagcctgggcaacagagcaagaccctgtctcaaaaataaataaataaaataagataaaaataaaccctgctagtactctctgggggtattaaaacaaaaaccctaagaaaaactttaaaacacaaacagtgggccgggcgtggtggctcacgcctgtaatcccagtgctttgggaggccaagacgggcagatcacgaagtcaggagattgagaccatcctggccaacatggtgaaaccccgtctctactaaaaatacaaaaaattagccaggcatggtggcgggcgcctgtagtcccagctacttgggaggctgagggaggagaatggcgtgaacccgggaggcggagcttgcagtgagccaagatcgcaccactgcactccagcctgggggacagagcaaaactccatctcaaaaaacaaacagaaaacacaaacagtggtcacggggtactcttcttcaaaactaggaaaaatgaatagaatatgacaaatatccatgccatctaccaactagagtgaagaaacgttaacatttcctctgtatgcatcaggttgattttgttttaatgaataaaaaggaaggatttcttggctctaggctgggtacagttgaccccgggggttgagggaggcagcaatggcctccagacactccctcctaccagcccgactgcagagaggcgccttggcaaccggcggccatcccaggttgccgtgagctcgacagggctcaaatccttggacgccagcccactactctgaggagcatcagttctgctcagagaggggaggaacacagaagctgctcttcaaaagggctggttgcaggacgggctgcaagacaggtgggcttctgccccagaccagtggtctggggccaaggccataccactgtcctccttgtgcaaggtgactcggccccagagccagggttgccagttcacagctcaggttctgcaggcctccatgtgggtcccacctgctgcgggctcctggactccttgggctccagagcggccttgggggccgaggcctcaggaagctctactgcctcctctgcatcctcgtcctcgcccccacccaggggcatcgggccttctggagaggggcctaggcagggagcaagagagtgatcagctccaaggagtgccgagaccagacggcaccaaagggaccctgatggctacttcctccctcagctttagtcatggagcccagaggatttggcgggtgccttgcaccatcctcgtcgtgctcctgtgctctatgctctgcttggttcattttatttcttagcaaatgttcctctttaaatgcagccatccacatctgcccagagaggagacccaggagggcagtcagagggcagtcagtgaaccaagatgggctgaggctcaccgggggctgtggctgcttccccggggcgaggcctcactcccatgggccacagaaggggcatgaggctggcagctgagagcagccccttggagccctgtccactgggtgctgcctccctggtcccctctttggctgccctgccagtcccaccggggagctctcttctcacctggctcctgggagaagccgagtgctgggacagggctcctgcacacggaaacttccattggctgctcctcagtcctcccggtgtctgggagagacagggatcagacaaggtcagcccagcccctctccaagatggtccctgcccggtgttcaacaagcctctccaaggggccagcaggagggcagagaccagcagactccaggccttgggctggggggagacagcagggccctgagccaggcaccaggtctctggcactgagaccatgttaacttgtaatcaaggcacagcagatgggtgggatgagcaccagccaacctgtctagactagagcaggcacccagagacagggagctcccaagaccagaggtggcaagcacagggcaccccacaagagtccaaccagaagaccctcccttccttcccaccaagccccccgcatccaagccctcacccttctgggtccctggcatgggggaaacgcccgctggttccatgggggacatgccctctggctccaacatgaaggcccctctggggtggggaacgcacgtgttcatcctgaaatccttccggctggccaggacctcaccctgacggctgtgctggcaaaaacacgcctgctgtagagacccttcccaggcaggcctccctccccgtcgctgggctcagatccctacctgtacaggggattgttgttcttctccatttcatcaggggccaccagggccatgggcaggagggggatgatgaggacctcctgcatggaggccaagggtgggtgagccaggcacccttccactccagtggagaacaggacccacatggggcaatgacaccttcccacaccccatcagctcaacacagccccagggaaagtgctgacctcaccccagcctaagaggggccaggccaggactcacactgggcgtctgatcattcttgagatccacgttagtccgggagtcagggaagtcatccagcgacaggaactggagggagacagagctcgtgggggcggagcccaggcaaacacacagtgggcggggaccacatgccaaagaaactcacctcattctctgcctcctgggggaccccggagctggcaaccccattggccctgtcctcctgcaccgaagagagctgcttggcccgcctgagagag

SEQ ID NO: 94371 - DNA, 66854 bp, Homo sapiens
  misc_feature (1)...(66854): n = A,T,C or G
tgtgcctcgccttgttccagagggattttaggaggcttacaaagactcatctggtgagtcagagtggcacaaatggaaagtgggagtgaaagaaaaacaagtgcagggctataaaatgaatggaatcagtactgggatttgtacaaaaacggactataatgtacgcttgctgtgaatgggccacacgtatcactccaggcttcccagcagccaaggtgaaaagggaaatgtggtcagtgacttagctcatggagtccatgagataaagaggacccccttgctcagcacagtagactcttcctggttccagggcaagcgggactgctttggcccctccccgtcaggaccttcacagcgtggagtgtatgctgtaaacttgggccatctaggcagggtgtctgtgtcagccagtgccagccctcctggcctgaggcttcagcagcttttctcttggtgttgagggctgtggggtggttgtttctggttactaaggatagagaccagccatatcatcgtgggcgctcagggctcgagggggcaggacacacagctgtggatgagactcagttcctcatgggccgacattcttggggagtcacagtgggctcatggaggtgggggcagttagagactgtcaccctgagcagcctggggcagagcaccagcctggggacctctggatcctggaaggtacatctcagtcgtgtccctgcctcattgtgtgatcttgagcaactcaactctgggtcctctgggcctcagttgccacatctgtaaaatgggattcatattccccgccctgtccacccactgggttgttccaagggacaccccggaggccaaatggaagcaaaaggctttgcaaactgtaaagtgcagtcaggggaaccatgatgggctttgtacactggtttcaggctgcagggcctgaggccataggcttgagtcagggttgggggcagggggtcctggtgacagtttgctgggatcagcctctccattcttcagcatttaaggaattcaccgcctagggttggtcggtcagcaggttggtgaccacacagccacacgtcagcttacctggtctctcaccccacagcctgggactacggccagggcttcgtgaatgaggagatgatccgggaccaccttccacccccagaggaggagccgctggtgctgatgtgtggccccccacccatgatccagtacgcctgccttcccaacctggaccacgtgggccaccccacggagcgctgcttcgtcttctgagggccgggcacggtcacacggccacccgccccgcgcaccccacgccctgttcacgctcacccagtcacctccccacatcgcacactggggccccgggttcagcctggcctgcccgtgccctggtgaatcacctggctgagcagttcccctggagccccttcgggagcagggctgtgtcccagatgggccacggctgagccttcagagtacgtcctgcctggcacttactggtccttaccagagacgcccagccccatccctgtcctcatgacccctcgtccaccccccacacacactataaggctgagggctgccagcagccccgtctgcccaccattcccggccgtggaccatagtcgggatgtcagcagacacacatgggcagcccaaagctgcaggtgccagggcccaccccagcctcgcctgtcacccccactcccgcctcagggccaggcccaggcctcaccacctgacgctgcatgagacattgacaccagaaagccctcttgggggcactgctccctaccccagggccctggccagccgggagcttggctctcctctggctagagtgggaagagggggctggccatggggccctcccagaacctcagcatttccttccagcccatccaaacactgaggcagccttggggaaccccgagctggggggttggcagcccactgcaccgcctcagggttttggggtcctgggctggggccaccatccctgatggcagaactcccacaaccacatgtatttattcctctgtcctaaaccgtcccctccttccctcacccccagcacagggggattctgagcagtgcctcttgtctgagggacatatcagtgacctcgacgttgcctttagactacagttgtgttagcctcttgcgtattggctttttcagagtcatttatgagcagaaaaaaaaaaagtaaaactttgctaatattaacccttctctagctcctcgagggtctgtgacctgcaacacaaggggtggggtcaggaaagggctggggaagacctagcattttttttttcttttttttttttttttgagacggagtctccctttgtcacccaggctggagtggcatgatctcagctcactacaacctccacctctcgggttcaagcgattctcctgcctcagcctcccgagtagctgggactaaaagtgcccaccaccacacccagctagtttttgtattttttttttttttttttttgagacggagtctcgctctgtcgcccaggctggagtgcagtggcgggatctcggctcactgcaagctccgcctcccgggttcacgccattctcctgcctcagcctcccaagtagctgggactacaggcgcccgccactacgcccggctaattttttgtatttttagtagagacggggtttcaccgttttagccgggatggtctcgatctcctgacctcgtgatccgcccgcctcggcctcccaaagtgctgggattacaggcgtgagccactgcgcccggctccagcatttatttctgatgtatctttgtggtagaaaatttggaaagtgcagagaagtatacacaggaagaaaaattcccaacccccagaggcaaaccagctgaaaccacgcaaccccagtcaccccaatgcaccgcgaggctgctgcctcctgtcagggtcagatgagcctcgaggctcaggaaagtcagaggatgccatctgcatggtggtaaattacagaggtgatgaggcaaggtgggtgtggggctgttcttaaaacggggcagcaggaaggccccaaggagatggatttgggctgggacgggaagagagagctggccatgctggggtgggtgggtgttcaaatggtggaaacagcagacgcaaaggccctgccgttggaaccagcttgtggaataaactttcagaaacagatcgaagaagataggtggctggaaggggcagcaacgatgaggctggagagggaggcggggctaggctggtgctccggagacttgctgggtggccctaggagcacagtgaggccagtgtggctggaggggagtggggaagaagaggggacggggcaggttcacaggaaggagggcccaagaccaacctaggggactaggagagccctgtctcctctcacttcgcattttccattctgtctctggccacctcactacctacagtggcaggaaaaggaatctcagacccaaaatgaccttcacactgtggcgggggactgctagcaatggacacgcgttaggtttcatcctcatttctgtccctgtctgaggctgaaaggcacaggatttgaacacaggcctgcctgagcccacaagaggctgcctcctgggaaaggggacgtgggaaaaggggatcaattggacccgattcccaccctctccaggtctgtttccccattcagaaaatgggagagggctctaaggcagcgattctccatacagactcgacacctttattatttttgggacggagtctcgctctgtctcccaggctggagtgcagtgacacgatcttggctccctgcaacctctgcctcccaggttcaagcggttctattgcctcagtctccggaatacctggggattacaggcgtgcaccaccacaccggctaatttgtttgtatttttagtagagatggggtttcaccatgttggtcagactggtctgaaactcctgacctcaggtgacccaccctcctcggcctcccaaagtgctgggatcacaggtgtgagccaccatgcctggccaacacctttaaaataacagttgtaacgggccctttacgctgcagaattcacaggcagtatcacctacctatacgaagaattttaaaaatcaacacagctctaaatgagttgtaaaagaacaagaaaggaggccgggtgctgtgtctcatgcttgtaatcccagcactttgggaggccgaagcaggtggatcacctgaggtcaggagttcgagaccagcctggccaacattgtgaaacccccgtctctactaaaaatacaaaaattagccgggcgtggtggcgtgcgcctgtaatcccagctactcgggtggctgagacaggagaatcgcttgaacccgggaggcggaggctgtggtgagctgagattgtgccactgcactccagcctgggcgacagagcgagacaccgtctcaaaaataaaaataaaattgtcctccgcatctgccctacactgcccagctgaccccactggccagcctgtcctcctcccacctcttgcgcgttcctcctggcacgcctggaagggaggaaaggcttaatggtcccgttctatgggtgaggaaaagaggtctgggaaggagcccggcgtggtggggcgggcctgtaatcccagctactcaggaggctgaggcaggaggattgcaggatcgctcttacccagtttctttctttctttcttttttttttttttttgaaacggagtcttgctctgtcgcctaggctggagtgcaatggcgcgatctcggctcaccgcaacctccgcctcccgagttcaagcgattcttctgcctcagcctcctgagtaggtgggatttcaggccgtgccaccgcgcccggctaatttttttctttctttttttttttttcagtagagacggggtttctccgtgttggccaggctggtctcgacctcctgacttcaggtgatccacccgcctcagcctcccaaagtgctgagattacagacatgagccaccgctcctggcctcttacccagtttctgcacggagctcctgatgcctgatggccaagaggacataaccccacctgttctaagggcatggagtgtatttttagagtgattggacaaaatatgtgccgaacacctacgtcaggtctggcgcatgctggaggctggggttatatcaatgcaaaagccattccctgtatttaacacgtaaatgaattagtctctttaactctcccaacgccctataaattatttgctccattttacatattaaacgctgtcacgaactgagctgctgtgtgaggccggggccggacttatctttctgaagcacagagaagcggttatacgcagaagtttgggagaactgggtaaggccgcacacatggaaattgccagtttcgtgggtcccaacgtcaatactgtgggcaaccttagaccggctcaaagcgcagctggggacggtgatgaagtgcagagcgtccacagccagcgacaagactgccaagcaactggcagcctgagtaacggagaaaacaacgaaaaaaacgcattcaccacctaccaacaagaaacaaaaaacacgaccaccccacagtcagtctactttttaggcgtgaatagggtcgggcagatcgcaactcccaggcatcccgcaaagtaggcgggtcaccttgagggcgacctttacccgctcaaaaattcgtctcacattagcagtgaggattcgggcgtcaccccgaatcgttattttccttactcataagtttaaggcataaggacgtttttagtttatttcctaggtaatgaattctattctcattaggcgtatgatgactatcgtagttgactgttgaggtcatgatccagttccattgaagtttgtctcacttgttaataatgtattttgttgcttttcatttaattttttccctcgaggaaaataaataattcataatgtgccgaacttccgtatgcagatgagcagccagcaccgcgaaggctcacggggaacgtccccgccccttccggttcttgcctgctttgagctggctgtcgcgagagttggtccgcggacgccggaagtagttcgtcgctccctagcggccgaaggggcgggctcgcggggtctsgactgctttcggcttgctcggcggagcaagatggcggacatctccctggacgaactcatcaggaagcgcgggrcggyggcgaaaggacggtgagaggcctttcctttcttcggggtttagggtcctcggcctagtggagctcgaggcgggggaggtagcgatccgggagcgacgcggaggaccgggtgcgcccgcccccgaccacagccgcgctcctcattggccggctgccgccgtccccgccgtggccccgaccgcccgcccactggccgaggcgcagtccctctggcggccctgggaggccgacggggccgcggcggggacagggtgccgcctcgtggacctgaggggctgccccctggggcccccgcgttccggggtcctggggtctcggcggcgcagcctccttgcctgtgtggactggcatttgggccccgctccgtgatctcggcgctgcctggtctccacccatcttagagttgagacaaccgaagtttagtagcggggaagtgacttgctccgaccgccgaagctgaggcgcaagcccaaatccccctgcacgcggcccctgttaacactcgcctctctttgtgcggcgttttaagttttctgagccctttcatatacacgatgcctcatttaatcttttacagtcctgttgtctgctagctattcatgttacccaccttttactgatggggaacttgaggctggaagtggtagagtgacttgcccgaggccacggagaactgagcggcgggctgagcgcgatttaattgctggctgagttggcctcctacatgggcttgaaaaactggtgtgttgggcaggagattggttatttccttagggagaagaaagtgcttgagctggctgaggagccatggaggtgatttgcagtcatgtctcccaaacttcccctagacccttaaatgttgttagtcatttcaagccttcgtgagctgagttcatctgtatgaagaagtgagaactttgcccaatagtttcccaacacacattaagtttaaatgtctttgtaaatagccaggatgtaaatatgttagatattgttttctsagacatttgttctctcagcagatgtttatttttatttttatgttttttttgagacggrgtgttgctctgtcgcccaggctggagtgcagtggtgccatctcggctcactgcaacctccgcctccccggttccagcgattctcctgcctcagcctcccaagtagcagggactacaggtgtgcaccaccacgcccggctaatttttgtatttttagtagagatggaagtttcactgtgttggtcaggctggtttcgaactcctgacctcaggtgatcctcccgcctcggcctcctaaagtgctgggattacaggcgtgagccaccggcccggccattccgcagatgtttattaataccacccgtatgcctgtggttaggtttttctcttgatgtctgaaatgtatccctcacctccttccccatcctggacacttgtatcaactacaactgccaccaccacctcataattcgcagccagcacttacctggcttgtggttcgtaacgggcacacattagtatttgtttcctcaactactgactgtgaaagctctctcagatctccatctagtgactgatgtgaagctggtgctggctcctctggccacttctaagtccatccacgttttgtaggttcctttggaaacgacagaatgatccaccccaggttcttctctctctgaggtcactccgccagtttctgactgcaggtggactgcactgtagtctatttgatctctatgtttttggttttagtgtgtgcagagttttgtgttgggcagtaggtggggctgcaggaatggggggtggttatgtgtggatccacaggaacaggggccttgcagctggatacacctggcacttgccactgttgggttctgtttccctggccaggggagtyctgaactaggcagtttcctcacttggaatggtgattcctggttgagcgggattaaatgtgagaagggttttttttgtttgtttttttgagagggagtctcactgtattgctcaggctggagtgcagtggcacagccttggcacactgcaacctctgcctcttgggtttaagtgattctcctgtctcagcctcccaagtagctgggattacaggtgcccgacaccacgactgtctaatttttgtatttttagtagagatggggttttaccatgttggccaggctggtctcgaactcctcacctcaggccgaacccgctcggcctcccaaagtcctgggattacaagcatgagacactgcgccgggccagaaggtatgttttaaagtttgtgccatgtggcaagtgttcagcaaaggctggtaattatcttggacctttccttaaaggcatagaagcacacaacgcccctggagcataggtgagcactgggactctagacgcagaccaccaagcttccaatccctgcttctcccactttccctaggaccgtctgcaagttacttaaccattccttgcctttctttccttatgtataaaacctgagtaatatctactttattaggttattgttaggactgagtgaattaatatacctgaagtgcattgaaaagttcctgacaacgggtacttaagtgcttgatagacgttagctttcgttattgtcattgaaggcttcttaaagtaaaggagtaacatgattcaatttttagcttgaaaatatttctttgccattgtatggggattggattggggcaragagtgcaggcagagagactagcatggaagaacctggagtgcatgctgagtttgagttaaatcttctggaaactccgtttttatctcacctgcacagccaacaaagaaaaactagatccagtggtccctgttaagataatgtgaaagatctgaacaaattcaatgaacagatgtcatttcctgcagtaagtttatttttattttatttctttattttttttgagatggagtctcactctgttgcccaggctggagtgcaatggcatgatctcagctcagtgcaacctctggcttccaggttcaagcgattctcctgcctcagcctcccaagtagctgggaccataggcatgcgccaccacgcctggttaatttttttgtatttttagtagaggtggggtttcaccatgttggtcaggctggtcttgaattcctgacctcaaacgatccacccgtctcagcctcccaaagtgccaccgtgcctggccatacatgctattttacatackgcstagaagaatctgcgtacttggaactttggttttaatgttgcatggatattccaggaagaattttgttgtttaagaaagcttttttcctcttagtagaaatagccaaagatccagcttgtggaagtgtaaataacctctttccccaccactctgctcactttgtttcctgtgatcccaaggatcacatttgtggaatgtgcttgttctcaaaagcagccattctgttttgtgttcctcacaccttgtgagtcaagaaaagggtcatagctggatgcagtggttgctcatgcctgtaactgcagctgtgtgggaggctaaggcaggaggattgcctgagttcaaggctgcagtgagccatgcttgcaccactgcaccccagtctggttgacggagcaagacctcatctctttaaaaaagaaagaaaaaagtcattaccattattattacctaggcctccaattaattattaaaagattccttgactaatgggaaatgattgaaccagaagagggtggttttgagtgataccttcctccatggtgaggtgctatctttcctcaccacagcacatctccagtgactttagttgtgaaagatccgtagagagtctcctcaggatagcattaggtaccagttgcagtgctggcctgcccctcatgttggttttttcctttatttatttgagacaggatcttgctctgtcatccaggctggagtgcagtggcaagatcacagctcactccaacctctgcctcctgggcttaagcagtcttcctgcctcagcctaccaggtagctgggaccacaggcatatgccatcatgcctggctaattatttttgtattttctgtagagacaaggtctcgccatgttgcccaggctggtttcgaactcctggactcaagcagtcctcctgcctctgcctcacaaagtgctggggttacaggtgtgagccactgtgcccagcagtttcttcctttagatatgagggcatccccagttaagtcagttgacatgtccgcttttgttagttcgatgagtttaaccctcagcggatagctttctgtcagctgcctccaagcagttcagtgtggcagccttgaatgtgctggaggctggagttgagcagctctctgggccagacgcctcatctggggagtccttggagctggaagtgggaggttgttgggggacagggtggattgtaaactttgcagttcagcccaggactctggtcctggtactgactgcttgtttccttgttgaaataagataaaggaaataaagacctaaacacaaaagggaggaaatgagttattacataactctagggaacgaattatgttttaaaatgaaacatctgcacaagactcttgggtaaggggatagtattttattttatttatttatttttgagacagagttttgctcttgctgcccaggctggagtgcaatggcgcgatctcagctcaccgaaacctccacctcctggattcaaacgattctcctgcctcagcctcctkagtagctgggactacaggcatgggccactacgcccggctaattttttgtatttttagtagagacagggtttcaccatgttggccaggctggtctcaaactcctgacctcaagtgatccgcccatctcagcctcccaaagtgcttgggattacaggcgtgagccacctcgcccagcaggggatagtattttagtgtcttgtttttctttgtgtctcttaaacacctaattcagagttgaccctcagtcatagttagaattaagctgttttctctctataaaaatgacctaaacacacacctaaacgaacaccccctaacccaraagctttttttgtttgtttttataagacggaatcttgctctgtcacccaggctggagtgcagtggtgcgatcttggctcatggcaacctctgcctcccataacccagaggattttaaacccatgggttaaaatctgctttataataatccagggccccacttcatgggcctgaatcttttggactggacatctgtccagaatgggctgtagccctgccctccccagacagagccaggagggtgaaatattcctatagcccagacagaccctccctggtcatcacacctatgccaggttcccgtagggggtatagaggagagaatttggggtccagggaacgtttgccttctcacctgccagcagcgctcttgccaggacctcgcggaatacctggtgaagccctggaagcagttgcagagctgtagtttcggtgcgatggaggtggggcattacgagactcagtcaaaaccttcctccttcgccctcccaaacatttactgaggataaaagtgcaggatgtgttttgggaacgtcagtagtcactgcagtggggagtaaggctgcagccataagctggagccagagccgaggcccccccaggggttgggctttgtaaaggagcccccagcagttctagaagcgggagggtaacataattgagtctgtgttttagagacctacccctggcaggagtgttgatttgaaaaatttccgatgactaatgcctgcctgaaaccagtactgctgcctgctgggatgaatagctgtcttttcatgcaggaagagcagctgtgattataaaaagcctgaacactgaagccccctcaagctgttcacgaaagaagttgaaagcactggtggaaccagggaactgagtgcatcagattgagggaaatagcttactccctcccaccgtgaggagctcctactacatcctcaactaccgttaactcccacccctaaatgtgccttttaggctgttcaaatagataaaaatgccagcacaaagcatcttggtggtccttcctgccaggcaggcattgtggtatgcgagttctcagtgcgtgcaccacccgctcgcctcgctgcttgtgctcaccctttggtcgctagagagtgctccgtatccctgggcatgaccggagtcctaagatttcttcagcctgcggactgtttatccttcctttatatatatgtataaatttttaagggtttaacaacatattgaaactgaaataccagacaataatgataaggaagattgtttctttttgttttggtggtggtggtttttttttgttttgttttgttttgatttttgagacagggtcttgttctgtctcccaggctggagtccagtggtgtgatcttggctcactgcagcctggacctcctgggcttagttgatcctcctgccttggccttctgagtagctgggactacagatgtgcatcatyacttgcagctaatttttttttgggggggggggtaaggttatagattaacagcatcccaaggcagaagaatttttcttagtacagaacaaaatgaagtctcccacgtctacttctttctacacagacacagtaacaatctgatctctcttttccccacatttcccccttttctattcgacaaaaccgccatcgtcttcatggcccgttctcaatgagctgttgsgtacacctcccagacggggtggcggccgggcagaggggctcctcacttcccagacggggtggtggctgggtggaggcgccccccacctcccgaacagggcggctggctgtgcgggggctgccccccacctccctcccagacggggcggctgccgggcggagacgctcctcacttcccagacggggcggctgctgggcggaggggctcctcacttcccagacggggtggccgggcagagaagctcctcacctcccagacggggtggcggtcgggcagagacactcctcagttcccagayggggtcgcggccgggcagaggcgctcctcacatcccagacggggcagcggggcagaggctctccccacatctcagacgatggacggcygggccgagacgctcctcacttcctagatgggatggcggccgggaagaggcgctcctcacttcccagactggacggccgggcagaggggctcctcacatcccagacgatgggcggccaggcagagacgctcctcacttcccagacggggtggcagccgggcagaggctgcaatctcggcactttgggaggccaaggcaggcggctgggaggtggaggttgtagcgagccgagatcactcyactgcattccagcctgggcaacgagcactgattgagcgagactccgtctgcaatcccggcacctcgggaggccgaggcaggcagatcacttgcggtcgggagctggagaccagcccggccaacacagcgaaaccccgtctccaccaaaaaatacaaaaaccagtcaggcatggcggtgcgcgcctgcaatcccaggcactcggcaggctgaggcaggagaatcaggcagggaggctgcagtgagccgagatggcggcagtacagtccagcctcggctcggcatcagagggaaactggggagagggggagggggagggaattttttttgtatcttttgtagagacagggttttgccatgttgcccaggctggtttcgaacacctgggctcaagcgatctgcccgccttggcctcccaaagtgttgggattacaggcatgagctactgctcctggtgttttttattttttagaagtttttttcttaactcttccagctctgctgtttactcttgacccatgcttatttaattgatgcttgaaccaggtacagtgaagttcaagtccattcctcaccccttagtagctcttgggatagttaatctccttggttctgagtttcctcatttataagatgtgaacaataacctgattcacggggttgtaacatttaaaggacgtctaaagctgggcatggtggctccatacttagaaggctgaggcaggaggtcaaggctgtagtgagctatgatcactgcactccatcctgagcagcagaatgagattctgtccttttaaattttttaaaatatgtttttgagacagggtcttgctctgttgtccagcctggaggacagtatctcgatcctggctcacggcaacattgcagtctggggctcaggtggtcttcctgcttcagcctgtggagtagactcatgctgccatgcccagataattttctgctttcatttttatagagatggagtctcactatattgcccaggctggtcctgaactcctgggctcaagccatcctcctgcctcagctttccaaagtgctgagattacatggtgtgagccaccaygcccagggagtctcgctatgttgcccgtgctgttctcgatctcctgggctcaagccatcctgccatttggcctcccaaagtgctgagattacaggcatgagccactgtgcccagccttgtttcttaaaaaaaaaaaaaagtctgtgtgaaaaattgtcaacctgtagtgagtaatactcagaagttttcattgatcatgtcctttattttttttgaaacagagtcttgctctgtcgcccaggctggagtgcagtggtgtgatcttggcttgctgtaacctccatctcctgggttcaactgattctcctgcctcagccttccgagtagctaggattataggcgcgtgccaccacgtctggctaatttttgtatttttagtagggacggggtttcaccatgttggccaggcaggtcttgaacacctcacctcaagtaatccatcagcctcggcctcccaaagtgctgggattacaggtgtgagtcactgtgcctggcctagctgcaagtttctgaggtcaccccaaagcatagtcccagtttgtctatggctttgtaggccatggaacacgaagcctagggtagcccagtcctagggagggtggatgccatctaccacatacaaccatttctttctaatcgtgcatgccgaccccctgaacactcccttcctttggccctgctttctctagtgcctccatctcccagagtcctcacattaaaaaaataggacaggaatggccaagtaaaccttaagccttatctgattaattgtataaatgacccttctacccagaacccactggaaaatctttaaatctgaatttgccactccaaagagaaaaatgatagcatgcatcactgcctgttttagtccgtttaggctactataagaaaataccctaagctgggtaacttataaaaaacagaaactgccgggcgcagtggctcacgcctgtaatcgtaacgctttggaggccaaggcaggcggatcacgaggtcaggagatcgacagcatcctggctaacacggtgaaaccccatctttactaaaaatgcaaaaaattagccggccgtggtggcgggcgcctgtagtcccagctacttgggaggctggcgcaggagaatggcatgaacccgggaggcggagcttgcggtgagccaagattgcgccactgcactccagcctggatgacagagcaagactccatctcaaacaaaacaaaacaaaactgaaraaaagaaacttccttgtcacagagagtctgggaagtccaggatcaggatgctggcagattccatgtctgatgagggcctgcctgcttcctggttgtagatggtctttttgctgagtcctgacatggtggaaggggccaaggagctttctggggcttcttccttataaagggcactaatcccatttgtgaagtctctgtcctcatgacttaatcacttcccaaaggccaccaccttctaccaccatcacattgcagattaggcttcaacagaggaattttggggggacacagatgttcagtctgtattaccgccttaggtttggtactggcatattggaggcagcaggtgtttttccattatttgagggataacaagatgaaggtccacgtttgcttttattggtaccaggtagactcacctttggctgcacttctggtattcattagcagaggaactgacagccaatctcactccagccactggaatgcagcagtgggagagtgccagtgactgacccagtatgagagatgcctcctgggaggtccaggcagtgaagtgggaggcaatacaggaactcgtttatgcagcagagtttaccctctaacagcaggtcagagatcctcaacatggctcttctccagaatcacccatggagttaaaaatgcagatggccaggcctcgccccagattttggattcagcatctagggtgggatctggacagctctgtatttaagaagctccacaggagtttctgacactcagccagggctcgatgctgcttaggaggtgctgggccctgcaaaaggactgaaccccattctcctccccccgccccacccagggtagggagagaaaaaaggaaacaagcaggtataataataggcacagaggagagttggcctggagaaatccgggagggtttcccaaagagcaccccttgacataggagtccgcaggcagagcgtctgccgcatgagtggccgttgagggtagctattgtagagaggcctgagggtgggaggcgacagaagaagcccaaagaccttggggaggatctccagcgctatactcaggagggccttctgttcactttcaagccactgtaggccaacagaggaacccaagaaagagaccggggcctgtttatggagtttcattcatttccagttaaaaaaaatattttattttaaattcagggggtacatgtacatgtttgttccatggattatattgcatactggtgaggattaggtttctagtgtacccattacccaaatagcgaaccctgtacccgatcatttccaatttcagtggtttctgtatttgatatttttgctattgcaattttttctttctttcctaccaagtctttgtgttttctgttttcctctagctctaagccagacccatatgtttgctctcttggtcttagcccagtagatggtgtctgccttccttagagacactctttgttaatcattgagcctctccaaacctgcttctcccactgtaaagtgggcatagtaagtacttctcagggtgctgagagggctgagtgagaacatggatggggatgggccttggaaactaaagttactcctcagatgagtgggattagatttggtggatgtttattttatttgactggcattgttgggaagttattgtccatgttggtgtctcaagacacgtggtctaggaagcaaaacactcttaactaggaataaaacttgccagcccctctctcttaattttgcttaaaatgcaaagttaaaagccatcatgaaaccaggaaaggagtcatcatgtaggcataatcgtttattcaatcacaggcaaggagccgctttctgattctccagggcctcctctgtccccagtgttaccacagttccgctttcatagactgctgtagatacccagatccacttaatattgattgcaatttatatttacaggcttaatgccagaccgggagttggaggtgtccgatctcgagttgggatccagcaaggccttctcagccagtcaacacgcacagccaccttccagcagagatttgatgcccggcagaagattggcctctcagatgcccggctcaaactgggagtcaaggatgcccgggagaagcttttgcagaaagatgcccgatttcgaatcaaagggaaagtgcaggatgccagagagatgttgaactctcgcaagcagcagaccacggtgccccagaagccccgccaggttgctgatgcccgggagaagatcagcttgaagaggagttcccctgctgccttcataaacccacccattgggacagtgacccctgctctgaagctcaccaaaaccatccaggtgagttgtggcttttgtcatgaattcccagaaagytagtaacaaaggtagatttagaggcaaggtgccaggagtgactgggcaaaaatactatcctctcaagtgttggcataatacagactttgctccttacagaggctttaagtacgttatagccaaggaactatacaaggaaggaaaggtattatctcagttctaaaaaaaaagaaaaaggaggcccatagaaatttggtgactttcccaggtgagatactggtggaagaaagagagaggaaaggacaaaagatttattgagcacatgctatgtggcaggcccttaatatctgtgaccttacagtcctcactccacccccaggcccagtgggatttggcccctagtccaaggccctggccacccttcacagctgccaccacagagggaaaggaaacaatgtcatttaaccttcatagcagctttggtaataggaacagcagcggccacagcaaacatttactgagccaagtccattaagccctacatgtgcgttaccggcatggtctctggattgatgattcttctgttacttcctactgtggaggataaggccctctgtagtgccttttaccaaagaccaaagctgcatgcccaccatgtatcaagttcagtaacccccttcttctagagaatgcatgtggaccctgtggggtggattctgaccactgagtgtttccaggttccacagcagaaagccatggcaccacttcatccccatcctgccggaatgagaatcaatgttgtcaataaccaccaggccaaacaggtagagtgagtgagtgagagagagagagagaatctgtgtgtacatagcgaacatgtaggtgtgcacgtgttttgatgaggcctacttgggtggatggactgaggcttgctcagttggtagttcccagttggtagtattggaggcagggttacagcgaactttttgcaatttgagtttaaagaagaaattttttttatttttttattttttgagacggagtctcgctctgtcgctaggctggagtgcagtggcgtaatctcggctcactgcaacctctgcctcccgggttcaagtgattctcctgcctcagcctcctgagtatctgggactacaggcgcgtaccaccacacccagctaatttttgtatttttagtagagatggggtttcaccatgttggctaggatggtctcaatttcttgaccttgtgatccccccgcctcagcctcccaaagtgctgggattacaggcgtgagccaccacacccagccaagaagaaacttcttaatagaggaagggaggcatagggggcagagaggctaaaaaaagttttgtttgttttttttaatttttttacgctttttttttttttgtcttttgttttgtttttttttcctttttctggagaacggggtctcgctatattgcccaggcaggtctcgaactcctgggctcaagctatcctcccgcctcttagcctccctgagagctgggattacaggtgtgagccaccgcgcccggcctaatttttttaaataaaagttctatgtgcttaatatagaaaacttgccaaaaagtccctcaagttcctattctccaaagccagtcactgttgaaattttgccatagttccttacatgtacgcttctttttttttgatacagggtttcactctgtcccccaggctggagtgcagtggtgcagtcatggctcactgcagccttgagtttctgggctcaaatgatcctcccacctcagcctcctgagtagctgggatcacaggtgcataccaccacatctggctaatttttgtagagatggagtcttgtcatgttgcccaggctggtctcgaactcctgggttcaatcgatcctcctgcctctgcctcccaagtagctgggattacaagcatgagtcaccgcgcctggctaattttgtatttttagtagagacggtgtttctccatgttggtcaggctgatctcgaactcctgacctcaggtaattcgcccaccttggcctcccaaagtgctgggattacaggcgtgagccactgtgcccagccccagtctgttttttacttaactcatagttgtggttgtggttatatattctttttttttttttgagaccgagtctcgctctgtcactcagactggagtgcagtggcacgatctcggctcactgcaagctccgcctcccgggttcacaccattctcctgcctcagcctcccgagtagctgggactacaggcgcatgccaccatgcccggctcattgtttgtatttttcgtagagacggggtttcaccatgttagccaggatgatctcgatctcctgacctcgtgatccgccctcctcggcctcccaaagtgctgggatgacaggcttgagccactgagcccagccatggttatattcttatccaattttgtatcattcttttttcactttgtaactcaagcatttctctgtgacatttcatatttactgtacatgttttagtaactgcaaaatctatatagttggcattccagttttatttaaaccattttcctgtcattttcactgttagaaatccttctgctgtgaacatctttgtaaataaagytctttctagggtttggatttatttctgtaggtcatattaacaaggatggactttccaagccaaaggatataaagaaacattttagggactcttggtacatactgcccactgggaaaaagggacttctgatgtatctggaagttgtaggactttcactgggtccttgctgacagggagttagcctgtgaagacttgggccccagtctttccaggcaccgtcacccctgtgcccacttctccttggtccctttgtttctccagcagccatttccttgccatgcctgttctagatgtctgttgagggcccagatgccacatttgcttatatttctttatgttatattctcagaatttatatgacctggatgaagatgatgatggtatagcttccgttcctactaaacagatgaagtttgcagcctcaggcggctttctccaccacatggtatggcatttcatgttttcttacactgcgtgtctgatcaggcaggtgggagaggtcgtgttgaatagaacctgttgttttttttgttttgagacgacatctcgctcttctcccccaggctgctggagtgcaatggcgcaatcttggctcactgcaacctccgtctcctgggttcaagctattatcctgcctcagcctccctagtagctgggattacaggcgcctgccgccacgcccagctaatttttgtatttttagyagagatgaggtttcaccatgttggccaggctggtctcaaactcctgacctcaggtgatccrcacgcctcggcctcccaaggtgctgggattacaggcgtaagycactgcgcccggcgtgaatagagcctttcaatgcagaaatatttctttgtttgggccgtaagattttcagagctggaactagtccattcccttagttttataaacgctgagacactggggtgccttctgatttgttcaaggtcccacagcaagtgaagtacagggctgcagctcctaggtgctgtgtttgagacactatagggaaagtgtgagtgatcccacagtggggagtctgtgttctttccttggtggctggccattctgcatgcttcgtaaccctttgtggtcagcagctctggcgctgctcttggagtctggattccgttggttaacattagcaggaatacatctcacctgatctgtgggctctaccaggtgcagcctgcatgcagggaaagcttgctaggctagagtgttggtcagacatcatgcagagaaggaaagaaaacaacatctgggatcatcagggaggtccatgctgctcagctcagtggtacagccaagtgtcagacagggaggccagtgggctgcctaggtgggtccttgtggcagccacctcttttgtttttccttcagacgctcaaagactcagttttggttactgtcctgagtatgtggaccagcctcctggttagtaattaagagaaatatgggccaggtgcggtggctcacgcctgtaatctcaacactttgggaggcagaggcgggcagatcacaaggtcaggagatggaaaccatcctggctagcacggtgaaaccacgtctctactaaaaaatacaaaaaagttcgggcgtggtggctcacgcctgtaatcccagcactttcggaggccgaggtgggtggatcacgaagtcaggagatcgagaccatcctggcaaacatggtgaaaccccgtctctactaaaaatacmaaaaaattagccaggcgtggtggtgtgcgcctgtagtcccagctactctagaggctgaggcaggagaatggcacgaacccaggaggtggagcttgcagtgagccaagaggcgccactgcactccagcctgggcgacagagcgagactctgtctcaaaaaaaaaaaaaaaaaaaatatccggggtgtggtggcgggcacctgcagtcccagctactcgggaggctgaggcaggagaatggtgtgaacctgggaggcagagcttacagtgagccgagattgtgccactgcactccagcctgggcgacagagtgagactctgtctcaaaaaaaaaagaaacatgaagctggctcggcgtggtggctcacgcctgtaatcccagcactttgggaggctgaggtgggcagattacctgaggtcaggagttggagaccagcttggcaacatggtgaaatcccgtctctactaaaaataaaaaattagctgggcatgatggcgcgtgcctgtaatcccagctgctcgggaggctgaggcaggagaattgtttgaaccccgaggtggaggttgcagtgagccaagattgcgccactgcactccagcctgggtgacagggcgagactccgtctcaaaaaaaaaaaaaaaaaagaggtcgtgaagctgaatgatgccagtttgtttctttacaaagggaccaggcctttccagtaattagactgctcaagtctgctatcaagggaactatcagcttgctcagtgagtctctatccctatttgataccctaattgaataaatgccatatttatactcatgcgtcttgtaccctgtgagatgggtactgttgattaccctcgttgatggatgagggacaggcatggagaggtgaaataagcctgttcaacatcacccagctgatgagaagcagtggatctaggaatggagcccgagcagtctcgctctcagggccctgtgtggagtcactgtgctgtcccagctctggagacgcagaattccacatgaggaatgtggaattcagcatggggatgacgctgcttcacccagacttggaggagcgtggtgaattgcccgtgcccatgctctgatgtgcctctctggccgctgcgttcctcctttctccctgccctgggtcagtgcctgtaaacactgccctaaatcagcagggcccccgtcacttctgctttatgcacctttttcctcagacacattaatacaggggagttttgtttccaagggaccacatccagatggaggggctgtttttggtgatctgcactgccaaatgcccgagtgtccctgacagtcggagctgatgaggccaaggctgtgtgtggttcctctggatggccagaagaggaaccaaaacactgaattctgggccttcttaagagtggtgatcagcacattgtgatagaagcatatctgggaatgaacttggcctcaagcttttggccttttaatttttttttttgtaagcaaaagcagctttattaagaaaacaaaggaataaaagaatggctactccacaggcagagcagctcttttacattttttatagagatgaggtctcactgtgttgcccaggttggtcttgaactcctggcctcaagcagtcctctcacctcagcctcccaaagtgctgggatggcagatgtgatccactatgcctggccaagcttttggccttctgaccagcctcatattgtagaatttttagaaagtctaagtggtgtgggtgagcctgtggctcctgggtaattttccaggtcagggctgtatggaagcttcctgccaagagcttctagcactgtggggagtggcttctgtgagtgcgcgttcaggctgtgtgtttttctctccccctgccccttccctatgggatgtcactggcagccggcagcctttttggctccagacctctaatagaattagagagctgggaggcatcgagggttcatgctctcagcaagttgtcaacctcttggggcttcttcagaacattgcaggtctggcttctcagattcttttctgtctcttcgtttaggctgggctaagcagttccaagctttccatgtccaaggccctccctctyaccaaagtggttcagaatgatgcatacacagctcctgctctcccttcctctattcgaacaaaagccttgaccaacatgtcccggacactggtgaacaaggaagaaccccccaaagagctgccagctgctgaggtgaggtgatggtggtgactgcagcagttggggtcaggagggctgtatgcttatatgtacctcattgtgttccccacaacgcctttgtgaggtgggcatygccacccccattctacagatgagcaaaccaagacctagggactcttaccctcaaagaccttgcaggctagtggggacggcagacctgctgagagattgcggtatctggtgatatgttagactctctcagaagaaagctattaggagggctgaggacagattatctcattccagttgggaagtctgggaaaaagggctcttttagctgagtgggtctggaagcatgagtagccttccaggtagaggctcagggcctgagaggcttgcgtatttgggagatgggagagggtccatgcttttagcatagagtgatggggggtgtagtggacactgaagttcagggggcccatttgtggtaactctccatggagctttcctctgggccttcctagtcacgtgcctggaggaatttctgttgtgggaatgcttatcagccatctggcttctggtaatgctcttgtctgtgtggcagcctgttctcagcccattggaaggcaccaagatgactgtgaataatctgcaccctcgagtcactgaggaggacattgttgtaagtactgtgacctaccaaacatttaaatctcaaactgcctctgtggcaaaggtctcttaagacccaccctcaggtttgatgactgctaggactcaccagactcagcatatagtcacgctcagggctgagactaatgacagcaaaaggatgcagagcaaatggctcatggggtgaagtcggggggaaacgaggcacaagcctccagaggcccctcccagcagagtcgcacaggatgctgggtgcaactcgcagcaagttgtgacaatacatgtgacaccagggaagctcattaargactcagtacccaaaggttttactgggggctggtcacttcggcattctctgtgtagcatgtactaaaattccagactcccagagggaaagcagctgttgagcagaaaccatgttgtttgcacagtccaggcacagtgaactgtggggtggcaggagccctcctgagatccgagttctcagatgccagccaagggccacccctggaatcggacctttcaaacaatagcagtcasycywsytgcttcactcttctgcacagcttctagccaaggccaggtgcctggcctgaatctcagagtcaggggatatctatgctataatgggtcctaaatgggatcctttagtcccactgggcagtatccaatagttgtgttttcctgtgtcctttggaggtattacaagatgattccaaagtgaaagaagtgagatggattggtggtatccaccttcctggtccatcccgtcccacccatggcagtcatgggcaaaacctgtcaaatgtctgtgagcggggttctggatgcagctaggacttcttttcaacatcattttcattcaggcacccaaaagagccattagtttagaaatccaggcatcctttgaactgtcagatcacaaaatgaatacgtttggagaatccagcctctccctgcagttaagtcccagactaacagactgcactggtcactacatttgttaaatctttttgttttgttttgttttgtttttgagatggagtctcactctgtcacccaagctagagtgtaatggtgtgatctcggttcactgcaacctctgcctcccaggctctagcaattctcctgcctcagcctcccgagtagctgggattagaggcgcctgccactacgcctggctaatttttgtattttcagtagaggcagggtttcaccatgttggccaggctggtctcgaactcgtgacctcaaatgatccacccacctcgatttgttttttttaaagatggagtcttgctctgtcgcccaggctggagtgccagtagtgcgatcttggctcactgcaacttccgcctcctgggttcaagtgattcttatgcctcagcctccctggtagctgggattataggcgtgtgccaccacacccggctaatttttgtatttttcagtagagacgaggtttcaccatgttggccgtgttggtcttgaactcctgacctcatgatctgcctgtcttggcctcccaaagtgctggtattacaggtgtgagccactgtgcccagctgaggttaaatcttaattgtgaaacacacgcatgccgtgagatgggtcactcgtatctccttctcctttagcagggacagtactgtgaatggtgcacgtgaggatggaaattgtagcctattttgtgtaatacttgacaagtcattaagaattaaagctgattgccgggtgcagtggctcacgcctgtaatcccagcactttgggaggccaaggttggtggatcacctgaggtcaggagttcgagaccagcctggccaacatggcaaaaccctgtctctactaaaaacagaaaaattcgccaggcgtggtggcacgtgcctgtagtcccagctactcaggaggctaaggcaggagaatcacttagaacctgggaggtgaaagttgcagtgagccgaggtcacgccattgcactccagcctgggtgacagagtgagactctctcaaaaaaagaaaagaattaaagctgttaaggagcgtaataacaactgccatttactgagtacttgctatgtgccagtcactttaggcagactcttggaagatacataatggtggaaaactaaacaccagtcatgatcagtgctcaggggaaattgctagtaataatcaccctcgcttctcttctacccaaataggcaatgttaaaaggacaatggtaataaaattggaattacacctactatttatagttggccctccatatctgtcggttctgcatctgtggatttagccaaccactgaatgaaaatactcaaatttttaaaaataacagtatgatgagaaataatacaaattttagaaatacagtataactatttatatagcatttacattgtatttggtattataagtaatctagagatgatttaaagtatagtggatgatgtgcataggttatgtgtaaatactacagcattttatagcagggacttgagcatctacagattttagtatctgcgagcggttctggaaccagtctcctgcaggtgcagaggggcatcttgttttgatatttaccattaaaaacaaaccatgtcaaggaccttttcataaaccttcttttggccctcacagcaaccttgtgaaggcagttgcaggtgaagaaatggcgtgagtgctagtcagcctctgtccatcttcacattttgctccctctctggccttagtcgtcttgtctgtaaaatgaggtggagatcggactcaatgatgtgtgcaaagcactgccttaaaaattatctcagttgagctttccagtaaagctgggaagtaagctagtcctttttattttcagaggaggaaacaggctyagagaagttaagtaatttgctagacgtctcatagcagatagaaagcagagcctgggggatcaaactcaggtctgacttagagtgaccaactgtccctgttttgctggggactctcctggtttcatcactcaaagtctcatgtccagggaaacccttcagtccagccaaaccaggactctgggtagaactccagaatttgtatttgtaacagattctcaggtgacatattagcagctgtctttctttgtatacatgtattctaatgacagggctctttgcgaaaattttcataactgttttatccctgttgaggtgggcactgaagactttggtggtggcttgctgggagatcccaggtgatccaaggcttgtaaacccagcccctttcccactgctgacctcatctggtgctgtgttgaagcctgtggatgtctccagagcaccacctcgcgtggagcctccccgcagtctcaggcgcagggcgcatttagctgcagcggaaccaccacaccccagggccttcagagtgtgtgagcggcaggtgctgagaaatccttccccratcccaacccctcttgttgtgtgcaggagcttttctgtgtgtgtggggccctcaagcgagctcgactggtccatcctggggtagcggaggtggtgtttgtgaaaaaggacgatgccatcaccgcatataagaagtacaacaaccggtgtctggacggtaagttagggagaaagcagtcccctgaccctcccactcatctctacttgctgtcaggtagcaggccttccaggggaagtctctgtgagatgggtggaacccatctctggggcctcgtctgcaccaggaactgcygtgcagtctctgagtagtcctgagctgtgggttacacagggccctggattttcacccagcccttaagcttttgagcccagcaaaaaggaaaacagcatttctccatggatggttctcttaaggggtcttgccaggggagccaagaggcacagctgttgcctcccagatgttgatctgtttagtgctagggcagaagttcctcccagccctggagttttgtctgaatgttgacacctgggtgagagctgctcctggtgggtaaacaacagactttattgacttgaggttcatatttttcatctccagacagcctgtagagaagaattctgtctgccatgctccttttccactcatttgttctttcagtatgtattgagtgcctactgtggaccaaggccctgtgctagaagtggagaagcagagactaataaaacaatacaacaataaaaaaaattacaaataaaagacctggagccttggctaaatcttggcacctgggtgaactcccctgggtgagtcagtggagttctgatttgcatttccccatggctaatgatgttgagcaccttttcatgtgcttattggccatttgtatgtcattaaagaaattaattttgttttgaatttctgttctttttttgttttttcttattttttgtcatatgtttggatgtggaaagatacttattttcctttttctttcttttttttatttttattttttattatttttttatttttttattttttttgagtttctctctgttgcccaggctggggtgcagtggcgtgatctcagctcactgcaacctccgcctccccggttcaagcggctttcctgcctcagcctcccaagtagctgggactacaggtgcacgccaccaagcccagctaatttttttgtatttttagtagagatagggtttcaccatgttggccgggctggtctcaaactcctgacctcaggtgatctgcccacctcggcctctcaaaagtgctaggattataggcatgagccactgtgcccagctatctttggagaaatgcctgtacagaatctttgtctgctttttaaatactgagttgtagaagtactttacatattcttaagtcccttatcagataagtgatttaccaatattttctcccattctgtaggtttatttctgctttttaatgtattcatatgcagtataaggactttttggttaacagcagaccacatatatgacagtgggcccataacattataataccatatttttactgtattttttctacgtttagatgtacaaatacagttgcctactctactcagtagagtaacatgctgtacagccgggtgtggtggctgaagcctgtaattccagcactttgggaggctgaggcaggaggatcgcttgagcctagaaacttgagaccaacctgtgcaacgtggcaagaccctgtctcaaaaaataaattagctgggcgcgtggtggcgtgtgcctgtagtcccagatgctggggaggctgaggtgggaggatcacttgagcctgggaagttgaggctgtagtgagctgtgatcgtgccactgcactctggaatgtattcccatggttaaatgatacatgactgtatgtgcatttacagctatatattctaagcatggctgtaactgcattccgtgttttggtatatcatgccttcattttcattcatcttgaattattttctaatctcccttgtgatttctcctttgacccattggttatttaggattgtttcaatttccatatattcatgaattttccagattttcttttcttctatgagtgtttaaggaaaatatgtattttcttgttgttaggtggaatgttctgtacatgtctattatgtcttgttgctttgtaatgtttaagtgctgtttcattgttgatctgcttggttctatctagtattgaaagtgaaatactgaggttctgttttttttttttgatacggagtctccctctgtcacccaggctggagtgcagtggcatgatctcagctcactgcaacctctgcctcccgggttcaagcaattctcctgcctcagcctcccaagtagctgggattacaggtgcccactgtcacgcccagctaatatttgtatttttcgtagagatggggtttcactgtgtcagccaggatggtcttgatttcctgacctcatgttggccaggctggttttgaagtcctgacctcaagtgatccgtccacctgggcttcccaaagtgctgggattagaggtgtgagccactgcacccggcgagatctttattactgttggtctgttcctttcacttctgtgtatttttattttatatatttgaggttctgttgttacttgcatatatgtttgattgttttcttcctgatgaattgacccttcagtcaaatttaaatctctctttacctctagtcactttttttgttgttttaaagtatatttcattttatattactaatagctaataagctaataagtaaaagaccagctttcttagggttgctatttgagtgatatatctttgttcactttttttttttttttttgagacggagtctcgctctgtcgcccaggctggaatgcagtggcatgatcttggctcactgcaacgtcttcctcccaggttcaagcgatttttgtgcctcagcctcctgagtggctgagactacaggtgtgcaccaccacactcagctaatttttagtatttttagtagaaatggggtttctgccatgttggccaggctgctgtcaaactcctggcttcaagtgatctgcccatctcagccttgcaaagtgctgggattacaggcatgagccaccaagcctggcccactcttactttcaatctttttctctcatcaactgtaaaaatgtgtttcctaggctgggcacaatggctcactcctgtaatccgccaggcggatcacctgattgggagttcgagaccagcttgaccaatatgaggaaaccccatctctactaaaaatacaaaattagccaggtgtggtggtacatgcctgtaatcccagttactccggaggctgaggcaggataatcgcttgaacccaggaggcggaggttgccgtgagccgagatcgcaccattgccctccagcctgggcaataagagcgaaactccatctcaaaaaaaaaaaaaaagaaagaaagaaaaatgtgtcacctatagagagtgtatagttagatcttactggktttttttttatttgaattcaatctgacaatctgtctttggattggattatttaatccattcatatttaatattgataattaggtttatttcttccattttacttttttttttttttttttgaggtggagtctcgctctgttgcccaggctggagtgcagtggcatgtggtctctgctcactgcaagctctacctcccaggttcacgccattctcctgcttcagcctcctgagtagctgggactacaggcgcccgccaccacacccagctaattttttgtatttttagcagggacggggtttcaccatgttagccaggatggtctcgatctcctgacttcgtgatccacccgcctcagcctctcaaagtgctgggattacaggcgtgagccaccgcgcccggccccattttacttttttgttcctcttcagtggcttttctttcacatttttyccccaatattttaattcctttaatgatgtattcactaacttaactcgagtaagatatggaaatgttactcccacatggccctgttccttcttcctcttttttgtgctattaccgttacacatgttatgctttgtatacagtgggagtgtggtcttcctagtgcttcatcctttgtagacagagtagaagcctgtacataatgcttttgatcatcttttcactgaatttgatagcataaaccttttcccttactacttggatggcttcacattgagtctcgtttctccctcacttcccactcatctcttcctgtatgaagcaaggtttgtggccactttgcctcttggtkctccactgctgaggtttcctcacgccctgggattttcttagtgtctggcttgactggaacctagcagccccatctccatctgtggagccagaactgccagtggtggktgctttgaccattgataatggaggtacagcccttgtcctcttgtgtgaggagccgaggtctcatagcagagcctttttctttctttggtttttcagggcagccgatgaagtgcaaccttcacatgaatgggaatgttatcacctcagaccagcccatcctgctgtgagttccaaaggcggggtgctggggagaggcagctccrtccatctctttttgttctaatgggtaaactgcctgcatcacagctccccttcatccccccattccgtttcctctgttctaatggcagctggccgtttcatatgcttaaacttgaccaaaatggtttgctttgttatttccccagggcttgaccctatagggactagcattatgatctcgttctcagctttctgatttagaaatatctgagtggaagttggagggggaggctgcttgggtctcctagctgtgtgcatcatcccgggaacagagaactccactgcatgattggctctgatggagacagtgccagatgctaccccttattttgttccccagtgaggttttttgtttgtttgtttgtttgtttgttttttgctttttcagttattttgagagtctcactgtgttgcccaggttggtttcaaactcctggggtcaagcaaccctctcccctcagcctcctgaggacctgggactataggcgcacaccatcacgcccagctggatttggcttttaagtacagtgggaagccattgaaggcttttgttgcacacagctgagtatacatgcctggcccaggactgagggatgttttgaagcctgagatgcataaaatgttgagactgtgaggacttcaccttctagataaggaagcagataccagggaggaggttagacttgccagggtgagtgggatagtgtggggcagggctgaaatagactttgagatttaaaaagactaggatttgaaccctgggtaatgaattatgtgatttggataagttcttaaactgtgttcaaggaataagaaatatttcttagggttttgtaacctaataagtttgggaactactgggctaaacagagttacatctgtttcactttcgggcttctcasattgtgtaatatgctaatggatgttaccatccagaaggaacatgcagtgtttcctaaacttaaaaccacaattagccaggtgtggtggcatgcacctatagtcccagttacttggggggccgaggtgggaggatcgcttgagcctggaagatcgagactagtgagccatcatcatgccactgcactwcagcctgggtgacagagtgagattctgtctcaaaaaaaaccccacaaaaccctagaacatacagcactgcctgcgtctccattttctcatcagtaaataagaaaaacacagcctgggccacatagcaagacctggtctctacaaaaaattttaaaaatgagccaggcatggtggtacacgcctgtagtcctagctccttaggaggctgtggcaggagaactgcttgagcctaggagatggaggctgatgtgagctgtgattgagtttgctgcgaggtggaatgagatgaaggggtatggaaagtgttacacccagtgcctagctcatgacagatgcccagtaaatggtgggtcccctccccatctaaggaaaaactgacaagaatttttgactcttctctgctctccacaggcggctgagtgacagcccatcaatgaaaaaggagagcgagctgcctcgcagggtgaactctgcctcctcctccaacccccctgcngaagtggaccctgacaccatcctgaaggcactcttcaagtcctcaggggcctctgtgaccacgcagcccacagaattcaaaatcaagctttgagcaggggagtgaggcagccagaagtgggggcagaggagggtggctctgtttccccaaggcaaagcttatgaccaatgggccatcggactggagacccctgattgtgggaagggttgccngggataaagagcttcctcactggatgggacccgcctttctgtgttgtgttctgccctgtgctcttctctctacgttaacgtttcctgtagtatgtttcttcatctcatcgccaaggtaggcttgtgtttttcagtgtgtgcctccccgagcctcagccccaagctgattkcttatctggaaatggtacactgaattctctgggtggctttcttgtggccccatgggatgcagcgtgggggctgtctgaaggaccctgctttttccaggggccgaggggctgcctttcctttgtgtgtattaagcttttcaaacaatggaggggatggaragccctggtgtcctgacgggagccaggtcggcctgagagctgtgccgctcctctgtcttgtcagtggaggtgcctgggtggggagcaggtctcaggcctcttgtcctctccccagtggctccaggcctcactagtggcaagggcaggatgaggctgcaccgctgggaagagtctatctaagytcttggcttggagtcccgtgtcgtctccrcccagaggaagttctccagagttcacctttcccttttccttgagttgtgctgaatgccccaccccagctctctttcccttctgggtgtctttgctgggagggggctgtgttgtgagccctcccggttctcacctcgcctggcacttaaccacaccctggttttgtgtagccgccagctctcttctggttgggcctttgaaaggctcagcctcccattgtgcagtgcttgggtttggagcttatttgaatggaagaggtcagtttgttcctggctctccatttctggcctcagttgtctacaggacagtggtcagggatgcctggaggcatatatccagctgccaccaaggggcactgtttgttcccacttatgtgagtgaccccatccatccatgaccagaggattattttcctgccttggcagaggaggaggagtcaagggagcagggcagctctaccrggcaaggtgtttccccagcataggcgcagacagttgggacgaaacttcagagcccaggcagtccctgaatgaccaggccagtgttgtcactgagtggtcccctgctggttgggagtgaagagaatccaggctggcagagctggagccagttggggagcacggttctgggagctctgcaaaatcagtagcaagtgctggaaaaggcacatgccgaagatactcaagagctcccaagatttgcttgaggctagcccagtgaagaaaaaccagagactcatgtttccaggggtcagtctgtcaggcaggaaggacccaggatttgaacccagcttcagtgtgcaggctctgaggctgcccaggacgggaaagtccaaggaaggggcctggtggtgctccacttgcagttctttaaagaatgctgctttttattctcctaaccctttcaagtgggtgcagacttctcgttagcagctggaagacattcctcccacacttttcccttcctggcccaagagagcatccagaaggcagtaggacctggtttttcaggtactgggagccgggggctcactgcttgcactgtgcttagggtagggatggtaaatatcctccctgcatggctttatcctccctctcatcccaaagcaggtatcttctggttgtcacagagtttcattgagtccagctgcagccacgtggccatctggagctggtgctataggtgaccatctggtacattgaggggacctgtttgcctcctccactctataagcagtcatcttgggagaccgggaggagaaggtggtgggcyagtcctgtgtcctcctccacttcccatgcctctatgttacccatctgtgtctcctgtgcagaaggagaggaaggggcattaagagatgaagggtgattatgtattacttatccatttctgaataaacatttgttattcctacctttgagttatcttttttttttttttttttttttttgagacaaagtctcactctgttgccaaggctggagtgcagtggcactatctcagctcactgcaacctccgcagccagactcaagtaatcctcccacctcagcctcccaattagctgggactgcaggcgtgcatcaccatgyctggctaatttttgtagagatgaggtttcaccatgttgcacaagctggtcttgaaatcctgacctcaggtggtctgcctgcctcggcctcccaaagttggaattaacaggcgtgagccaccacgcccagccaagggttttaatcttgcagggatttcaacatttggggtggaacttaattatttaaaaaatagagacagattcttgctatgatacccaggatggtcttgaactcctgggcacaagtgatcctcctgcttcagcctctcaaagtgttggagttacaggcatgagccactgctccccaccagggatgcaaattacttgatactcctctccagaaggtggggtcctgtgcccctcctgaacccaagtgtgctctgttactactttgaccagatgtgactctgccatttctgtgcctaggcttttaaagatggtcacttctccatttcctgtgcctggaacattctctgggagccttgacaccacatttgaagttgcctattggggccagcatggtggctcacgcctgtaatcccagcacttyagaaggccgaggcaggcagatcgcatgaaatcaggagtttgagaccagcctaaccaacgtggtaaaaccctgtctctactaaaaattacaaaaattagaggggcgcggtggtgggcgcttgtaatcccagctattcaggaggctgaggcaggagaatcacttgaacccgggaggcggagtttgcagtgaggtgaaatcacgccactgcactccagcctgtgcaacagagcgaggctctgtctcaaaagaaaaaaaatagttgactgtcggtttggcatggtggctcatgcctcttgtcccagcactttgggatgctgaggcaggaagattactggagctcaggagttcgagaccagcttgggcaatatagtgaagccctatctttacaaaaaacgaaaaattagctcactcaggagcctgaaatggaggatcatttgtgcccaggaggcagaggtcgcagtgagctgtgatcatgccactatactccatcctgggcaacacagtgagacggcagaaaaaaaaaaatagttgactattgagtctcatatctgattgcccacctgacatctcccctgagtggcctaatgggcatctcaccacggcccacagagaactgatctactcgattttccctaagctggcccctctcctgcagtctacccatgtcagtcaatggcaacaccatcctcttagttgctcagactgaaaagctagcagccatcctggatttctctcacactgcctattcaacgtgtgaatgcatgagtggaaagctgagttcgcactcgtgactggccggggtcgactctgacattcactcccactttggcgcgctgatttgcctctgagcggatgaaggttgagccatggcgggcggggccggggaggcgggcttggagcgagggggcggggcaggcgcyacaaaaacgcgctcgcgccggcgccgaaccgcaactcccggcgacccccgcgctcccgggtggcaagatggtggcgcgcaggacgaagctcgcggcgcgggacccggaggacggtatcccgagcccaccgtgctacgcaggtgaggggatccggaacgcgagaccggrggcggccagcatcgccgggaggtgtttgggggctggcggcggccgggggtccccaggagcggccgcacggttgggtgtgagccccggtggcccgtggccccaggctccgcaggtcttgaggctccggggtcccgaggacccacgcggcgcccttctgcctgctcactctcccggggcgagcccaacttggtccacgcttcccttgggtgagcccgcctctgtccacactctcacccaggacaaacccatttccgtccacacctgcttgtccaggtgagctcatccccttctcatcgcctctgctcctagtccatcccccatcagctcttacctgggctgttataggccctcctactcggttgccctccttctcctcttgcccctgcttctgttctccacccacgtgccagaatgttcttttaaggacatttagattcgatcatgtctgccgcgcccacgataggcgccacacctactgcattccctccagtggctttatcaggtagcttctaaaacaaaaaccagacttcttaacctgtgtgggccacgtggtctggctggtgccgacctaaagctctttctgttcctctgagggaacatgctttttcccccctctgggtttttgcacgtgctgtgccggtttgttgcacagtggcgttctggcctgagctttaatgttgcttcctcaaagaggccatccgtgatggcctatggaaagaagacctctgccaccccatcaccctgtaatgtttccttcacgattgatacaagtttgctgtatgcttacttgttaattgtcttctccgttattgcaactgagcttcctgagttcagggaccgcagctctatgccaaccggtactgtgacggaggtgtgagaaaaatagaagcagttcctagctttatgaggattacagtcatgggtgtgccagcgattaaccaaagaatctcatcaatatagcctccagactgttaagagaagctgtgaaggcacaggcagtgggatctgagctggcaggaggggcggaggtgatgctaaggctctcctgaggaagcgaggtttgagctaaacctgaggtgagcgggagggaagagggtgacacgccaggtagagaggccagcatgtgtgaggccctggtgtacccgggggaacagagaatccaaggtgctgggggaagatggtacaagaagaggtcacagtgacaggcagggtctcacggggcttccagccatggttaggattttggcgttgactccaagagccgcagggttcgagcttccctctcattgcgcccccatctgtaatcattgcccatttatcttctctctccctgcaccgccttgggaggccctcctgggcagactcttagagcccgcacaggctttgccaaagagtagggtaaggggggttggtgaagggatggatggatcgatgaacagataggactagacagggatgtggagaaaggaagttgtgtgagtgtctcgctggcctcagctcagggtagcctggccatccctcccctcccatttcctttccagctattccaatcaagttctctgaaaagcaacaggcttctcactacctctatgtgagagcacacggcattcaacaaggcaccaagtccacctggcctcagaagaggactctttttgtcttcaatgtgcccccatactgcacagaggtgagctggtgtctgggaggggacctgttggctcaaggtcccatgggacctgggggctcccatggcctccaccgagtccttggtggtgagatggacatagctaatgggagccccagaggagagtgtcaggaaggctaccgtgatctccagtcaggaaactggctttttaaagatgtctttaaaagtataatcctgccaggcatggtggctcatgcctgtaatcccagcactttgggaggatgaggcgggcggatcacctgaagggaggagttccagaccagcctggccaacatggtgaaatcccgtctctactaaaaaataaaaaatgagccaggcatgatggtgtgtgcaggtagtcctggctactcgggaagctgaggcatgagaatcccttgaacccggaaggcagaggttgcagtgagccgagattgcgacattgcactccagcctgggcaacagagtgagactccatctcaaaagaacccaaaaaaccccaaaaattagccggacgtggtggcgcacgcctgtaatcccaactagttgggagactgaggcacaagaattgcttaaacctggtaggcggaagttgcagtgagcgaagatcatgccactgcactccagcctgggcaacagagtgagactccatctcaaaagaacccaaaaaaccccaaaaattagccggacgtggtggcgcacgcctgtaatcccaactagttgggagactgaggcacaagaattgcttaaacctggtaggcggaagttgcagtgagcgaagatcgtgccactgcactccagcctgggcaacagagtgagactctcaaaagaaaaaaaaaagtataatcctaagtagcccaaggcttttttgcatattacccaaagttgtttgaattacatgttttcttccagattgtacatgtccataatttaaaagtaggaaagtataagaaaataaaagtgcctctaattctatccaaacacaactgttaatttttcttttctttttttttttttttacagaaactaaagggaattgctggattttcttttcttttttctttgttcttttttttttttttttttttttttttgagacagagtctctctcttgctcaggctggagcacagcgatcacgactcactgcaacctccacttcctgggttcaagcgattctcctgccacagcatcccgagcagctggaattacaggcgcccaccaccatgcccggctcgtttttgtattgttagtatagacaaggtttcaccatgttggccaggctggtctcgaactcctgacctgaagtaatccgcccccttcagcctcccaacgtgctgggattacatgcgtgagccaccgcccctggccaagggaattgctggatttgttttcaaaaaagaaaccctaatttgtaaaagattcctctaaacttagagaaaaaaagaagcatatagaagagggggtgtgagttctgaccttttttgaagtgcagcatgtgtgccgggaagggccccagtcgcaagtgtccagctcgctgcatcccagagacagaacatagctgtgtagtcagcacccaggtggagacacagcagcacatcccagaacccccgaacccccactgcctccaccagagacaaccaccatcccaactgtcacagcatagggtcgctactgctgattcaggtagtaaaacttgtcataggaaatcagaataacagcaagaatgtccccacctgtctccaatgagagagagcaggaatgtgccgggcacagtggctcacgcctgtaatcccagcattttgggaggccgaggcgggcagatcacctgaggtcaggagttcaagaccagcctggccaacatggcagaaccctgtctctactcaaaatacaaaaattagctgggtatggtggtgggtgcctgtaatcctggctgctcgggagactgaggcacgagaatcacttgaaacctggagatggaggttgcagtgagccgagatcactctatagcactctagccagggttacagagcaatactccaactcaaaaaaattaaaaaaaaagagcaggaatatcgacctccatattgtccctggggaacaggtcggaggccatggtgcccacagtctcccggcttgggcagatgtggctgtggctctgagtccttcagcggcgctggatccctggcagcgccacccatggtggagggaggctttgggatggccctgcggatgctcacacttggcttccctctccctgcagcaggagagcctgtcctgcctccagtccacctgtggccttgtccagtctgtagagttgaaggagaagctggagctggctgggagtcaaggtcgaagttttttcatccaaagccagttccggtgagccgccaagcactgggttccactagagtgaggggggtggtggggcactgtccccagtgtggtaggggagctggcagtgggacgtcagagcattctctggtcctgagcccatcctcactgtgtgtggtgtaggagactgtccgggtgacaaagcctgcgattccttcccagatttgccacatccttgcacttcctgcctggctttttctgtcccgtgttaaagctcacggaccgtctctgctggccacctgcagggccttccccggctcccctcctgcttccccactgagggagctccttccccaggcttgggggccgggtctccaggagcactgttgttcacagctttcccagtggccctggagcccacacctcctccccacacagtggcatctggcatggtgtgtgtgcccaggcctggcttccaaaaacctgccgtggcccagggcgacccctgcgtttcaccgcatccctcccgtgactggaagaaaggaagcctctgtatcctctcttcctggggaggagttgggaacagctgtcacttcgcgaagaagcaggatcactggaagtgtggctgcccctgacctggattatgggatggcctgtggttctcttcatggctcaggaatagcctagcaccgtctcccctggtgtagctaccacctaggctgagggcaggcctggagaccttgtgccagacgtgggaaggagcccccaacctctgacatctctctctcttcagggtttccaggtagcctacgtggtgttccagaagccaagtggggtgtcagcggccttggccctgaagggccccctgctggtgtccacagagagccaccctgtgaagagtggcattcacagttagtactgcgggaggggtctggcgcctcctttctgggctccgggttggcaggacactctatggggacagtgtctgaatgtcacaagccaagtccatgctccctgagagcagcatgtggaggcctgggcaggaggaccatggggctgtgtctgggtccccagggagtcattagcctgagcccctggcacagagcggcacaggcatactgggcaggcagagcgagggcgcagcttgcagcccctgggatctccttagcgcctgtgccccgggccctgtgggaaaaggtcccaatttgcctggcaggccctggggtggggcccaaatgccaggcctgaggaagccccgtttccctggctcccttttcctcagaatggatcagtgactacgcagactctgtgcccgaccctgaggccctgagggtggaagtggacacgttcatggaggcatatgaccagaagatcgctgaggttagaggccccgcggggtcagccgagccccgcatcgcccgtgtggctgtgggaaggtggcgccccagagggagggcggtggtgtcctgtccttggccactctgtagaggccaggctccctgtttccctgctggatcctgggctgcctggttgggtgacacatgtagtctccacatggtctacagtggagaaggaggcagcgccagcaggtccgtgccctccccgccctccttagccccaacactgtgctgggaggaggggagcagccctcccctgcgggggctcagggcagttctgactttgggaggagggcgtggagggcgcgctgctggaggctgcgggaggtcccaggcgcccaccggacgatgggatcaccttccttgcaggaagaagctaaggccaaggaggaggagggggtccctgacgaggagggctgggtgaaggtgacccgccggggccggcggcctgtgctcccccggactgaggcagccagcttgcgggtgctggagagggagagacggaagcgcagccaaaaagagctgctcaactacgcctggcagcatcgagagagcaagatggagcgtaagccaccccgagtccatcctcagacccctcggccttggccccagccacggatgaggcctgtggccagtgctcctgagggcgggcgctggacttggtggtcgaggagggagggcgtccctaagcacggggctcgcaccagactctgtggaaagaggcccagcctggcagcaccctgtgtggcggttccccatcaccccccaggggcagatgcatttgctcagtgggtggggaccctaggtcatcagtgcccacctctgggtccctgtgcacttagtgctggcgctcgtcagcctccagctaacgcgttcaagtgcagagggggcttctgaacccactgtgggtgcagagaaggtgctgcagagtatgtgtgttgggttggtggtgggtgtgtgtgtgtgtgtgtctgtcaggtggccccgcacaggaccctcccatgcctgtgggcccgatcgcctgtggcccactcctggtgctgcggctgagcctcctgccccactgcctggtgtccctgtctacagaacagcttccctgtgggcccaggggagggttctcctggccctggctagggcacagggacgggctctgcggcaggccctgagccgcccgcccagtcactggtgctttccctgcctggctggccctcctggctcccgctcgtgctcgctctagaccctcagcttccccctcagtgccatcagcctcccactgaccagggttgccatctgcattcaccagcacaagggctggggtgcctttactgattctcagggttctccaggccgagcgctcaagactccttccttccccctgtgcagggatgggggtgggggcgggtacctttgctttgtcgctagggcttcatctccaggctgggggtgccagcatctcccactttggccttgcccttggactcggcctggcctgccgtcggttctgtttcctgacaagatccagaccctgcccccacagcagagctgggagggggatgggctggtgggggagacatagccccacccccacagtaactgggaggaggggtggggcatgagcaagccagcttccccggggcgcgctgtctgaccctgccccgcgcctcctctcacccccagatctagcgcagctgcgcaagaagtttgaggaggacaagcagaggatcgagctgctgcgggcccagcgcaaattccgaccctactgagccgtgagagccgcagtggatggctggaggtgcagggccaggaggaacatgaggtgaggcagggcctgcagcggtctctgagaggccgagctctggccaacgggccccaggttgaaggccatcgcgtccaacagccccatcagagtccacacaggccaggagtgaaggaccaggccacccctcgggtcttgtgcttcagcagtcctggagacccaggcgtgccgagaggaggacttgtccttcccacctcttgcctccacacccttgaggaccctggatgaatccgttctgtgcttccttttccctcaatgcaaaagcccttgctggcaacaaaaaagcctcaaaagcagtgagaatacaagaaccttttattttccatccagttgggcagcagggaaaggctaggtgggcccagcctgcccttccttcctccagctggctggatatttattattagccaggagaaagcagccctggaacccagactctgtctccctcttgaggtcacagatgttgaagttggaatctcgctccttcccctgactaccatcctaggctgggcctcaagactagtgaggcctgtccccaccatccctggccttgttgtggggctcaggaactcagagtcccagtgttgagtctgggagcactaggtcttcatagttccaggcccagagctacagctgggctgggagcatgtgtgtgcactgtaagaaggagctgatgatactggccacgtgctggggttcgctcatgtggacacagtgattgcctgggacttccacaaactggaactgctggagaggggagggggtgggtggtgaggtgtggccagaggagcctagggagctccatgggccccggggtcagggccctcccacagcattccagctccctgcaggtcaggagcgcctcccacagtgagtttcccccacactcggctccttggagccccgacagtccatagcaccccaggaggtgtctaaccctagggacttggaggcctcccaggggtctaggccagctgagttgtgaagttgcatggcagggacagggcggggccgaggccagggttgctgtgattgtatcagaagaggtacccgtgagaaaagataatgagatgggggcgtgaacagcctgcagacttgtgtctgccttcaagaagccagacagggccgggcgcagtggctcacgcctgtattcccagcactttgggaggccaaggcaggcgggaggccaaggtgggcggatcacgaggtcaggagatcaagagcatcctggttaagacagtgaaaccccgtctctactaaaaatacaaaaaattagccgggcgtggtggcgggcgcctgtagtcccagctactcgggaggctgaggcaggagaatggcatgaacccgggaggtggaacttggagtgagccgagatcgggccactgccctccagcctgggcaacagagcgacactccatctcaaaaaaaaaaaaaaaaaagccagacaggaaggccttgcctgccttggctctgacctggcagccggccagccacaggtgggcttcttccctttgtgacaatgccaagaaacctgcagaggccccagggtcagtgttcctgggtaggtgaccataaaacaccacgtgctcccaggaacctgggggaaaagccacctctgcctacagccagcacgcccactgtcatgatgggtgcagagggatgaggcagtcgggtattctgctgtggtttgggagcctgtaaaatgtgcgactaggccgggtatggtggctcccatctacaaaaccagcacttcgggaggccaaggtgggcggatcacctgaggtcaggagtttgagaccagcctggccaacatggtgaaaccccatctcttaaaaatataaaatataaaaattagctgggcatggtggcaggtgcctgtaatcccagctactcaggaggctgaggcacgagagtagcttgaacctggcaggggttccccaccaaaggtctctgtttccttaattctgattacatgtgtccctaggcctctagggactgaccacagtggagcatgaggcctgatagatcctggtggtcacttgttgggcctgggggcagacccagggtcttcccagtgcatgagaagagatgggtgaggtgggaccagagtgggcgacagtggctggacaccagctgcctgagccccgtcttacctctttgagggtggatttcatcgtgtctatcatgaacgacagggactccttctcagagtaattctgtcttgaatcaaaatatccgtggactgctctggaaagtgaggagttgggggttgttggggttcatcttagaaccgcctcccagcggtgcccccatcctgccctgggttcaggcctctgaggagaaaccaaagcctgggctaccccaactcccacagctgggtcccttgaccctgggttggatttgaggctcagttaatctcagctcatgctcagctggcacaagccaggcacaagtgaatgctgaaggcacagcctttctggggcacagggagttcaggacttggtcacagtcagccctgaaaagcagagctgggatctgaacaggcgctggagcccatacttgctctgagagagaatttatgtcttcacaatcctcccgttgatagtctacaattctgtggtttttaatacattgagttgtgagaccatcgtcacaattacaggacattttcatcgcccccaaagaaatcgcgaacctctgagcttacgcggacacacacacaccccaccccaccccccgccccccgcccccaacaggcttccggtcctgagcaaccatgacctggctttgtctctgcagtgtgccctatttggacttgacttgaacgtgaatgcagccatacaacacgtagacggttgtgtctgaattcgtccacttagcgcgatgttttaaaggctcatccatgctggagcccgtgtcagtgcttcgtttctttttatggcttaaaaatcgtctatggtgggccacgcacggtggctcacgcctgtaatcccaacactgggaggccgaggcgggcggatcatgaggtcaggagatggagagcagcctggccaacatggcgaaacctcgtctctactaaaaatacaaaaataagccaggcctggtggcgggcgcctgtagtcccagctactcgggaggctgaggcaggagaatcgtttgaatccaggagacagaggttgcagtcagccgagactgggctcactggttatggagccttacctgggcatgccccccgctgacacctgtggaaaggcatgggacagccccggcccatcccctgctgcccgagccctcccctcctctgaccttcctccttccatgaccctgctgccaggggggcttcccaaaaaagatcttgagccttagcgatgtggtcgacacgcagagaacttggagcctcatgccagggccccctcccggagattcctggcgcccatgtctccttggcgggtggctgaaggggatgggtccagacttacttgatcaacaggacatgggcctgcagcttcctgatggaatgcgcacacagctccctgctgatgaagtcaatgctgttctctgcctgcagagacaaaaacatggtgaattctcgtcacaaggcacaggcactctcgtgggcacgaaacccatctctgttggggtggctaagtcctggcgagggcaccttagccacccaccctgggtctgagcccaggaccccacatcactgcctcatcgaaggctctttagcccctggtggccagagactcctgccctctccaagtctgttctcccttcttcctgggctcgtggctacccagcctgactccatttcccatactcctttgccaccgggtatgcctgtgagattaaaggcagagaagtgagttgggccacttctgggcctggattttaggacttaggtgtggcccttccacacccctttcccagtccataggctgcacctcacgctgtcccctgccagcctgggacaggcttcttgccaggaggaagaaacttgctgggaccacagtgcaggatgggcactccgtgatggcccctgccggcctcctccgcggccctgccagccctgtcttgtgactgttttacgtctggatggcagggatgtggccagcttgagtgagatgtgctgtaggtgtgacacgaagctggatttggaaaacttagcatgcaaaataatgcaatcaagctttatgttgattacatcttgaatcacattgtggatgttaaaatatgagaacaattgttagagccttatttatttgagaccgagttttgctcttggtgcccgggctggaatgcaatggcgcgatctcagtttaccgcaacctcccgcctcctgggttcaagcgattctcctgcctcagcctaccgagtagctgggattacaggcatgcgccaccaggcctaattttgtatttttagtagcgacagggtttcaccatgttggtcaggctggtcttgaactcctgacctcaggtgatctgtctgcctcggactcccaaagttctgggattacaggtgtgagccaccacacccagccttgggcctgttttaatatagctgctagagaaatgtcaagttctgtgaggctttgcttccattgcactgtgctgctctgatctggggactccaagggcaggagctctcagcattttctctatccctagttctcagcacgtggagtacagaggagaagcttcataaatgcagctgagtggattaattccgggaagctcccgtaaggaccagctcccctaagttacacccgatactcctgcaccattgtgaatataaaattgccatgaacacacacacacacacacacacacacacaaattgctatgaacacacacacaccagtgaaaactcactgccctgtttccaccctggccctccagctattttctgcttctcagactaaaatgacctgaagtgccttccctgaaacaggggttcccatactgttcccaaggcctgcgtgttctcatatgtcagctgccacatctcacagcggggtgtgaccaagctttttgggcctgcacacaggaggggcttcctgggcacaaggtgaacaggcaaacttgaccctgtctctactaaaaatatgaaaattagactgggcacagtcactcacgcctgtaatcccaccattttgggaagctgaggcaggtggatcgcctgaggtcagaagttcgagaccagtttggcaaacgtggtgaaaccccatctctactaaaattacaacaaattagctgggcatggtgtcaggcgcctgtaatcccagctactcaggaggctgaggcaggagaattgcttgaacccgggaggcagaagttgcaggcagccaaactcgggccaccgcactccaccctggatgacagagtaagacttggtctctaaataaataaataaatagaaggtaggtgctttgcttcagcagcacatatactgctaaattggaacaacaaagagatgattagcgtggcccctgtgcaagcgtgatacgaaaatttgtgaaatgttcctttgcaagaaaaaaaaaaaaattcacatcacctgaggtcaggagttcgaaaccagcctgcccaacatggcaaaaccctgtctctatgaaaaatacaaaaaattaacccagcatggtggagggcgcctgtaatctcagctacttgggaggttgaggcaggacaatcccttgatcccaggaggtggaggttgcagtgagctgagatcccaccactgcactccagcctgggcgatctcagctcactgcaatctccgcctcccgagttaaagcgattctcctgcctcagcctcctgagtagctgggactacaggtgtgtgccaccacacccggctaatttttgtattttttggtagagacagggtttcaccatgttggcgaggctggtctttaactcctggcctcaagtgatctgcctgccttggcatcccaaagtgctgggattacaggcatgagcaactgcagaaacttaaaacttagctggccagaaacttaaaaaataaaagagaattttgggccagctccattttgtaatgtgtatcttctgcaatttagtttatgtcctaacgaagtctttccatccctgggaaccatcttccttccagcattatgggtgatcacagctcccactacagaacaggtcacataagacatggtccctaaggacagggaagggggcatctccaaaagccagattgactaggatctggcaataaattcctaccacgaaggtcagcacacacaagggacaaaccaccagtgagtgagccttagtgggtagggaggaccacccaacagctggtattggaataactagctgttcatctagaaaaacaattacgatggctggctgcagtggctcacacctgtaatcccagtactttgggaaactgaggcgggaggatagcttgagcccaggcattcaagaccagcctgggcaacatggcaagacctgtctctacaaaagtaaaaaatttagctgggtgtggtagcgcacacctgtagtcctagctactccggaggctgaggtgggaagatcacttcagcccaggaggttgaagctgtgtgagccataattgagccatggcactccagtccgggtgacagagggagaccctgtctctacaattcaaatagaccgaacactgtggctcatgcctgtaatcccagcactttgggaggtcgaggcaggcagatcacctgaggtcaggagttcgagaccagcctggacaacatggtgaaaccccatctccactaaaaacacaaaaattagccaggtgtggtggtgggtgcctgtaatcccagctacttgggggctgagacaggagaatcactcgaacctgggaggcaaaggttgccgtgagctgagatagtgccattgcactccagcctttgcaacaagagcgagactctgtatcaataataataataataataataataaaattaaagaaaaatcgaacttttattttttttatttatttattttttttttgacatggagtctcgctctgtcgcccaggccggactgcgaactgcagtggcgcaatctcggctcactgcaagctctgcttcccgggttcacgccattctcctgcctcagcctcccgagtagctgggactacaggcgcctgccaccgcgcccggctaattttttgcatttttagtagagacggggtttcaccttgttagccaggatggtctcgatctcctgaccttgtgatccacccgcctcggcctcccaaagtgctgggactacaggcgtgagccaccgcgcccggccgaaaaatcgaacttttaaaacacaaaaaagaaaaaaagaaaagaaaatgaatcactatctgacaccatgctcaagaacaaatcccacacggatcaaagacaaacacgttaacattcccagaccattggctgacgccctggtccaagcctcatctcttggcctgggcctgggcagcagctctcagcggtctccctgcagttagagcgtccccacctctaatgacagtgtctcacatgtgtccaatgttctaccatattttaacaatcacaaaatagcacaggccatgagcacctgaagcgacagcactgtgcgaggccactcaacacacatgacctcacctagtctcgacaacaacccttcaaaggcaggcccagggcttggctcccctagccaagctgctcataaaccagctgagcgaatgaaagcactttctttttgcacgtgagacaaccaaggctcagagagggtaagcaccttgcccaaggtcctacagcccctcactggcagagatggccaagtttctattaatacaagtgctccagtgacacaggcctccagatgggacgctgttttttgagaacctttgtcatcctgcccctcccctctttaatcttcacagcctctatcaggaatccccctctcaacagatgcaccgagctgacttcgagcttttccctgtgcagcagccagtgcctgggatgtctccctcctctcctcacctccatcgactgtatttaatgccactgaagtgcatacttacaaacggttaaattgacaatcattaagtattatgttagctatataatttctttttttttttttttcttgagatggagtctcgctctgtcgcccaggctgcagtgcagtggtgctatctcggctcaatgcaacctctgcctcccattcaagcgattgtcctgcctcagcctcctgagtagctgggattacaggcgtgagccaccacgcctggcctgtaattttcaaaaacgacaaagacgctaacaggcaaaccttggcgggggacccggaggcagtggtactcacccaggcgagcctctggtctctgttcagaaccagacctggaggcggaagcacaaagacagcagcgtcaatgctgtccatcagggtcaggggacgctccgtgactttgctggaaccctccaggcctttgcagccagggcccatttctcccacctgcccccgacgtcctcagctgcccaggactccctgtcctggggtccagctggagcagggctagaccacagccacctggccacagacctgtcagcccacatgggccctcaccggccaccccaaagggccggtgcagaatgagggcgggagcttaggctaatagcctcgtggacggtggagctctagtctctgagaaactcattcattcctttagtcactaggaagaagcaaataagtaccaatggtgtcactggttgtggtgagctgagatcgtgccactgcactccagcctaggcgacagagcaagactctgtctcaaaaaatcaaacaaaaaccactaaaaaaccatacatatatgatataccaacaagattttcttggtggggggcctaaaccacctgattctcaagttcacgtggaaaaattacacaggtaagaatagcaggaggtcaggcacctgtaattccagcactttgggaggccgaagtgggaggatcacttgagaccagcgtgggcaatggagcaggaccccatctctacacaaaaaaactaaaaaattagccaaggccaggcatggtggctcaagcctgtaatcccagcactttgggaggccgaggcaggcgaatcacgaggtcaggagttcaagaccagcctgggcaatatggttaaacctggtctctactaaaaatacaaaaattagctgggcgtagtggcaggtgcctgtaatcccagttactcgggaggctgaggcaggagaatcgcttaaacccgggaggcagaggttgcagtgagccgagatcgagccactgcattccagcccaggtgacagagtgagactccgtctcaaaaaaaaaaaaaagatgtgagggtgatctggctgcgacatctgtcaccccattgatcgccagggttgattcagctgatctggcggctaggcgggtgtcccctcccttccttaccgctccatgtgcgtccctcccgaaactgtgcactcggtcgaagaggacgaccatccccgatagaggaggaccggtcttcggtcaagggtatacgagtagctgcgctcccctgctagaacctccaaacaagctctcaaggtccatttgtaggagaacgtagcgtagtcatcccatcaccctttgctctcttttcggactcggcccgcctgcacccaggtgaaataaatggccttgttgcgtgtacacacacacacacacacacgcgcgcgccgagcatggtggcacactcctgtagtcccagctactgggaagactcaagtggaagggttctttgagcccaggaggcagaggctgcagtgagccgagatcctgccactgcaatccagtctggccaacacagcaagaccctgtctcaaaaaggaaaagaaaaaagactagtagaaaaactctgtaaaagagccatgaagggagacggtcccgtcagatgcgaaaatcctcaggccgggtgcggtggctcacacctgaaatcccaatactttgggaggccaagacaggtggatcacctgaggtcaggagttcgagaccagcctggccaacatggtgaaccccatctctactaaaaatacaaaaattagccaggcatggtggtgggcacctgtaatcccagctacttggcagactgaggcaggagaattacttgaacccaggaggtggaggttgcggtgagccgagattgtgccattatactccagcttggacgacaaaagcaagaccccgtctcaaaaaaaaagaaaaaaaaaaatcctgtgtcgggcctcagtttaaaatgtgtggtacagtaagatcatagacaggcagtcagagacagacccaagtacagatgggcattcactgtctgaccaaggcagccccttacatgaacagggtaaagatagacttgtctaaaaatggcattaggcacctgaggagccatctggaaaaagatgaagtcagatgcaaacctcactttgtatactagataaggatccaatgtagtaaatatttaaatgctagtgctagacccaaaataatattagtgtcaagcatgaccttttaactatgactcaaattccagaagccatacaaaagacatgttttttcttgtcttttttttttctgagacgaagtttcactcttgttgcccaggctagagtgcaatggtatgatctcagctcactgcaacctccacctcccgggttcaagcgattctcttgcctcagcctccccagtagctgggattacaggcatgcgccatcacgcccaactacttttgtatttttagtagagacggggtttctccatgttggtcagggtggtctcgaactcccaacatcaggtgattcacccacctcagcctcccaaagcgctgggattacaggcatgagccactgtgcctggtctagaaatctgtatttttacataaaatctttctatttaaaataatagcccttctgctctggtccttgggcccttcctccaaaaaataaaaagagtataataaaaaataaaatgtgggcaatctattcaaaattccccccatgccaaatgtttttgattaaactgcacaagttaaacaaattattatctgcaacctgtatgcagtccagcttatgagaaagatttgagcctcccccacagcacggggcttcaggggccagatatttttgttttgtttttaagacagggttggctgggcatggtgactcacacctgtaatcctaccattttgggaggtcgagtcagtaggatcgcttgagttcaggagttcgagaccagcctgggcaacatggcgaaactccatctctacaaaaaaatacaaaaattagccaggtgtggtctgcacacttgtggtcccagctactcaagaggctgaggtaggaggatcgcctgagcccatgaggccaaggctgcagtgagccatggtcacgccactgcattccagcctgagtgacagagcaagaccctgttgaaaacaacaacaacaaaaaaaagaaaaaaagaaaaagccagggtcttgctagagtgcagtggcacaatcaaggttcagtgcagcctccgactcctgagctcatgtgagtctcccacttcagcctcctaagtagctgggaccacaggtgtgccaccatgccgtttatttttgaattttttgtagagatgggggtgtctccctatattgcccaggctggtcttgaactcctggcctcaaacagtcctcccacctggactcccaaagtgctgggattacaggcatgtgtgaatacgcttggccaggggccagactgacacagactgtccctctgtccttagggcaccccaggcagagtgggcccctccctccttcatgggaacacctcaagatggtttccagaaagccagtattgtggggcttaaacttagatgagaagataaagagctcatctctgctgctctctccccatcctgcaccaccagctcacacctccaggcctgtcctgccagctcctttctcctcctggagtccgtgggagcagctcccgtaccttcactgctttgctcaaaagtcaccttctcatgaggcccacccagaccttcctattcaaaagaggaagtggagctgcagcctctccaacaatgctcgctgccctccccactctgcgtcctccacgagccctccccttctcacgcactctgtaacccacccagagaacctcacacacaagccaacgggctcctgaggctcccagcagccagagaggtgggaacagatactccctcacagccctcagaaggaaccagccctgccgaggccttgaccttggaccctgaactccggaactgtgggggaatgtgtcttggttgtttaagctccagattctggaggaatcaggttggatgatgggggcagggaagggaagttatcccagttcagaatagaatgtgaactctcaggggccctggggttggagggaagcatttgggaggaacctacattgtccttgaggcactgggtggggggttctggctgggtactgtcttcttttaggttaatgctgggtcccaaaaggccacaactgctgcagagggcttgtctgcacacaacgttccagccagctgaccacttcccccagacccagggttcacctctttctcagccctccctcttgcctgttccctcacccccctgacacccacataggggtgcctggtcagcatcctgcattcactgtttcctgtgacctgggcctaatcgaattccccggcctcattccagattagctcacttctgtgcctggggctccctaggtcagccatccgtgaggcatgtccaggaagcctgggcccggggtccttgacctcccctccccatgatgggtttccagggaggcaagataaaggttcagccaagatgatcacgaagacccaactggtcccaaactggcgacccgaggccaaaacagcccacaggtgccgctccttagaccctcgggggatgctgtccatttctggactcaagacaactaaaaatactcacctcagcagatcaactgcagagctgagcaactggtaattctggccacacgagactgaattcccacttgattagcaccggcccagctgcctaccagggtgggctgcctccagctccaaagtccctacacagcccatagcctccctcccggcctgcaccctcaactccacaacacgcccccacccccgcccccaggtgctggagtttctgaccccctgcctcactcagcactttataaagggaaggcacatgcccacctcacctggtccaatgagcgcaaaaaacccaagaccttgtttgtcacctgagcaaacaaggggagtctaaaagggaagggactgtcccaagatcactgagctggcagtgtcaggaagcaaagttgtgttgcccagcttagcacattttccatccgacgacaccatctccctccagctgttccctcaccctgggagagctgcttcctggaccactgctctgaagcaggccccgccatgagtctcttctagagcaccatgtatttccttcattacatctagagaatgtctaaccactcatgtgcctgttcacctgtgtatcatctgcttctcttccaagaatctaggcctctgcccagactcttccttactcaactccagggggcgccatttgtgcacagcagcccctggagttgtggtgcgggaggtctggccccactgagagagggacagtcggctcttgctcactgcagcctcactgagccgggcctgtagcaggcccttacaaaagatttcctgggccaggcacagtagctcacacctgtagtcccagctactcaggaggctgaggtgggacgatctctggagcccgggaggtggaggctgcagtgagccatgatggtgccaccgcactccagcctaggtgacagagcgagaccttgtctcataagaaaaaagaacgaaagaaaaaaaattcctgggtaaaaagcaaagtacacaaatcgcttgtgccagaagctgctctgaaaccaagacataccagctccacctctccattgtgaaaagcctctcccaagtcactcagcccctgggacgtcctcacagcctgcctctggcgctgggcacccaccccagatccagcagagcatggccgtgacattcaccaacatttagtccaagacacctgaccaaactctcccagagcgtggctttctgggatgtgcagtaactgtatggcctcacccgggttgcttggcaatgctgagccttggtttctcctgctctaaatgggatgagggtgaggcaggagggggattcagtgagatgctgtttgcaaagcgcttagtatcctgcctggtctaaggcaagtccttgacatcctcggtaagaatagtgacaaatataaaatggccttggacagtagagtcccttacctgtggccaccttcgtggttcctctttgcaggagaagctccccgcactcctcactcaagtggctattgctcttcagtaacctggggggagacagaaggatgctgggtgcctggaggccaataaaaaggaggtcagataaaaaggagaggagggccgggggggacggtggctcatgcctgtaatcccagcactttgggaggacaagatgggcggatcatctgaggtcaggagtttgagaccagcctggccaacatggtaaaacctcatctctactaaaaatacaaaacttagctggacgtggtggcatgtgcctgtaatcccagctacttgggaagctgaggcatgagaatcacttgaacccaggaggcagaggttgcagtgagctgagattgtgccactgcactctagcctggggaacagagcgagatttggtctccaaaaacaaaacacaacaacaacaaaaaaatggagacaagggcagcaaaagggaggtcacccacaaagcgtgcatgtgtctcgtgatttttttttctttttttttctttgtgagacagagtcttgctctgttgcccaggctggagtacagtggcgcaatctgggttcactgcaagctctgcctcccgggttcatgccattcttcgttacatctagagaatgtctaacgcctcttctggatagatattcaggcgcccgccaccaccacgcttggctaattttttgtattttttagtagacacagggtttcaccatcttagccatgatgttctcaatctcctgacctcgtaatctgcccacctccgccttccaaagtgctgggattacaggcatgagccaccgtgcctggaccttgtattctaattgagacagggtctcactttgtcacccagactggagtgcagtggcatgatcatggctgtctgcagcctcgacctcctggggctaagcactcctcccaactaaggctgctgagtagctgggaccacaggcgtgtgccaccacgaccagctaatttttttttttttttttttttttttttaaatacagggtctcgctatctcgctcaggctggtctctaactcctgggctcaagctatcttcccacctcagcttcccaatgtgctgggattacaggtgtgagccactgcgcctggcctgtgtcccgtgtttcgattgcatgtttacagcggcagggtgtgtgtgtgtgggtgtgtgtgcgcgtgcgtgtggtggggcagtggggggcttctcctccttcagacaacaaatatgtgtggagctctgacctaccaggcccactgccagatgcaggaggcacaaagatgaccaaatcagccatagtgggggttgcggagttcacatgcctcgggaaacagaggaatcaataggctcttattggacagtgtggttacctgcagggcagggacagcttgcctgggggtgtcagggcagggttcccagctgaggccccaaggagtggggaagccagtgagcaagcacaggggagaattccaggtaagggagcccaggctggagtcccagaggggagagaaggcgtggaagcagcatgtgcttgggagagaggcgggtgcgtgagaggtgtggggagggtattggaagtaaggggcatggctggagcaggggcagagggaaagagagaacgtccctgaagaccctgggaagcctggtgctcagcgtgaccccagggagaaacaggcttgttgggtgagagggagaaagaagcttctccacgtctcacgggatgtcctcccctggaccccaccagctccccgtccacaccgggcacccacctctgcagcagctgcttcaggctgaacacgtgcgagggctcctgggaggcctctacctgcagcacgtgctctatggctctccgcttgtaggtcagcaagttctccatttcctaaggaggcacagttggctggtgggcagggatccaggctgcagacgaggtctctgcccctcctagccctgccctctgctctcagctgagcccctctcggcaaaggggcacacagccccagccctggctagtcagccccacgattctgaacgagtctttgcttcgcctcagtcacagccagcctggtcttgcctgcggccagggacagttgaagagatcaggtgggatgatggagaggaaggggaatctctgtcaactgccaagtgctttgcaaaggcatgaaattagggtccggaggccacgaaccatctggggttggcagtttcatctggttcaacgaatgccatcattctcagtggcagaaagggactggcagaaagggcgcatttctggggcttccaagctcccccatgatgtgtggctcactctgtgaggacagcctcaggcccactgcctggggctgcagaggggggcatctcccatctacccatgcctgagaatgcaggacaagaggaccaaatgcccctcttgactcgcccaggaggaagcccctgggggcactgcacttgtcaattcagtgggtgaaatgcagaaagaagggagtgtctgctgtctgccatctgtaaattggatccttataatagcccctgagctagctgagctcatgcaaggaacatttactgagcccttactaggtgccaggattggggatgtggtgacagagatggacatgatccttatccttatgggatctgccgtcattcttttttttttttttttttttttttttggagacggagtttccctcttgttgcccaggctggagtgcaatggcgcaatctcggctcactgcaacctccgcctcctgggttcaagcgattctcctgcctcggcctcccaagtagctgggatgacaggcatgtgccaccacgcccagctaattttgtactttcagtagagacgggatttctccatgttggtcaggctggtctcgaaatcctgacctcaggtgatccgccagcctcggcctcccaaagtgctgggattacaggcgtgagccaccgcatctggccgatctgtggtcattctatggacaagaaaactgaaactgatgagacttgtgtcacaactgataggctgagaccttggcaagaaaatgacaggatgtcagagctggccaggtcattgagcccaacctcattttacacgtgcgggaactaaggcccagagaggcaaagtaacttgccaagggtcacccagcaggtaaaccaggccaggactcagacgcagagacagtactggttatgggtagtggtggtcagaggggtcagtccttgttccttcagttcacatttagggctgtcatgtgtggtggtgcaatgtggacacagtgcaaaggcattcgactgggtgtgagtgcagtgtgccggcccagctgtgtgccctagaacatcttccacccatggccgctgccctcttccactgcctgccactgcgtgatcagcctggcattctgcagatcccgagccacacatccagtttccaaggggtcccccacaccccttgtcctgaccactgctaggggtataagcagcagaagggtgtcatctgttggggagcgggtccctgactcccctttcccaccctctgccgcctcctcgtgcttccctagtgtccaccaaaggagacagggctgggagcgctgcccggggcccaggtcctccctaatgacagcatgcacgaaagcccgcttctcacatctgattccaggagaaagagcggcgtgtccagcaagataagtttatccaccatctcggggaaggtacagaaaaactgtgaggatgccaaaaggggagaatgaatagggggaagaaggaaaggacactcccgcctttccctggggaccctggagttccccgaaacatcttttaggctggggggagggtgctgaccaagaggccagaggagaatcttctatctatggtgtgccttcccccaccacccctaagtctgcacccagcactgagctccagaccttggtgatggctggactccagggtgcggtgggaccgggtatgggggcgtggaaacatgaactctaccaggagtctccaccgtttacaccaacttcctggtataaggactatcactgtgacaggaggaggcactttctgtcccaggtaccttctccttcctcctttgtgctcccctccccactccacccaagggagccccagttggccagacaaagccatctactcaccattccgcccacgacgccacctgggggacaaaagagctgtgggtgacattccctcactccctccccagctgcataccctaaagcttcttcccaccagttggggggggggcaccatatgggtggctgggggctcagcatctgggccatgatgtccccttcatcagacctgaccactcaaaagaccacatttccctcatccctgtgtcccttgcggcagttgcctgaggtcagagggtacagtggtcaacctctgactgaccctctcatctctctttgcagatctcataagtgcaggggaaaggggtggggcagcagctcctatccttccctcccagccctactccgggcccggtcagctcctggccactgtactcaccgaagctgtggcccagaatggagaatcgattccatttcaaggctggaaatgcaaggagccagaaggtccggctgggcacaggctcagcccacgatcttgcttctagtccccaggctcaggaaatcccttcccagcatctggggtgtccacccaggacactagcttgggggacccactggaggaagcgaactcttcaactttcccaagatctcccgtgaattgctggcagacctggggccagagcccaggccccactctcaggccagcgctgcttcctggatcctaccccgcctccagtgataagagggggtgccctagagcaccccccacaccgccgaaaatacacactctgtttcttacctgccacaactcttcggatctcactcacaaaagtctggaggtaatatgggacacctgggctgtaatgggacgagagcccatgacctccgaaatccatggcaacgtaataaaagtctgaaacagagagaagcgggttggagggtaggaagaggtgtctatgccagctgtctccccgccctcctcattcccctgcagacctcccccctcaccttcctgcccactttccccctggccttcccttcagccccagcctcacaccttgcgggagaagagggatgagtctgtcgaaggagctggcattgtccagccagccgtgcaggcagagaactggagggccctgcagggagccccaggctttggctgcgatgtggccccagggcacagccagcttcagctctgagatcagacctgaaagacacagccgggtctttcattccttcattcattcacccatgaagctggtgctccctgagccccttatctctgcctgatgtgcttgagccaggggctcatgtccagagggactcagacccttagctgccccagaaggttatggggagagagtcagacatgggagtggagactcccagaggagggacagagaagctaagccggaaaaagctgtgacaggcctcagagcatgcaccccatttaaactggggcagaaccttctagaatgtgctggggcgggggcgctggtcaggcctggaccccatcacttgctggctgggtaaccttggagaagttactaaaacgtcttgagcctcagtttcctttcctgtaaaaccggagtaaagaaacagcccgtttcctaagcctttcccaaaggccagaggggtgccaaaccctcatacacgcagcaggtgggaccactgtcactctccctccacagagcaggaaactgaggcactgggagctgcagtacatgcccaaggtcacactgggcgacaagggcggagtggaaatttagggcaggcggtgggactccaggaacccccaccgcccccacatctggcagcctcctccgtctctgcaaggctggagacttgcgcacccccgacacccacgcgcacgctcggctaactcaggggctcctggaaccctgggaggccacgtgcggccgtgtcccgggtcccccaactcctggccggtcgcgctctcatg

SEQ ID NO: 94372 - DNA, 15348 bp, Homo sapiens
caggagagacagtcgtcttgaatcgccaatgccatacctctcacatccccatctcaactcctcagcacagagaatctgtgcattttggggagggagagtgctgcaattggaggactttacattgaactcagtgctacctgtcacagtggagaataaagctatgctgggctcagcaaatgcctgtgcatggagagagcattgggaccacccttagccagaggggaattgcccattccaatgatcagaacttgaatttctaggagtgtgggctgaagtgccctgggggttctaggtaaacttgaaaggcagtttagaacacaaagactgcaattgctaggcaactcctagtgctagcccaggcttagagccagtggacttgggtggcatgtaacctagggagacatcagctgacgtggctaagggagaacttgtgctcacgcaacaaaagtgactcctttcttctgcttaaggataggaaagtgaagaattaagaggacgatgtcttgcatcttggatatcagctcagccactgtaggataggccaccgggcagagtcctgaggccctcattccaggccctactttccagatgacattttgagacacacactggtgcaaaagaacctgctgcctcgaagggaaggacctagtcctggcaggattaatcacctgctgactaaggagcccttgggccctgaatagccagcagtgatacccagggaccacactgtgggcattgggctctgagatgtgctgacttcaggggtgactcagcacattcccagctgtggtggctatggtgaaagactcctgtttgataaaagcttttattaaagactgtatgtctttataggtggacaccatttctggacctgccctgggtcagaggagagcctactgccctgaaaggtgagtcccaggcttgggagcattcaccccaagctgacagaggagcccttgggctcaaaacaaacatcagctgtggcctggcagaaccccctgtggactggtagtagtgatggccacagggacagcttcctctgtggaaagcgaaggactttctattgtggtttgagtgccagcttagctgcagtagaatagaatattagctaaatttctaaggtttttgactccagtccttggctcacaaacagcatctgtggacacacctggagcctgggggggatcttaccacccttaaggaaagagccttggataaggtccagtgcattgctggcttcaggtctgacccagcacagtcccagtggtggtggtcacaggggtacttgcatcaccacacctccagttccaggtgcctcagcacagagaaactccatatgtttgggagaaaatagggaaaagaacaagagtttctgcttggtaatccagataattcttttggatcttatctaagacaccaaggtattacttctacaagtctgcaaaaaccacagcattattgagtttgaggcccaagtccctttgaatacctggaaaaccttcccaaaatgggacaggcacaaacaagcccagactgtgacaactacaataaatacctaactcttcaatgcccagacactgaagaacatctacaagcaccaatgctttccaagaaaacatgacctcaccaaatgaactaaataagacaccacagcccaatcctggagaaacagatatgtgacctttcagacagagaattcaaaatagctgttttgaggaagcacaatgaaattcaagagaaaacagaaaatgaatccagaattctattagctaaatttaacgaagagattgaagcaaaaagaagcagaaattgtagagctgaaaaatacaactgacatgctgaagaagccatcagagtctcaatagtagaactgatcaaacagaacagagaattagcttgaaaagaggtgatttgaaaacggagtcagaagagacagaaaaaagaataaaaaacaatgaagcatgcctacaagatctagaaagtagactcaaaagggatactctaagagatattggccttaaagaggtggtagagaaggagaaagcagtaggaagtttattcaaagggataatatcagagaacttcccaaacctagaaaagatatcaacattcaagtataagaaggttatagaacagcaagcagatataacccaaagaagactacctcaggcatcaaataatcagactcctgaaggtcaaggataaagaaaggatcctaaaatcagcaagagaaaggaaacaaataacatacaattgagctccaatacatctggcagcagacttttcagtggaaaccttacaggtcaggagagaatggtatgacacttttaaagtgttgaaggaaaaaaccttttaccctagactagtatacctggtgaaaatattcttcaaacatgaatgagaaatcaagactttcccagagaaacaaaagctgagggatttcatcaacaccagacctgttctacaagaaatgctaaaaagagctcttcaatttgaaaaaaaaaaaaaaaatgagcaagaagaaatcatcagaagctacaaaactcactggtagtagtaaacacacagaaaaacacagaatagtatgaatagtgtaacactgtaattgtagtgtataaagtactcttttttttttttttttttttttgagacaagagtcttgctctgtcacccaggctggagtacagtggtgtgatctcggctcactgcaagctctgccttctgggttcacgccattctcctgcctcaacctcccgagtagctgggactacaggtgcccaccaccatacccggctaagtttttgtatttttcagtagagacggggtgtcaccatgttagccaggatggtcttgatctccttaccttgtgatctgcctgcctcggcctcctaaagtgctgggattacaggtgtgagccaccgcacccagccataaagtactcttaagtagaaatgctaaatgatgaaccaatcaaaaataataactacagcttttcaagacacagacagtacaataagatataatgaaaagcaacagaaggttaaaaagctgggggatgaagtgaaaagtgtagaatttttattagttttctttttgcatgtttgtttatgcaattagtgttgtcttcagtttaaaacaatgcgttataagatagtatttgcaagcctcatggtaacctcaaatcaacacacagtggatacacaaaaaataaaaagcaagaaattaaatcatagcaccagagaaaatcaccttcactaaaaaaggacaagaaggaaggaaaaagggaagagaagaccacaaaacaaacagaaaacaacaaaatggccagagtaagtccttacttatctataataacattgtaaatgaactaaactctccaatcaaaagacagagagtggctgaatggatgagaaaataagaacgaatgatctgttgcctaaaagaaacacacttcacctataaagatacacatagactgaaaatcagggatgggaaaagatattccatgcaaatcaaagccaaaaaagaccaggagtagctatatttatatcagacaaaattgatttcaagacaaaaacgataagaagacatgaagtccttgcccatgactatgtcctgaatggtattgcctaggttttcttctagggtttttatggttttaggtctaacatttaagtctttagtccatcttgaattaatttttgtataaggtgtaaggaagggatccagtttcaggtttctacatatggctagccagttttcccaacaccatttattaaatagggaatcctttccctattgcttgtttttgtcaggtttgtcaaagatcagatagttgtagatatgcggcattatttctgagggctctgttctgttccattggtctatatctctgttttggtaccagtaccatgctgttttagttactgtagccttgtagtatagcttgaagtcaggtagcatgatgcctccagctttgttcttttggcttaggattcacttggcaatgcaggctgttttttggttccatatgaactttaaagtagttttttccaattctgtgaagaaagtcattggtagcttgatggggatggcattgaatctataaattaccttgggcagtatggccatttcaccatatttattcttcctacccatgagcatggaatgttcttccatttgtttgtatcctcttttatttcatggagcagtggtttgtagttctccttgaagaagtccttcacatcctttgtaagttggattcctaggtattttattgtcttggaagcaactgtgaatgggagctcactcatgatttggctctctgtttgtctgttactggtgtataagaatgcttgtgatttttgcacattgattttgtatcctgagactttgctgaagttgcctatcagcttaaggagatttttggctgagacgatggggttttctagatatacaatcatgtcatctgcaaacagagacaatttgaccaaaagcaatggcaacaaaagccaaaattgacaaatgggatctaattaaactaaagagcttctgcacagcaaaagaaactaccatcagagtggacaggcaacctacagaatgggagaaaatttttgcaatctactcatctgacaaagggttaatatccagaatttacaatgaactcaaacaaatttacaagaaaaaaacaaccccatcaaaaagtgggcaaaggatatgaacagacacttctcaaaagacgacatttatgcagccaaaagacacttgaaaaaatgctcatgattactggccatcagagaaatgcaaatcaaaaccacaatgagataccatctcacaccagttagaatggcgatcattaaaaagttaggaaacaacaggtgctggagaggatgtggagaaataggaacacttttacactgttggtaggactgtaaactagttcaaccattgtggaagtcagtgtggcgattcctcagggatctagaactagaaataccatttgacccggccatcccattactgggtatatacccaaaggattataaatcatgctgctataaagacacatgcacacgtatgtttattgcagcactattcacaagagcaaagacttggaaccaacccacatgtccaacaatgacagactggattaagaaaatgtggcacatatacaccatggaatactatgcagccataaaaaatgatgagttcatgtcctttgtagggatatggatgaagctggaaaccatcattctcagcaaactatcgcaaggacaaaaaaccaaacaccgcatgttctcactcataggtgggaattgaacaatgagaacacatggacacaggaagggaaacatcacacaccgaggtctgttgtgaggtggggggagtggggagggatagcattaggagatatatctaatgttaaatgacgagttaatgggtgcagcacaccaacatggcacatgtatacatatgtagcaaacctgcacgttgtgcacatgtaccctcaaacttaaagtataataaaaaaaactataagaagagacaaagaaggtcattatataatgataaaggggtcagttcagcaagagggtataatgattattaatctatatgcattcaatactagagcacccaaatatataaagcaaatattaattaatagagctaaagagggagatctcaatacaataatatccagagacttcaacacctcactttcagcattggacagatctcccagatagaaaattaacagagaaaatttggacttaatctacactatggaacaaatggatctaatagatatttacggaacatttcatccaatggctgcagaatacacattcttctcctcagcacataaatcattctgaaggacaggcgatatgttaggttacaaaacaaaacattaaaaaaaattgaaataatatcaagaatcttctctgaccacaatgaaataaaactaagaataacgagaggaactttgtaaaactatacaaggacttcagcggacatggctcccagcgtgccagcggcagaacccgagtatcctaaaggcatccaggccgtgctgctggggcctcccggggacggtaaaggcacccaggcacccatattggctgaaaacttctgtgtctgccattcggctactggggacaggctgagggccatggtggcttctggctcagagctagaaaaaaagctgaacgcaactatggatgctgggaaactggtgagtgatgaaatggtagtggagctcattgagaagaatttggagaccccccttgtgcaaaaatgtttttcttctggatggcttccctcggactgtgaggcaggcagaaatgctcgatgacctcatggagaagaggaaaaagaagcttgattctgtgattgaattcagcatcccagactctctgctgatccgaagaatcacaggaaggctgattcaccccaagagtggccgttcctaccacgaggagttcaaccctccaaaagagcccatgaaagatgacatcaccggggaacccttgattcgtcgatcagatgataatgaaaacgccttgaaaatccgcctgcaagcctacgacactcaaactaccccactcatagagtacttcaggaaacgggagatccactctgccattgatgcatcccagacccctgatgtcgtgttcgcaagcaccctagcagccttctccaaagccacatcctagtatcagaaggccaggcgagactgcaccactgcttatcaccccaccgcgtgatccctgctcttaggtgctgggcagaagggaagggtggtcagggtgaggatggtgagggagggctggtgaggggctcagaggaatacctggaacaacagcagtgttattgtagtgtggcagtttcttttatacataggtgggagtttttaaagtaagggaaaaattaattttttaaaaaacaccatgcttggagggtgggggtagaaatacagagatacaatattatttctaaggaattgggttttcatttactctggactggtgaaaatattttttaaagccagtgctctgagacctcagcttttaactcagaactccatgggttccagaccaagagtacaggaaatcgaattgttgtcctgtctgtctatagcttggaacagggaggctttgattacttaccctggttccacatactgtaagatcaaaaaaccatctccacatttgaaagagatgtaaggtgtattcatagggatggtggctcaamaaatcaagcaaactgaaatcaaggggagggggaagggaatgaaatggaaagggaggctgattcccttcccctgacttaccactaatttactaggctacctactctcatgagtaacctctcacagctatccagcacatgccacaaccctatgctcttgccttcttttatctgcagtgtgtgaagggactcttttaaataaatgagcaastgtcctaagctatgtcatccaaagattgtcctttccgttctcaaatcttgtgactgggatcactcaacagcactgtgatgtattattttcaatgaggtgcctttcttaagaccaaatgctgccttgttgggcccctaaatcaataaaatatgttaaaatttgaaaaaaaactatacaaacacatggaaattcagcaatatgctcctgaatgaccagtgggtcaatgaagaaattaagaaggaaattgaaaaatttattggaataaatgataatggaagcataccaaaacctttgggatacagtgaaagcagtacaaagagggaaacttatagctataagtgaccacatcaaaaaagaagaaaaacttcagataaataatctaatgattcattttaaggaatagaaaagcaagagcaaaccaaatcaaaattagtagaagaaaacaaataacaaaagttgaagcaggtcgttggcgaagcctgagtcctgtcctctcactctgttccccagacagcatgagcttcatcactcgctccaccttctccaccaactaccggtccctagactctgtccaggcgcccagctacggcacctggcaggtcagcagctcggccagagtctatgcatgtgccgggggctctcgttcccggatctctatgtcctgctccaccagcttccgggacggcatgatgttccgggggcctgggcacggggatggccgggggtctggcaggaatgggaggcatccagaacgagaaggagaccatacaaagcctgaacgactgcctgccctcctacctggacagagtgaggaggctggagaatgagaactggaggctggagagcaaaatccgggagcacctggagaagaagggatccccggacagagactggagccattacttcaagactatggaggacctgagggcccagatcttcgcaaatactgtggataatgcccacatcgttctgcagattgacaatgcccgccttgctgctgatgattttagagtcaactgtgagacagagctggccatgtgccagccagtagagaacgacatccatgggctctgcgaggtcattgatgacaccaatgtcactcagctgcagctggagacagagatccaggctttcaaggaggagctgctcttatgaagaagaaccatgaagaggaagtaaaaggcctacaagcccagattgccagctctgggttgactgtggtggtagatgcccccatatctcaggacttcgccaagatcatggcagacatctgggcccaatatgacgaggtggctcagaagaacagagaggagctggacaataacaggtctcagcagattgaggagagcaccacagtggtcaccacacagtccaccgaggttggagctgctaaggcgatgctcacagagctgacacgtacagtccagttcttggagatcaacctagactccatgagaaatctgaaggccagtttggagaacagcctgagggaggtagtggcccgctatgccctgcagatggagcagctcaatgggatcctgctacacctggagtcagagctggcacaaacctgggcagagggacagtgccaggcccaggagtaccaggccctgctgaacatcaaggtcaagctggaggctgcgatcgccacctaccgccgcctgctggaagatggcaaggacttcaatcttggtgataccctggactgcagcaactccatgcaaaccatccaaaagaccaccacccgccagatagacccgccagatagtggatggcaaagtggtgtctgagaccaatgacaccaaaattctgaggcattaagccagcagaagcagggtatcctttggggagcccgaagccaataaaaagttcagaggttaaaaaaaataaataaaaaaagttgaagcagaaataaatgaatttgaaatgaggaaaacaatacaaaagaccaatgaaacaaaaagttggtttttttcaaaagataaacaaaattgacaaacatttagccagagtaagggaaaaatggagaggactcaaatacataaaaacagagatgaaaaaggagacattacaactgataccacagaaattcaaaggattattagtggctaatatgagcaactacatgcccatatattggaaattctagaggaaatggataaattcctcgacacagacaacccaccaaaactgaaccatgaagaaatctaaaatctgaacagaccaataacaagtaacaagattaaagctgtaataaaaagtctcccagcaaagaaaagcctggaatccaatggcttcactgctgaattttagcaaatatttgaaaaagaactaatatcaatcctactcaaactattttgaaaaatagaggaggagggaatacttccaaactcattctatgaggcaaggatacaccaggcaatactatgcagccataaaaaggaataagattatgttatttgcagaacatgtatggagttgaaagacattatcctcatcaaactaacgcaggaacaaaaaaccaaacatcacacgttctcagttataagtgggagctgaacaatgagaccacatggacacataagggaaaacaacacacactggggcctgttggttggagggtgggtattgaggggagggagaatcaggaagaatagctaatggccgctgggcttactacctaggtgatggaatgatctgtgcagcaaaccaccatggcacacatttatctgtgtaacaaacctgcacatgtacccttaaaataaaatttgaagaaaaaaaaaagtctcctagtaaagaaaagtgtgggcccaatggctttaacactgaattctaccaaacatttaaagaagaactaataccaattctactcgaactgttccaaaagacggaaaaaagggattactctcaaactcattctatgaggccagtattatcctgctaccaaaaccagacaaagacacatcaaaaaaggaaaactacaggccaagttttctgatgaatactgatgcaaaaatcctcaacaaaatactggcaaactgaattcaacaatacattaaaaagattaatcatcatgaccaagtggtatttatcccagggatgaaaggatggttcaacacatgcaaatcaatcaatgtgatacatcatatccacagaatgaaggacaaaaaccatatgatcatttcaactgatgctgaaaaagcattacagtccaacatcccttcatgataaaaactctcaaaaaactgggtatagaaggaatatacctcaataaataaataagacccatggccagcatcatactgaatggggaaacactgaaagcctttcctcttagatgtggaacatgacaagtttgcccactttcatcactattcttcaacatagtactggaaatcttagccagagcaattagacaagagaaagaaataaagggtatccaaattggaatggaaaaagccaaattatccttgtttgcagatgatataatcttatatatggaaaaacttaaatactccaccaaaaaaccctattagaactgataaacaaattcagtaaagttgcaggatacaaaattaacatacagcataaatttatataaaattcagtagcacttctatatgccaatagcaaacaatctgaaaaagaaatcaagaaattaatcccatttacaatagctatgaataaagttaaatacttaggaatgaacttaaccaaataagtgaaagatctctacagttaaaactatataacactggctaggcatggtggctcattcctgtaatcacagcactttgggaggttgaggcaggtggatcacctgaagtcaggagttcgagaccaccctggctaacatggtgaaaccctgtctctactaaaaatacaaaaattagccagacttggtggtgcctgcctgtagtcccagctactggggaggttgaggcaggagaattgcttgaacctgggaggtggaggttgcagtgagccaagattacgccactgcactccagcctgggtgacagagtgagactccatctcaaaaaacaaaaacaaaaactatataacactgatgaaataaattgaagaggacacagacaaatggaaagatattccatgttcatggattggaagaatcaatattgttaaaatgtccatactagccaaagcagtctgcagactcaatgcactccctatcaaaagcccagtgacattcttcacagaaatagaataaacaatcctaacctttacatggaattgcagaagtcctacaatagccaaaactatcctgagcaaaatgaatgaaactggaggaatcacattacctgacgtcaaattatattctaaaactatagtcaccaaaacaacatggtactggcataaaaatagacacatagaccaatggaacagcaaagacaacccagaaactaattcatatacctacaatgaactcatttttgacacagttgtcaagaacatagattagggaaaagacagtgatatagtttggatatgtgtcccagcccaaatttcatgttgaattgtagtccgtagtattggaggtaggacctggtgggattgattggatcatgggttggatttctcatgaatgatttagcaccatcctgttggtgctttcctcacaatagtgagttctcacgagatctggctgtttgaaagtgtatggcaccttgctctccttctcttgctccagctcttcccatgtcatgtgcatgctgttccctaccttctgccacagattgtaagtttcataagaccctcctagaagttgagcagatgccagcatcatgcttcctgtacagcatgcagaaccataagctaataaaacctttttgctttatacattactcagtctcaggtatttctttatagcaatgtgaaaattgactaatacagaaaatttgtacctaggagtgggtcattgctataaagacacctgaaaatgtggaagcagacttggaactgggtaacaggcagaagttgcaaggcaggctgtggagcaaccacatgctagaaagatttgcataatgaaagagaagtcaagtactgatagccaagacaatggggaaaaggcctcaaaagcatttcagagacctttgaggcagcccctcccatcacaggccctgaggcctaggagtaaagaatggttttgtgggccaggcccaaagccccagtactctgcgcagcctcaggacactgctccaccacctcccagccacttctgctccatccatggctcaaaggggctcaggtacagcttgagctgctgcttcagaggatacaagccataagccttggtggcttccatgtagtgttaagcctgcaggtgcacagagtgcaacagttgaggcttaggagcctccacctagatttcagaggatgtatggaaaagcctgtgtgtctaggcagaagcctaccgcagggatggagccctcatggagaacctctactagggcagtgtggaggggaattgtggggttggagacccctcacagagtccccactagggcactgcttagtggagcaatgagaagagggctgctgtcccacagacctcatagtggtagatcccctgacagtgtgcctggaaaagcccacagacacttaatgccagctcatgagagtagctgtgggggttgaaccctccaaattcacaggggcagaactgcctaaggccttgggaacccactccctgaaccactgtgacctggatgtgggacatggagtcaaaggagattatttgggagcgttaagattcagtgactgtcctgctgggttttgaacttgtgtgagacctgtagtctctttcttttggttgatttctcccttttggagcattcctaatgccatactcccattgtaccttgggatttgattttacaggctcataggtggaaggagatgaatataagatgagactttggacttgaaattcagagttaatgctggaatgagctaagactttgggaggactattgggaaggcatgattgtgttttgaaatgtgagaaagagatgagatttgagaggggtcaagggtggaatgatacagtctagatctgtgtccttgtccaaatttcttggtgaattgtaatcccccgtattggaggtggggcctagtgaaagtaattggatcatgggggctgatttctcataaatggtttagcaccatccttcaggtgccattctggtgatagtgagtgactttatgtgaaatctggctgtttaaaagtgtgtggcaccttgccgtatgtatcttgctcctgctctggccatgtgatgtgcctgctccctattcatcttctgccatgattgtaagattcctgaggtctcccccatagccaagcagattccagcatcatgcttgcttcctgtacagcctgctgatcatgatcagggtttttctttataaattgcccagtctcaggtgtgtcttttttttttttttttttttttttttgagatggagtctcactctgtcacccaggctggagtgcagtggcgtgatcttggcttactgcaagctctgcctcccaggttcatgccattctcctgcttcagcctcccaagtagctgggactacaggcacatgccaccacacccggcgaattttttgtatttttagtagagacggggttttaccgtgttagccaggatggtctcgatctcctgacctcttgatgtgcatgccttggcctcccaaagtgctgggattacaggcatgagccatcgcrcctgacctttctttctttcttttttttttttttttgagactgagtctcgctctgtcaccaggctggagtgcagtggtgtgatcttggctcactgcaacctctgcttcctggattcaagtgattctcctgcatcagcctcccgagtagctgggactacaggtgcacaccaccatgccccgctaatttttgtatttttagtagagacggggtttcaccatgttggccaggatggtcttgatctcctgacctcatgatccacccgcctcagcctcccgaaatgctgggattacaggcatgagccactgcgcccagcctcagatgtgtctttatagccatgcaagaatgggctaatacagacagtctcttcaataaatggtgctgggaaaactggacatcgatatgcaaaagaataaaacttgactgctatctcttgccttgtaaaaaaatccaatcaaaatggattaaagacaaaaatctaagtctttaaagcatgaaactactacaagaaaacattggggaaactctccaggacattggtctgggcaaaaattgcttgagtagtaccccacaaatacaggcaaccaaagcaaaaatgaagaaatgggatcacatcaagttaaaaagcttctgcacagcaaaggagacaatcaacaaagtgaagagacaacccacagaatgggagaaaatatctgcaaaccacgcatctgacaaaggattaataaccagaatatataaggagctcaaacaactgtacaaaaaatctaataatttgatttaaaaaaaggacaatatatttaaatagacccatctcaaaagaagacacacaaatggcaagaggcatgtgaaaaggtgctcaatgtcattgatcaccagagatttgtgaatcaaaactgccatgagatatcatcttgccccagttaatacgacttttccccaatagtcaggcaataacaaatgctggcaaggatgtagagaaaagggagccctcatacactgttggtggagatgtaaattagtataaccactatgtagatcagtttggaggttccacaaataaccagaaatagagctaccatgtgatccaacaattccactgctggttccatacccaaaagaatgggagtcagtctatcaa

SEQ ID NO: 94373 - DNA, 32935 bp, Homo sapiens
  misc_feature (1)...(32935): n = A,T,C or G
ccaagctgggtgtagtagctcatgcctgtaatcccagcactttgggaggccgaggtggacagatcatttgggtcaggagtttgacaccagcctggccagatggtgaaaccctgtctcctctaaaaatacaaaaattatctgggcatggtggtgggcacatttaatcccacatactcaggatgctgaggaagaagaatagcttgaatctgccaagaggcagaggtggcagggagctgagatcaggtcactacactccagcctgggaaataaagactccatctcaaaaaaaaacattattataaaaaacccatacatattttgtagtatacctgtgtctgttcttcattaattaacatattaaaaataataaattactcgaaattaaaactctgtttctttaggaagctgcaccacatttatcccaaggattctcacgttctctgcacacctgccttcccagggtttgggtactccagctgcaggagtgtggttctgatctgtctcctttatcataggtataatccagttaccaagaatgtgactgtcaaaagtgaaggcctattcaggtcatcttcacacttgttcaatcctcaacaatttcaaacaatgaatgagagaaaagaaaggcagctagcaccagcaccactgatgccagcgatccaactactaaagagtttgaaactttcattaaagacctttcagctgagaataatttggaaagcctcatgttatgttcctcctcaaatctggctctttttccataccattcctacaaagagacatcatggttcattagaagacatgaccaaaatcaactagggaagggcagccatcaaagactttattctcttgaagaaggtgttcttgggggctgtaaggagcaggcagaagactttattgcatgtgtggttaggtgacagtgaccaacagttttcactggcaactgggatcaagagtgacccaacctcctactcatgcacctctctccctgtctctttaccttttacatcactctctctctctcccttctcttcttctcagcctcctctgtctctctccccatctctcttcctctcgctctcactcccttctctctctctctgtctttcatctccacttctctctccctcctcatctccctccctgccactgttcaggctcctggggccccacctggacaggcacacacaggagtcttaggccacctttcagggcacatgcacagggctacagaagctggtcccccacctcccagcaccctcaaagacaggcgtgtgggaccttgcactctaagaagcagaagctgcaggtcacccctggctcaagtggtgcacctgccaggctgccagcttccatcctgtgatctgctgagaccacagcagaggacacctgaaaaggccctggcctacaccagggtgggagtaggggtgaatttgggggtgnnnnnnnnnnnnnnnnnnnnnnnnnnnnnnnnnnnnnnnnnnnnnnnnnnnnnnnnnnnnnnnnnnnnnnnnnnnnnnnnnnnnnnnnnnnnnnnnnnnnnnnnnnnnnnnnnnnnnnnnnnnnnnnnnnnnnnnnnnnnnnnnnnntcccaccacctccaccctaggctgccccagacccaggccccagaagtctccctggatccaggaactaagggcaaccactgggttccgctgccacagggatgagtcagctgccccctctgggtgctgaccaaccttggctcttacttatgccctaccccaaaccagccacacaccacccccaccagcataaccacctcctcctgaatttaaccctgacagcactgcttcctggtaaccttccccctcccaccatggtccaggcaagcccaaaggccagcatcctccacccacccttcctgggggccactctactgtctgtttgctcagctgtcttaacctggctttaacaagatgaaacagacagcagggatgagcccccagcctctcccaggaagatttggcaaaatgctcttcatttagaagcaggggcagtgatggggcctaaggatgaccccaggcttgtcacccaaggagtaagaagggcaaggagccaggtttcctgcccttaccctgggaggacatggccagagctccacaaggccctgcagggggctggcaagagagcagatccactctcctcttgaggaagcagccaccacccccaggaagcagcagatgggggtgcactgatagagcccccgagtgctataaagcagggtcagcagatctgcacacattctcagccccaggggagctgcaagaccagctgagaccctgataggtttggctctgtgtccccactcaaatctcatcttaaattgtaatcctccagtgtcaagggaggaacctggtgggaggggattggatttggggacagttcttccccccacgccgtgctgttcccctgatagtgagtgagttctcaggagagctgatggttttaaagtgtggcacttccttgttctccactcactccctcctgtcgccttgtgaagaaggtgcctgcttccccttcgccttctgccatgattgtaagtttcctgaactgcaagtcaattaagcctctttcctttataaattacccagtctcaggtatttctttataggaatgtgaaagcaaactaatacagaccccttccctgagatgccttctccttaggccaccagctgcccccatgctcctcctctgccccctggtctttatttcccctcactaggcccaagtgatccacagggccagccccagcaccatcctactgcaggcctgtgtggctgctggagaggctgggctcctttcctcaccccgaggctgcctgatatgctctctggatcctggaggaatctgacccccatcctcgtactagtgcaacttcttccaaaactcaaagctggacaacgtgagctggtcttttttcttgtccccacttgctagggttgtcactgggacagtcctagagttgctgggggaagaatggatgaatggatggatgaatggacagtagtccagggaggatgtccctgtgtgtcctgaactaggcccttcctctgatgagaagccttcctgagtgagtttatacagtcatcccttggtatccatggaggattatttctagggtccccggggatgccaaaacccatggatgctcaagtctctgatataacatggcttagtatttacatataacctatgcacatcctcttgtatacattagaccatctctagattagttatgatacataatacaatgcagctgctatataaatggttgtgatactgtattgtttagggaatgatgacaggaacagtctacacatgttcagtatagacagccatccaatttcatttctgaatattttccatctgctgttggctgaatccacagatgcagaactcccagatatgagggccaagtgtgctttgagagtagggtgggtgaggttgctaatgagtacaggggagcaggtgtcaatcaggagggcactgcattggggcatcaggacaccctgtttcaggacttgagcctccaggtttggatggcacaagaagactcagcccaggccaaagccctccccttgaatgttcttttttatcccaagctctttctggctcctggaatttggcatcacctaggccttgggtggaaggacggataagccagattttagataacatgtctagaagagtgagcctctactgtgtgccgggcactttccccacaggatcctctagctggaataaccaaggatcatggagagaaatacccaattaaaatatcagaaataaaaaaatagataccattagagatactaaaaagaccattagagatactaaaaggatcattaggtaatagtattagcatttttcttctgagattcaacaacagcagtcacttccctccatccctatgtgtatcccaggcctaccctgggcagggagggctgaggtcagggagcacccatggatgctttgatgctggcctggggctccgggggtgacagtgacaaggaactgggtgcacacatgagtggggcagccaggcctggccagagaagcaacacatgcatgcacagatgtgtttacccacatacacgtgtgcatgcacatgtgcaaacacattgcaggcaggcatgttgacgcctcaggcagtggaggatgctgactctgggccctgctgacccaggcaaggccccattgtgatgcctgccatgacctcagaatgtcactggtgcttattacccgtccgttgtccggcctgcctctgtgttctacagcagctacacacacacagtggtatctgtgagcagctctgtggactcaaaggttttctccctgagaggcagagcccaggccagctgattcatcagtatcaggtgagtgtgacctgctctcttccctccatgctgacttggggactgtggctacagtgtgggcggtgctggcttctaggcagcagccgaggaaggtgacccctgagcactcaccaggtacccactctacactgcccatgtagacaattgtctcttttgtcctcatggtggctcctgaatgtacccatttggcagttgagacatctggggtcagagaggcagtaaccagcccaggaatccaggcatgaccctgggttttgctctcagccctgccctgtgctgcactggacttaaggcttgaacccggtggcctccttgccctagatcccaaatttgtccagggtttccgatcccgatggggcagagcctggccctggcagagccactgggatggatccactgtgggtggggtggaggggagggccctccgaacacatctgtgccctaagctgggtcttgatggtccctgtgggacccactggacacacatggccccttgtctgggagtagcatggggagccttctgcctttgggcagctgtggaaaatgaaggagccctggagagctggctggagtgagactatcttccatcctgttcaaaggggtccaggaactggggttctccccaagtatttctttctctgtctgatcctctcaaggccttgccctccttttgccccaagtgttcccagaagggacagtccatctaggtgttctccaggaccaaagacccactgttcttcctcagtgacccaggaaaatgaatccccttcctgtatggacagctcagaatggtggagtccacagtccctccctgagagatgtggtttccatgagcacaggggctgctttggagacagtagattattttcatccccaaaaccaaacaccctcctgctcaactggtgttgttcctaaagtggcttcactgttcagactgaagggccatgatagtccaagtgatgagtggagtagaaccaagcggtcaggagaggtcttgttccccataggaagctgaacatctctgtggtccctgagcatcccaggaggcctattgtacagagacctctggtccctctccccagtctgcctccacatccctggaatagcccatcatgggcccttcacccttggcagatggacaccattgaacctgctaggccaaatgtgtgcgcgtttcatggcatctggggacaatgggattctctgtccaggtcccactgttctcaagtccttgggaagatgcctacccctgcttgaggctttagaccccagagacctgtgcaggtgtgggccactggggctggccctttttcacctgggtgcagtggtggaaggggggttatgcagccaggcagcatctgggaaccgggcaggagcagttcaggtgttctccgaagctctcgggtacagtgtaacctttagacaattttgtctcacaggatggacatggtagaggatgcggatactttgcaggagtgaggggacatcattatgaagcatgagaaggtagagggcagtctgctccctggagggaggcctcctccagtgcaccctggtgaaagggtcctgggctccctaggagcacagagcggggacaggtggccctttcaccctttaccttggacccctcaccaaggctcccactgggttgcagggacaccaagctgggctgccagcagacatggggcctgtgcctgttggaatctacagcagtgctgattgctttgggattctgcagtgagtcctctgtgctcccctcagcccctaaagcacctatctcagctcagggctgggtttgcttttacaaaggcctttctgaggcaggacttgtctccctaggtcgagccaacctcctttccagggtcagaactccttcctggctcccctgccggtccagcctgaggttgctgttaggccagtggtgtggggcccatctagggagcgggtgggaatggagagggggctaggtcaggcccctgggctctcagcagttctgtctccgagttagcacaagaggaggaaggcagcctgagggtctggccctgttcacttggagacaaccccagtgagatccaagcgttgtggccacagggtgaggggaggcctgatccagcctcggggctgttgtccagcaggtctctgagggcccaccttcccctgttcacccccatttccctagagctacagccctcactgtccccatggggaagggggaaaggcatggggacagtaggggctgtggccctaggagaatgggggagaagactggcagggccctattctgggcatctcacagagagccagggaggcagcagagcttgtggctaatgacyctgggtctggtgctgggaagggatctggggccaggtaagaggagcccagcccggagcccatccctcagggatcataggatggagagatggaggatcaccgggtaagtagtgtggtagggagcttatgagccatgccacttctgaaatgcagtgtgtggcttgggtgcagggagaggcaggtggaccctgggaggtcagatgctgtaagggccttgggactctcaagtgggatgggcccctggtgcacccagggtgtaccaggcaggtctcagaccaggctccctagactggtcactccttgagggattactgtcagggcctggtcacccacactgggtggcccgcatcccatccaaaggctgacctttctcagctccagcagaaagcaccacctccagtccaggaggggcagacccattgtgcagcctgaccaccccccacaccaggggccccagtaaccccggccaggctggctctgtactccctcttctcccaggtcctggaccctcctgggagtcagccccacaggaaggcccttgtcctcccttccctgtgccttctcccgggatgagccctgagctggatgggacagagccagtcctttctgggggttgactccctgaaccggacgactccagaccctgtgcaagtcctcagctctgcctgggttcccttacagtgagacggagctgccccctgtcactacctggaaggtgaaggtaagagcctgatccatcgggggctggtcccgggatgggggactcagtgggtggttgatgaggcagaggaggcagcaggtctgtgcagtggcaggtgagggcaacacgctgtcactgggaggggcagctattcctgctggacctgaccccaggttgttgtatctctggcagtttgatgaaattccaaagtgagaaccacagtcatggtatgggggtggctgcccacttgtgttaggaccccatctagaggctgggacctgacctacgactggtgtgtctgtggcctgaggatggcacgtcccggggtcccaaggccagcccactagtgctcatttgctcaaaggccctcagcccttagggtctgcccttccctggctccttccacctgggtcccaccaaggcttcagagcccaagacccagcatccacgggccactccgggaagcctggcagctccgctaactccaacatttctcatttgacagcaaatgtggcaggagatgagatgaaagagcaagtggatggaaatgctgggagaatgggagacatatcagaacagcaaaaaagtaatgtgtggagggagaggccccaggaaccactctctgcagagacaggggacaggcacccatggctgtgtcctctcagaggacgaatggcacactgtcctcacccagaggaccacaggcctggttgccagctttgctgcccattcgtgcaagcatcaccttgcttggagggaatctgaatccagagatggagacccctggagctcggagtagggatgcctcctggtgacccgaaaggaggaaaaggtccagatcagagttcaggactctgagtgcccacacactctttcaatcctgggaagggagaccctgtgccagcttgacctcacctctactgaggaatcatggggccaaaaccaaagatttccagaatcctcgggctctggtcctcactggggttgtcctgtggcatgtgacaccagattgttttctgcccacagctgattgagtgagtgtataaaggcattcccattaatgtccagggccaactgtggtcaggccccctgaacattcaggaaagcaaggcaaaaaatcccagaaaataccaggcacgctcagccagacacaacaaacaggccaggccgtgtcagggagccaggtctccagctggagggaacatcaagcccaggctttgggggttggggggtggtcagatgcacatcctgggcacagatggtgacatagtcaccacagacgaactcggctctcgtgaccctccctggcttcagaaacaagccaaaaagcagctttctgcagaaggaaatctttcttctttccttccttccagaagggctgactgtgggctgactgccatttggggcagagagtcttccatctattctgagcctgcttcctcctcttggccctgccctacaggtcatgaaggagaagggcaagaggtcctctggacacatccaccagatcgacctggacatgagccggacattaaggaaccacctgttcttcagggaccgatatggagtcaagtaagcctatgggagccacagggtcccagtggagatggggtgaaccagagggatggggacttccctggagcagaagccaggatcacccaggagggatgacagagctgccaagagctctcctgtaccagggagcagctggtaccatggaccgagcacctcccaagttccaagccctgggccagactggaacacgtggggccagaacccaggaggatcctgaggagacagacggcggcaaagaaaatcatgcacaatggtgaaaagtgctctccctgacccacagggacccatggtaggacccacgggagggcagcaggatggagggcccatgagcttccccaggcaacactgacaggaccaaaagcagggggagcttggggtcctggaaactctcatccaggtctgctgggaacatcacacggcacagccactttggcagccagttgtgcagtggctcacaaagttcaatggacttgaaccacatgtccccaaagtgtcaccgatattgaacccactgatttgaaaactgatgtccacatgaaacctgcatgccacattcactgcttgattcattgacactcacacatggaggctacgggaatgaccttcaacacgggaacgcagagaggaagggtggtcctcccttcaaatggcagaagattcagagagaaaagggaacgatctagtgatgcccacatgaacatgggtggatcctagatgcgttttgctaagggaaagaagccaggcccaataagctaccacagtaggattcccattcctagaccattctggaaaaggccaaaccatagggaccgagaactggtctgggtggccagatgctgacggatcagggagaggctggctgcataggggccaccctggagacttggaggatgaaggagtcactccaggaggggctggagcagtggccaggagattctgcacatcagtttagaaccctccttgccctgcagtgccctgcatccccagcccaggggttaggctcacccctagcctacaggaggcccaggagggtccctgcaggccacacaagcaagaccctctgcccaagaggggtcatcccagggcagaggctggggttcaggcccagcctcatgggcagactgggccaggacccaacttgggagggctcagggatgcctcaagccgcgggcaagcccctatctccagaagccacgtccccactgaaatgagtgcccccccatgaggagcggcaagaccttgtctgacccagtgtcctggaggggtcaggtgaccctcatggggaaggtcactgactctggagactgaagccccaatgggtgcagctcgagccaccaaccccagcctggaagggccaggtcctcccatgcctgctgtccccacagatctctcttgggctcaccctgcacctgtgggacatgtatttgctggaaggggaacaggcattgatgccgataacaagcattgcctttaaggttcagaggagtaagtccacgtgtggccagtggggcctggggagcactggggtcagaccctgactggcccaagggcagcttcctcacactgttctcatgatcctctgttctggcccagaaggaggtctgtccaggtgggctgggcagggcacaatgacaccaagtccatcccccacatgacccagatgaaagtcaggagtgtagtgagcactttttttgcccaggctaccccccagccacagccttctgtgcatatctggacccctggagtggccatgaaagtatccagcaccacccagtgggagactgaagtggccatggggtgtgggctctgacctctcccagggaactctccgggcctgatgcccaccctgtccctacagcgcctcatgaagacgtccaggtctggcctgtgggcaccttttcgagaccagttatttcatacctgagccatggacaatgatcctgttctgaaacaccttcgggcctctatgaagaaactaacaaggaagcatggggacctgccacccccaggtgggctccagtaccaggtcccctcctgaatcaccttctggggcagtcaatagtgggggagtgctcaggacccccaatcctactacctgggtcttcctcttcaccttttctttctcctcttcttcctggactctaagaaagtacaggaggcccatcggtcctcagggcaggcgctcaatgcgtgtgtacsgracatgctgtgcaggagggggatgtgggcaagagcctcccacaagccccctcccactttccttggtggcccgctctccccctcacagggccctcaagcgcactggaggagccagacccatttgtgggagcccccacccctccctgagagcacccacagcctcagagagcagcagaggcccctcactcctgcagacccctctaagggtgccaggacaacaagccttgagccagggagacaagggaattgggtgttcctgacccccagagcattcaaggagagggcacaggcaggaccccgggcccagagccagagccaagagttcagccaggtgtgggaatggtcagtcctggcatggactgagcagcccaggagggcagagggtgactcatatctgggcccagtcgcccactgcggagacaggtccccatgtgaggtggcaagggggctgggtaacagccaaggcccctcctacctgagttctgacagggggccatatcccaggcccaacagccctggataaggttgtgtggcaggaagccttcagcctctctgaaccctggggggcagtcccaggagccacctgccatgccccgacatcttccccaccccaggcagcacacacccctctttctgggatcagcagactacaggtgtgtcctcagtgtcagatcacggggaccacacagagactccgaggactccagagacccaggcaggtgaactcaggcctcaatatacatcagctgctctagctgaattttgttcaaactcagtgaacgtctgctctacagggtgcatgtgaaaggggcaagaatgagtaagctgcagataaagaagacagaacacagggggtctgtctaagctctatcccctgccttcagcactgatgaagcaaatccaatacttagggaatggtggccacgtgctggaccagccccgggctctgaggatctgacagtgagtgacgcagaggcaggccttgcccttggggagctttccagcatacacctccctctcccctcccagcgccctgcaaagcaggcgtcaatgccattgttaatgcacagaggaggaacctgactgttagacaggttgatgggttttccagggtcagggtcacatggcttctgggagacggatgtgaccctgaggacagggcacaggccagtgtaatgccacaatgggatgagctgtgatctgtgctgtgtagaggcctaggctaaggtgggactgacggatgaccaggtcagccaggttgctgaaaacactcttgggtcctcacctgccagctcccaggactccggaactgccaggagagtggtggcaggtcccccatcctcagctgggtgggcctggatagaacagcaaggcgagggcacatttccccagccattccctccaggcacagctgtgacctgctcattccaatttcgtggaaatatttccacacacacaaaactgtaaatagcaatggatgtgctgagaggagcttggacataggataggcagtattttacaggcagagcatccagggcttcctgacgggttagcttcagggcttgagcaaggaaggagaaccgaggacaatgtgttcaaatctgttcactcacctcctccgtgccacacctgtgccgggcactggaagagacagatgagcacagaagccctggcctgggggaggtgtgggagggagcccagagcatctactgggagctgagggctgatgtccacctgggtaccatccaggttctctgcatggacaagtacagggaggcacagctgttgctggtggagaccaccacatttgggaatggagacttccccagcaatggagaggtgggtggcctgaggtctggctggtctaggaggttgtagggtgtgggaggacccaggaaagggtccggggaatgaagcaggtcctacagagggcatttgggagtcagtgctcaggccatctgggtcactcaggtcatttgccggcctccattgtaattattgccatatgggagtgccccctttcctatgacatatttaatatatttctgtgaatggcctacctgtttgtatttacaaattcatgtttaaaggaaacttgtgtcactctcacaaatggaaagcagcaaaacttaaattcaatgaaaacaaaatgaagttaatgaattttagctagatactattccctggccaaggcctgctccttctttgttttttaaaagagtactaggcaatgagagaggcattaaaggtctattagcaccaactcaagactgtctctccagggctcaaaagaatgaaaatgtaattgaaggggaataactaaaaaataaattatggaaaagggagtaaatactcaccatgggatttgacgctagttctgctgggtcacatacctcctggaatcatcttggcttcctggaaagccagccttatttcagagactgtaggaccaactgttgttgcttttaccaggttccaaacaagaagacagaatcacggcctattaggaggccctctggagatgcccagggctggatgggagggggccaggctattctgggtctcccaccaggggacagggcccacacaagttgctacagtttagctggagkgagagacaagctaaaattctcacctgacaaccaggtccttggccaggtggccccatatgtaaaccaacttccattgtgggccaggagccatctcctgccatctgtggccagttttccagaggaatggaaaaagcggtgttttttttcatcttggcctgagaactctgtcatttcctctctttctagaaactgaagaaatccctcttcatgctgaaagagctcaccaacaaattcaggtaaagctttttccctcytcctgcaacttctaaccttgccctgaggacccaaagtctggctcaggggatggaactgggtgcgcatacggggtcttctcagagctgaccaggcacagagggaccctgggccagaggtttgccctcggagtgtgtcacgggtcaagccacagaaaccaagtccctctcacrggtctgcaggccaagcatggggtggtcatgggagttggtgacaaggctcaggggttgggaggactagaaggggctgcagctccatgctccagctggatggggagagtctgtggctggccctccaggctgttggtgctgggtgctgggtgccaggtgttgcttgcatgggacatgagtctctgtgtgtttccttgggcaggtatgccatgtttggcctcagctccagcaagtaccctcagttctgtgcctttgctcatgacctcacccagtagctgtcccacctgggggcctctcagctcaccccgatgggggaagaggatgaggtcagtgggcagaggatgccttccgcagctgggccatgcaaaccttcaaggtcggttcccagccagagctgctccacagcagggacatgacagggtgcattcaacctaggacatctgtgctgggtgtcccaggtgccatgacctctgcccctggtcctgtagatgtggtcccaggcatgagccagggccacaggcctgagggcttaggtcactgctgctctccctcaggcccttagaagagctccaccttgtgcacacaactctgggggagaaggtggcacagatacccccctgcccttagggagcttctagtttaaggtktcccccactgactacctaggtcaccttttaactactgtgtctgtttcagtctcacagccatagagagcctagggacaggcaccacacagtggcagatccactttggatccactcagtatctccatagctctttactgctatggttggccccagtcatttagggaactcatcactcatgcagagcgtcactcagcagtggtgcttaggagcatcagcttgcatcggggcaggcttggttccaaagcccaggcctcctccatgtggttccacaacaggaaaagggaacaatcagacctcttccagtgtggtcatgaggatacaagaagatcatgtcaatattggcattcataatggccagacactgtggcgcatgcctgtaatcccagcaatttgggaggctgaggtgggcagatggcgtgagccccagaatttgaaaccagcctgggcaacatggcaaaaccagtctcttctgaaaatacaaaaaattggctaggcttagtggtgcacatctgtagtctcagctacttgggaggctgaggtgggaggattgcttaaacccagggaggctgaggcttcagtgagctatgatgacaycactgtactccagcctgggtgacagagcgataccctatctcaaaacaaaaacaaaggcaaaacaacattcaaaatagtagcaatagctactatgtgccaagcccagacacctctttgagtccttgctgkcaccctatcaggtaagtgtgcttcgaagttacacgaagcagatggcttagtatctggcccatggtaagggcctaaaaagtggtagccccagtggtggggatgctgctgctgctgctgaccattaacccccatctgctccaccttcttccaggcagcctgtgaaacgtttgatgtccgaagccaacagcacattcagatccccaagctctacacctccaatgtgacctggggcttgcaccacttcaggctcgtgcaggactcacagcctttggacctcagctaagggacctgcttctctgtagcacatggggcttgtttgtgttggggtctgagccctgagctcatggtcaaggagaaccccaggtccttctgaacagagacagctggcctcggggcctccctctcactgcrtgcaagagcctgttagggcacaagactcaaggcgctgagggaggctgtttcaggagggagccgcagaaggatggtggagagagaaggggacagcatccgccgaggscctmctgtgtgccaggcactgtccagggctcctggcccacatgggctaagtgaatctggacactcctcctgggagaaaggcacagatggagaaattgcagttcagggaggtgaagcaagctgctagcctgtggccactttgggatctgagcgccagccttctagccacaaaggcagcaaagggtcatgaagaaggcatcacagaggcgattccaggctgtagtggtgaactctccactctgcacccccaggtgctgtgccctgtgccctgattagatagtcctgaaggtttctacatgtttaagatatccccaatgtcaacgatgctctcctgtggatcccaagctgtggagatgtcctgggactttccattttaggttcctaaattgaatttcccaacacctagaagcaacccagctgccctgtatcagaccaaggacctttatttgtgattcagaaacagtggaataaaaggaaaggaaagaaaaccccaacagccacctcaggaggatgccccaagggtagtgctctggtgtcactgactcagacatgtgggggcttctgccacccacgctcaagagccactttgccgtttcaccgtctctgtgtcctccacagccctcagcagcatgcacgccaataacatgttcaccacgaggctcaaatctcagcagaagctacagagtccaacatccaggtaagggaaagtgcagggcttctcgggtgatgctctactgattttattttaatgaatgaaagaccagaagaagtcagtctttgaagggagaggagaggagcatctgctggcattagcagccatgccatcggtaggactggctcacctggtaacctgtggccacctgtgcttttacatctactcttggttaaccacgggccacktttccagcttggactctragcgtctgttccacttcctctccttcctcattgaactctttcactaaaaggagagtgcaagagagacttaaactgtttgactcattcttaagaactttcaggaaaagtgttggcagggaaggaaatttcccagctctgggaaataagccttgtggattatctgcaggtttcattgatctgtgctgtcctccccacatgcattaagaaaattggccttggttctaataagaacagcatttgtcctggtgacaaggaaaggtttcttctgatgtccattatctccaagagggatgctttctccaggcagaggctgtggccaagtgctcggggggctcagagggctgctgggaaggggtgagcccctctcctccccagagggaagctcccagggccctctcaagcacccctggctgtggggatgcttcccaagctcagggtggcagcccaggcttgtggaaccagccaggtaagtgaaaggagagtgcatttcctggggaatctctcttgcccatcagggatccttggaggaaatcctgcaacatcacctgaggcttctttttttatttttattttttgagatggagtctcactcagttgcctaggctggagtgcagtggcgtgatctcggcttactgcaacctctgcctcccgggcttaagccattctcctgcctcagcctcccgagtagctgggattagaggtgcctgccaccacgcccagctaatttttgtatttttagtagagaagggctttcaccatgttggccagtctggttttgaactcctgacctcaggtgatccacccaccttggcctcccaaagtgctaggattacaggcatgagccatggcgcccggcccacctgaggcttctatttccttacccagccacaccaccatcctggtggaattctcttgtgaggagggccaaggcctgaactacctgccaagggagcaccttggggtttgcccaggcaaccagctggccctggtccaaggyatgctggagcgagtggtggatggccccacaccccaccagacagggcacctggaggctctggatgagagcagtgagccctgggccagggagccagtgctgcctggcatcctctggccaccccatctggctgaggggctgagcctgggcctgccagtgacagtcatccctgtccttcctgctgagagggtgggctgccaaaatcttatgtgaaagcagctgtggaaacagtcccagccacaggcatggctccctggccttagtttccccagtgataatgacaccaccagtgtatccccctcaatgcagtggccaaagtcagaaagtgggatcagctgagcgtggtggttcacgcctgtattcccagtattttgggaagccaaaacgggtggatcatttgaggtcaagaattcaagaccagcctggccaacatggtgaaaccccatctttactaaaaatacaaaataaattagttgggcatggtggtgcacacctgtaatcccagcccctcgggaggctgaggcacgagaatcgcttgaagccggggagaggaggttgcaatgagctgagattgctccactgcactccagcctgggtgacaaagactccatctcaaaaaaaaaaaaaaaaaagtgggatcagagaggcagagcctggcagtgtccgccaccatctaggagaaagtgaggacgaggagacacatgtccttgtgactgcagggtgatggatgtggttcatcaggaccctggtcagaggaaataacgtcatactcatatttttacctaatatttagggaacatgtttaccaggcacagcaccaactttttttttttgacacagtcttacactgtcgcccaggctgcagtgcagtgacatgatctcggctcactgcaacctctgcctcccagattcaagtgattctcctgcctcagcctcccaagtagctgggattacaggtgcccactaccacgcccagctaatttttgtattattagtagagacagggtttcctatgttagccaggctggtcttgaatgcctgacctcgtgatccacccgcctcagcctcccaaagtgctaggattacaggtgtgagccaccacacctggccacagcaccaactatatgtgcgcaatttcattcagcgctcatgccaacccagcaagataggttgtgctatcagatctgtttcacagggagggaacccaaggcccagaggctttagtcacctcggaagtggagagccagggtttgaacccatgtcttccagccccagggtctgtgctgtgactgccctgcatgctgccccctgggagttccctttgagctcatcttctgctcacccagcacctcttggtacagcacccaagggactgcagtcatgggcttttctccaagtgaacaactggcctgtgaggtatccattagtctttggtggatttagtcattgtgagtctgtagatcaccggtgagtgtcttgctaaagttcaggtctgggccagaaaaggacgtggttagtttatcaggaccacgccaacttactgcccctttgggggctggtgatcagccttccctggcagtcctttctccatgcgccaccttcttcctgccttttgctcttagagccaggtctttagagcctcctttcccctgcagctggagaatagagggtgtctgcctgggggcctcgctacctrctgagaatcctgaatggggcctcttttccatcctgacaccttccttccccatccaggcagctactgggtcagtgacaagaggctgcccccctgctcactcagccaggccctcacctacttcctggacatcaccacacccccacccagctgctgctccaaaagctggcccaggtggccacagaaaagcctgagagacgaggctggaggccctgtgccaggtgaagatcagggctggtgggcagtgggggtatgtggggggtcccagcatgtggggagccagagtccagagctggttttaactttcaagagggatccacaccaggttcccaaagtgagacttgtcaaaggctggtgggaagccaggcatcgtccgctggcccatgtctaggacacagttgtgttgagtgaactgaatttttccaagtgtctgcaggatgcaaccagagtgcactgccttgaacattagctagraaggggagccgcccttatccrtctttgctttccccaaaactggaataaacttgtcacttaagatgtattgggggatggatggtgtggatgaatggataaatgggcataatgggcagagtgacagatggagagctgaattaataagttaatgagagaatgcattagctcacctgcaactgtctggttccaagtctgcaaaaggcactggttgtcattattattgtcatcattatagctaattatctcgattccaactacctccaccaccattattttgtggctgcaatgtactaacttggcacatgctttctcatttaattcccataacatccccacaaggcaggcaatactatccttgtttcacaaaggttaagtaattgggatgagattccacagctagtgaggacacccagccaagatttaaacccaggtctgattggttccaaagccttgccccaaattaaattgcaacaaaaatttgacccctgcccacgagttgccgacagtggaggaggtcacataagttagataaatgtactggactgagttcctccaggacaggaactatttcttctcaagctcggtagtctcagcaccctggacagtgcctggcacatggacttgtttgttgagtgagtgagtgaatgaatgaatgactactaggttgtgaaagccttttcccccaaagtggggcaggtgccctgagtcgctcacatcaccctccacttactctcagagtacagcaagtggaagttcaccaacagcctcacgttcctggaggtgctggaggagtttctgtccctgtgggtgtctgctagcttcctgctctcccagctccccattctgaatcccaggttctactccatcagctcctcctgggatcacatgcccatggagatccacctgactgtgaccgtgctcatgtaccacacccgaggtgagcccagggaggaggatctggaacagccgcagtctgccccttattgggcatctgttcatcaactcagcctcagctccctcatcagttcaaggagggagggaacacccaccacccagagttgttaaccgtaataggaggcgtgtgggagagatctgtaggaaccaggcactaaaccaagccttctgtatgtatatgatcagttacattgtggggtaggccctgtgtgcattttacaggtggcacagaaagtcacactgttagtaagtggagagcagagattcagacctgattagtctaactgctaagtccaagtcctccaccaccccactgttccactactcttgggacaatttaatgagatcagacgtggagagcacccaatgcttggtgggaggccagtggttcttagtcttcctggtcgtgcagcctgaacacaagggagattctgcattgattgttcattcacttactcagctcattcagtgatggtttatctcacacctcctcatgcctggcactggggtgggtgtggaaatacagcagacatcagccctgccctcagggagcatctagaggcggcagtggagagataggcatagaaataattagattattctcattgtgctgaagccaagaaggaaaggtcagggtcactgagggaagcaaagtgggccggggtggcagggggcggggtgatgctgccatagagcgggaggccaacatctcgtccaggtggtctcggctccaccactggccgctgccccctgccctgccctctgtaactgagcgttgcctgggtgggcaaagctgggagctgcccacacttctgagtcctctgtcctctaggaagcacaaacacagtttctaaaaactggccagagactctgtttgccctgctagagaacagccacccagaccaggagaggagaggcctacatgtcttgtgagagcaaaatttaatcccgaggaaaaccagggggacctctgcagttggttggaggcctccttcaagtgctgggccattgtaaggggaacagaacccagagaaacctcctgggtttctacaagcccgggagggcccactgaggaggaaagcaaggtgccagagcaggctgaaatgcgcggaactcatccaccacccagggttgctaccagcaagggccacgctcatgagcacgcacagcagtagccaccctgaggggccacttcatgctgctgtcagtggagctcagtggtgagctgggagtgttcccggagaaagtctttggaaggagcactggagtaggagtcagggaagctgagctgtccacctgattccaccgcgacctgagtgaccttctccaagtcacttttccactccggaactcagtttctgcttgggcagaygggacaacctgcaacctctctaagtccctttcaacgttcctcagctccgcgcttacagagggtggatctcagaaccagaacaaacagctgctcattgagtcctgagagtgcctgagtgggggcgtccaaggaggccgtggtgtgggcggagcagctggtacagtttgcacatgggcagtaggggacattggtcactttgtggtatcgtagcagatggccagggtcccctgcaccacggcgtctgcagcacatggctcaacaactgaagcctcaaaacccagtgccctgctttgtgcggaagtaagcaccccttccactctgtcccctgtgggaccgccgayccctgggggttccgggaggaaagggagggatctggggtttaggtgccactcgggggccccgtggcccataaagaagacactggggtcacactggtgtgcctgtctctagcagggacaacgatgacaacagtgctggaggggcccagagtccagtgagcatggccctttttcagaaggacctgggggaggtgctggtgcctggacagaagtgaagcagcctgcaggacatgggaaatcaaataggagcttcttgtcctctccatctcctcacgaccaccccccacaggcccagctccccagccatcctgtgtgtgcgtgggcctggggtgtctgaggactggccccctcttctcctgtcctcttccgtgtcagcggcttccacctccccgaggatccctcccatcctcgcatccttgtcaggcctggcacaggtatcgctcccttccacagtttctggcagcagcggctccatgactcccagcggaagggtaaggctggaggcttcccaggtggcaggggcaccaggggcagcgcctgcctagaatcagaaccgcagccccacgaacggttcctggacctctctggagggaagatctcccaagtttgcctccctgtgcgggcctttgtgggttagaatggccgccttcacgtctccggcaccggagccggggctccctctcctggtagtggggrtaatgggaaagtccttgcttttgagctccgatgggctgagggaatcccgcatctgcattttcagttgtgtgactatggatgagtgatctgaatgccctgggcctcagtttcctcatctgtaaagtggggataatgctattaactagctaggatacttgtgggagttaagtgagaattccagttgggcttggagccgttgcgccctctggtggccaacatgataacaacagcccgggactcccggcagtagtgctggaaggccgcaggaccctggtcttctggtgccgccgcccagatgaggaccgccacctaccgggaggagatgctagagatgacccggaagcgggtgctgcatgcggtgcacacgcctattccctcctgcctggcaagctaaggtaaatgcagcctaaaagctggtgaagccattacacacacaggcttcagtatgagccctgggtccccacgggcccctcgcctccctgagacttcagctcttgagctctaaaatgcaggtagttcacaaccatcagagtgatgctatgaagagcgttacaccctctcatacagcataagcgacaggcccggagaggttcaggactaacctaggtcacacgcgggttaagcccagagcttagcctgctgaaggtccccagcaggacccctgggacatgcgactgcccagggagaggtgatccaggctggctgtgtcaagcccagcaagactggagggcggccaacgcttccaccacggccctcagacaggctctgctgcccccagggccgcgttgtctcctgagccggaggtgtcagaacagactctcggtcctcacacatttgtcccatcagggcacctctcgggtccagtgctctgtgcccagtgctggggccactgggcatcctgtgtggagcaggagcagagagtccccgactgactcctggaccttctaactgcgaagcccgggatccgtaccctgcagggacctgatggacagtctgcattgagaggctaccttttccagagtatagacagagccctgggcagggggactggcttcactgatgcttctttgaggcatggcaaattcagagacagtctgggatccccactggatggtcagcccctcgagggcaggactgtgtccagcatttatctctctaatcccagcccagccccaggggcatctgtgcgcctcatcctaagcctggccccatgcaaggtcctggctgggaggggactcactcctcaccccttagtgccctctccccacttccctgaggacagcaggcctgcctgcaagccttgtccccagcagctggggactgaacccaccacttcctctggtttcaggtcgatgttcaggacatcctgcagcagcagctggccagcaaggtgctccgtgtactccacgaggagccaggccacctctatgtttgctgggatatgcgcatggcctgggatgtggcccacaccctgaagcagctggtggctgccaagctgaaattgaatgaggagcaggtcgaggactatttctttcagctcaaggtatagtagtgggtgtgtgggctgaaggtgccggccaagggcacaggccgttggagccaggaccaggggtggcaggtagacccaggggagtcaggcccagaaaagttctgggccccaagagaatcttagcagtggctgagatctgagctgggtgggctgtcagaaggccctactgcacatcctggaccagttggcagctttgagaagtcgggggaatgtgttccatttttccatctgtagaatgggggcaggagagtctccctggcctctccccaaacccccctttcagaaagtatctgtgtggccaaagcaaggctgtgaacacaggggagagcaaggctgccccttgtcagcctcgtgtgaacctcacacttcttatttacacccaggctggcgtctgctcaccctcatccccccagcaggaagggcttgcattttattgatgaagataatagtgatatttatcaagggcttacactgggcatactacttgccaaagattctgctgtgacattttgttcagtgctgccgaggattttgtgagggaggcaccccattttgcagagggaagggggcctacggggaccacagcagtgaatatgaaagcctagagctcagtctgcctctctgtggtaccaaagcctgtgattgtcacttccatactctccctaagacacattcgtacgttcaaccaaacattttttgagcacctactatgtgctagggatagagcagtaaatgaatcaggcaaaaattctttacattctactggggctgacaaacccaaacaaggaagagctgtagtgcttcagagaaaaacagcaggaaacagcccagagaacgctggggagtgtaattttaaatagggtggccagggaaggcggagctggaaggcggcatctgagaataaacctgagatggtgaggaggagccctgtggatactgaaggaaacactctgggctgttctggaggggcagcaggtacaaaggccccgggggtgggagttaagctggtgtgtttgaagaacagtgaggagataacaggcatttccccaaatgcgttgaatgggtcggtagacagttggcatcaaaaaggttccaaggtcgaatagcctgggacatgcttagttaaggcaaggcaaacacgttgctttactacaagacttctggaagccttcagcatgctgctgctcatcaggacccttcaaggctggaaggaaagaaaggatgtggcatttcccaaacatatttatctcagagctcacacctcctggagtatcttgggtgggggatgagtgctgggcaggaaatgggtatgctaagtaaagctttggagatggttagagggcccacaccagatcaggtgctgagggccgttagagtctaaaccagattcaagcacaatcttagtatgacagttgggaagacagatggctcatggaggtccatgtgatagggaagctgggcaaccccgggggctcatcccagcctggacttgacactttggtctctgtttccacctaaaagagccagaagtgctatcacgaagatatctttggtgctgtatttccctacaagcagacaaggcggcagtgcagcccaggagcctggagatgtcagcgctctgacggcccgtaggaggggttaaagctgccggcacagaacttaaccacggagccagctctgcattatccgaggtcacagggcctggggagatggaggaaagtgatatcccccagcctcacatcttattttttcacttcattccccatcaagccctttacttgacctcctaccaagtagcaccctggattgatcagagcctcctctctcaagctggggccttcctggtcccttggagacgaaatcttcaacgccaggcctggcaagtgggtgaaagatggaacccgctgctgagtgcaccacttcaagtgaccaccaggaggtgctgtcacaccactgtgtatttaactgccttgtgtacagttatttatgcctctgtatttaaaaaactaacacccagtctgttcccaacggccacttgggtcttccctgtatgattccttgatggagatatttacatgaattgcattttactttaatcacactgtatgtgtgtgtggcgggggaggggggttgggggctgttttgtagggaatgtggccctcagttatacagagtggggagctggtgggtgtcgcagcctggacagatcccccacagagggacaacccaggcaggccatggctcctctgaaatggctgccaggtgtgacagcagaagatggagcttcgttgcttgtccaaagacctgtggtagggcagggggcacaggcctgcctccctcacaaaggatctgaaacggggtctggcgtgggtgggattctcacatgaggccagcgcttctgggaaggccttgagcttcttcttagacactgtcttagcgttttgctctggggccacctgtcccatgtgagtttgtctcatacggatgtggtccctgggaaggcaacatgtcgaggcaagtgtgggccacagcatcctcgtctgagggattggggaccctcccgggtttggagctggccaaggaaggcttcttaagagactgagccccatttccttctcctggtcagaaccaaggaaggagctcagcaggggacgctggggtcctagcaacacacggctcccagctcgggtttggtgtctgcctcctggccgccctggccgacttcgcccctctctctcccctccctcttctagcagcagagtctcaggtggcaggagaaggtgtagtgtcaacctcaggctccagaaaagctctgtgccctgcgcgacagccgtgcatctcagcaacacagccaggagtccgctcccggaccggggcttctcaggtttgtgtttttgttgttgttgttgttttgttttgtttttaattttgagacggaatttcactcttgtcacccaggctggagtgcaatggcgcattattggctcaatgcaacatctgcctcctgggttcaagcgattctcccccctcagcctcccgagtagctgggattacaggtgcccgccaccacacccggctacttttttttaaattattattatttttagtagagacggggttttgtcatgttagccagactggtcacaaactccagacctcagatgatctgcctgtctcggcctcccaaagtgctgggattacaggcgtgagccaccatgcccagccggcttctcagctttaatgtgtgtgtctcacctggggtgttgtgaaaacgaaggctctgatctctcaggtaggtatgtgtgtgtgtcgcggggcaggggggcggtgcgcgggatgccgcgtttccaacaagctcccagttgctgctggtgctgccagctccgaggactacactggggcctgaggaactggattcttgctgagccaagcaggatgtgttggcatcacgtggacgcggagctgggctgttgggcagtggcccagtggctggcagaaccccacacatgaacactgagccacttttcccacgcaagccctaacccctaatgccggggagacccacaatggaacacacacccagacggtgcttcggatcagcttctcctgacccccctccccaagccacctcctcccactgggacgccaggtctgaggaggcagctctgaccctgctgtggccctcacaggctctgccccagcccctctcccatctcggaggcatggggctgtttcctggtgtcccccattaccacccttcctgtgtccgagactcctgcccaaaaggctagagccccagcctgctttctccaacaccctcgtgggatttgcaagagaccctctgggaggaggtgtgaggtcaggaccccctgcccaaagggagtccatgctttcccatcccactcctctcagcagcacccccgcccgattccacagactccaaaatgtctccaaatgaattaaagaagccatggtcaacccacatgaatgtgccaacaagcattttcatttctttattttaaggacactgggaaaggagccagtcctctgaagagaacactctggtcaggtggtggaggccagtgggaagccatcaggcctgctttccaggaggggtgaagggttggtgcacggtgcaaggtgagagtgaggttaaaggtcaragaggaggggctgaggaggccacctcccaccaggagcagacagctggtggcttgggactggggtggagctgcgtgggggatgggaggggactgagcatggggcttcatcttcactgcccactcctcccctctccctggctgtgcctgcctcctgggatggtaggattccagcagctggagccccaggtgctgctgcggctgaggaaggcaatccccgtcagctgccttctccgttccagggtggctgtagccagaagcaggaccagacaaggacatggcctctgcattaaagcccagatcccaggcagggttggaaaggctgggcctgggaagtggggatgatgagaggacccagactgccccacaccccagcccccggccccagggccaggaagccgcctatgtctgcacatgggtcagctggatgtcgccccccacttccagtctgttgatggtgggcaggttcctcaggcgatggtagtattcaaacaggtgctgaccatccacggccaccttgaggcagtgagcttcacacaagatccacacctgtgcagagatcatgccgtttgcactacacttgggaagtcctccaccctcactgcagcctcctctctccctccctcccaccctccctccctcctcagttgttaataagcccctcacctgcactctatccccactgaacgacggctcttcactaaacaggctgtgcgtgctctttcccctgtactgttccctggtctagaatactgttcccaccccatcagggacaggagcactggcctgtgccgtctgtatccctcaggcccagcacacaggagtgctctgggcctgggctcctgcagcatcagtctcctaacttgtcttttccaccccaatgccttctccacgaagcagtcagggtacaaatgttaaaacctccttccctttgcaatagctaacactcctatcacacatgccacctgccaggcactgtcctaagcatactacagatactgtctcattccattcttacaactctaggaaattcatgattattagctccattttgtagatgaggaaactgaagcacagaataattaagtcacttgtccgaggtcacacagctgtctacaaatcaaagtatgttgctccctggcttgaaacactcctgaggcttttcactgtgttaaaatccaagctcctttccatggctgcaaagccctacatcagtcattttcaactctgactgcagagtataatcacttaaggcatatttttaaaatacgaatgcccagctgactgcctcattggcctgggctggggtcccagcactgatatttcctttgtaagctctctgggtgatttgaatatgtagtcagggtggagcacgcctgcctgctgttcctggacaggccacacccgtgcctctgcacgttggccctagctgcccctcccaggctcgctctatctcatcgctctgttttgctttgtgcgtggcactgtcgttatctgtgacaatctgtccatgctttactttccttgttctttccccacctaaattataaactccctggaggcaggaccctgtctgtgtgcttcatgactgtgcccccagcatgtggggtgcttcctgcgcaaagcaggcgacaagaaaatggttgttgagtaaatgaagaaatgaataacacctccttcttgggtctgatttgacacttactgactgtgtgaccacaagcaagtaacctgcacttgtgagtttgtttcctcatctgaaaaagcagatcccagcacttccttcatgcgggacagtaataataataataataataatttgttggccaccttctcttcttttgggccttcatcccagaggaatcagcccccatactgttcaaggtacctcaaacctcctttaccccctccccctgtgcacccatgggagcctctccaagctccagactgcggtgccttactgagaagctctggccacggacgaagggcatttttcggggcagacttcgctccycagacccccaggagttgtcgatctgggtgttgcggaccacagcattctcatcaaaacgggggttcaggtggaaggcgatgtggttcccagagcacaggttgatgtggaacctgsggtgggcagcccacctgaacctttatccaccgaattctgagtcccatttcctccccatcatcagtagccttcctgaagccaggggaatggctggactgaccttgaagggctctctcttcccagaggtcactggagcccttggcttacctctgagcactgggcaggacagtgcctgacaggaggatggacttggatgggtacagccctcccagaatggtggtgatgaaaggmatcggctgtcggaagaagggggacaggtcagccaccacgcggaaggggaagattgtaccagttcccatgaatttgggctgtcagctgagaagaagcccatgatatctttacttggttccataaaagccaaaggaaaactttccagtgctcctcaaattaatgggcttagattagtgtcatgaaaggaactttggccaaacacaaaaagactcgtttcgtggggtgaaaagggagggacatgcaatgtgctcatattgacacgacagttttaaggttgaaagctcctctccacagccttctaattcgctgggatgctttgaagcccttcagcttaacaaatgactgcttttaatttttcaaggccagtggatccccccacagcggcccttcacccccagcctgcccaccacaaacagaacctctgccctccctgagaaaccacttacataggcggggtgggggtacatcataggtgggatggcgggagtctgttgaaaagaaaccaggaaattcaatgggagagcacatgggtgcgcgagcactcacccaggcgcacccacgcgttctagagaggactccactgtgaggctgacctcgtgagcctttggcccttggactcgcccgtctacctcccttttcatgttagccttcctggaacttcctgccgtgttcccagaccacaccacggtcacctgcccctcaacccctccgcaggcagccccactaattctaagcccccctgcctcatttgcaccatcaggagaagagcttaagcctgtgatcaatagtgacatcctggggacccaggatgcagggccaggaacctcacatccgggtgctggggccactgtactccccacttggtgacagatggaccagtttccctcccggtctctaggggacttgtctcttccaccactggataaaccctgcttcttccagaatctctgctgtcccaaggacagctttagccacatgtcacctgagccaagcactcagcccctagtgtccccatcctccttgctaaaccgctttcttcccgactctagggctctagggagtttagtttttggtgaaggaggacactgtgcagctgtgaactgaccagaacttgtagacttacagagaacatctgtccaggggcgctctgcactgtgtggatgactgtctgggtctggaagaaagaaaccaggtctcacccaggctctcacgtgtgaaaaccaccagctcccaccagagggcgccacacggcaggcaccctccagggggcgtaacaagcccaatggccccacagaccccacagagg

SEQ ID NO: 94374 - DNA, 90147 bp, Homo sapiens
acaaaaattagccagacgtggtggctcacgtctgtaatcctggctactcaggaggctgaggcaggagaatctctggaacccgcgaagcggaggttgcagtgaggcgacatggagccactgtactccagcctgggcaacagagagagactctgcctcaaaaaaaaaaaaaaaggtattaattgggcactgactgacacatgctgttctaggcactcaggatacaggtttcaacataatagtctctgtctttaaacaacacacaaaaaaaagagttccaccaaaacattcgacgagtagaggaccagaagtcttaccacactaagtatccatgccattcatttagcacctactttgaaccaatttaccttgttaataacttctcatatgcataccatgtgcacatttgcagtactgagggtaaaaactgtgttttatttatcctctattctcaaagtcctataaccatgatagtctcaaaatgggtcagctccttgaaatgctattcattcattcatttaacagatatttattgagcattttcagcactgtgtcaggtgctgtattcaggccctgggaatatggcatttagggggaaagtaaaatatagtgcctgccttcatggcacttacggcctactctaatagttagaggagaaagactttagccaaaggtatatatcctacctccagataaaactacaaaacttactgctcaaaaaaaaaatctaacttatatttaaatgaagttaacacatacatgattcccccccaactttgtacttccatgtaactttttatccaaaaattcccaattttttttactcagtaactcattgttcatagactccccctccagagaggaggcacaaaagaagtgtaaaacattcttattgaaagaccaaaaacctaagtataaagaaatccacttgggccggatgtggtggctcatgcctgtaacctcagcactttgggagaccgaggcgggcgggtcgcctgaggtcaggagttcgagaccagcctgaccaacatgatgaagccctgtctctactaaaaaatacaaaaattagccaggtgtggtggcaggcgcctgtaatgccagctacttgggaggctgaggcagcagaattgcttgaacctgggaagcggaggttgcagtaagctaagattgtaccactatactccagcctgagctacagagtaagactccatctcaaaaaaaaaaaaaaaaaaaaaaaaacaccccaaagaaatccactcaagttgattatgcacacaaatgaaacggataatgcacacaaatgaaacttcattgtgtatgtcctgaaagaaatgccaaacacataattcaaagtaatatggcacttagatccttgaacagacaggatcactcaacattcaggtgcaaacactggttgggcttctcagttctcataacagtagtaattctaccacttgtccagctggattccagaagttatgagtttacctataattaggtatttaggagacatacaataaaacatctaccaaaggatggtttaaaagactccttgacagggaaaatgatttaaggaattagtatgtattcacttccacaggctttataagtttcatccatgacctaaacaacagaatgcgtgtatatctggactacagaaatagcctgtaactgaatttaagctgcattttcacttggctaccagagacaatcctatgaactccactactgctttggttcgaaattgtggcagggaacattgtcacgttacaatatattgtacctatattgtactataggagtacctatattgtactccatgtgaatctgatacagtataaggaaaaacttgctctgttctgatgaacttatattttcccctgctcatctgagagttacacacattatgagatttccctctcagacttcttttacctctttaaccctcaatttcgaccactctgctttgttatgttggcaaacgcatgagtgttagaaaaggaaaagcacaaggtgataaaagtatactaaagaaggacctagggatttttttaattaaaataaaaataaagtaatacagcattttacttctaaagttactcaaaatatttattttgatctcacaagatggggactcagagtcaatgactatctcaaaaagcctaaaaagctagtgaaaaagccagaaataccagcaaacagacctaacaattaggagaagtagaaaaaaagagttgaaataattttcaaagattgctgtacagttttgtgaatacagtattagattgtttactaggagtgacacctaggtggagcaaataaacgctaatgactgagggccagattaactgatctaaaaggggtcaagctttatgaaagcttggagcaaaaaaaaagccacagtatacaggagtaatcacatctaactgcatagcactaaaaaacaacctgatattttaaaagtgtgggcattgtgggtaatgataagagaggaaaaaaaaataagaaaatttaaaagtgagggcacaaaggcaatctacagattaagagaaaaatctgcaaaccatatatctgataagcagttaatttccaaaatacatagggtactcctacaactccaaaggaagaaaacattttttaatgggcaaagcaggattttaaggctgcagtgaaccactccagcctgggcatcagagtaagactctgtctcaaaaaaaaaaaaaaaagggtcctaactaaacagacacctgtcaggtatataaaaaggtgctcaacattactaatcatcagggaaatgcaaatcaaaaccacaatgagatatcacctcacacctgtcaaaatggctcttgtcaaaaagacaagagacaacaaatattggggagatgtagaaaaaagggaatcctggtacatgtcagtagaaatgcaaaatggtgcagccactatggaaaacagtatgaacgttcctcaaaaaattaaaaatagaactaccatatgatccagcaatcccaacttctgggtatttatccaaaggaattgaaattaggatttcgacggacatctgcacttccatgttcgcagtagcattattaatagctaagacatggaaacaatctaaatgtccaaaaagagatgaatgtagaaaacgtggtgtacatgtgtgcatgcccagtggaatactattaagcctaagaaggaaatcctgccatttacaacaacacagatgcacctagaggatgttacactaaataatatgtcagtcccagaaagacaaatactgaatgatctcacttatctgctagtttagtggaatctaaactagcaaattcacagaagcagagagtagaagggtgattgccagggtcttgtggggggacaatcaagtttcacttatgccagataagttctggagatctatatagcatagtgcctacatctaagaatactgtattgcatacttaaaattttctaagagggtagattttatatcaagtgttcttaccacaaaaataatactaataatacattcataataaaagggacagggaaactttaggaatgacggacatgtctatggtgttgatgcggtggtgttttcacaaatatatacttatctccaaactcacagagttatatacactaagtaccaccttttacatgtcaaaaaaaaaaaaggcttttcataccgaaaaaaagaaaaagaaaataattccaataatcggcagaatgcatattttcccccatcctatgcatatactacttgggaaaaagacaaaactttaagaaaagctcatagcgctatgactttttaaagcaaataaaatgtctctggacacagtgaatgaaataatctaaaaacagggaaaagggggaaaaataggcatcaagtgtagttagttaagaacatggcacaggctgggcgcggtggctcacgcctgtaatcccagcactttgggaggccgaggcgggctgatgacgaggtcaggagatcgacaccatcctggctaacaccgtgaaaccccgtctctaataaaaatacaaaaaaattagccgggcgtggtggcgggcgcctgtagtcccagctactcgggaggctgaggcaggagaatggcgtgaaccccggggggcggagcctgcagtgagccgagatcgcgccactgcactccagcctgggctacagcgagactccgtctcaaaaaaaaacaaacaaacaaacatggcacaaaagcagaaaaaggagaaactcctcaattacaaacaggaatattatgttacaaacaggaatacatttctttctacaaaaataagggtctgcgaaagcaacaacacgggcaaccccattttgcaccaaatgagactttacagacactggcaaatgcttattacagaccccacagacatagagggtgtctttaagtactccagaaagggtgaaccaggagtgctaaattcctacaaaactggagaagagctaaccagaaatatacaacctgcttcataaatatatagtccataaacttaataaattcagaattataatttatcctcttctaaaggtccaatcactatgtaagagtagttacgtctctaaaaaaacctttcagagaaagcaattagatgactacatcatctcctagagccgaacataaatcttcttaagactgaaaaacaaatatttcaaagtaaatctttagtaccctgttatttatggtgctttaaaacattttaaaaggatctttgaaacaaagtttcattagtacccttctacaaagagctctcatatctttcattcttttagcaatttaaaagctaccaaatgttcatttcctcattagattattgattcctagccttttaacatctctataacagctgcttgacaaattacctcaccttattcctcggggggtgaggacagcatgatatccatgaattcaaaaatgggaccacaaactgatgagtgaagatgagctaattgcttcagatgagttagacactgctctaacagactaggcattcacatagcatgatacgattaaatgcttacaccctaaatattttctttgtccttaaatgtacagaaaagatcttttcttaaattgagttttattttaaaatatgtgatagcctcagtaggtcaagaagcttgaacatgtttggaatagtttccaccgaaagcctcgtcttcaaagtacttattctcaacagtttgcacaactttcagatttaaccttatttcaacctaagagagctgtaagcccccaaaatagtctattaaataggacgttataatgcccaaaattttatcaaagaaaagccaaaacgattttcaaagatataataaaaatatttcagagtagtatggtaaaatattcctgtctctgcctagatccattctgttagtgtcaaaacagtgtaagacacaaagaaaagcacacacaaaccgcgatcttgtagacccctagaacataaaatattgctttcccccaataagaaccacaaaatggtgtggaattaaaggagcattttaaatgaacagctttttccagccaaattacttagcaagtcaacctcttttagacagaagcaatacactcttctctgaattcagaaacaatctcatagtaaaacaaacgtgtcaattcctttaaaacaataaatatctgtgcttagctttatactgtaggtaataaaatttcaagatctttcaatcagttttttaattcaatcaccagcgtctttaaatgtcatttttgcaactgcatgactatggtgttcattcaccttttgtaatatagtcccataacaaaaatgtagacacccaagaaaccacacagttttggcatgatggtgctgactatccgaaacattccacttgtttctttcgacgtgctccttctgtgacctgaaagctctggttcctactagcaccttggtgagctagctggctggttccccagctataatatcatgtttgatctctcctgcctggagaggcgatagcgttgattttgtttttaaagttggtgtcagagcagctacaaacttttttcagcatccctgcctggctgccaactggagctctctgttcacttcctcaccaacttgaaccacccccaaactgagagtaagctggagttagacagcggcaggaactgacacactttcaagaagggtttgacaccgcakaaaactttcacttctccaacccttccacccaggggctctggcccttcgctcttgcttccccgctagaattcccctctggggcaggacaaggacacggacagcagatcgttcgaatgacgccgaaagggacccccaaagccctctcccctggactcaagggctgttcttcacacaaaagagccgggccagcttgaaaagcaaaggggccagcgtcgcggcccttctctgggtgccaccctccaccgcgcccgcagaccctgtctccagccgcccgagcggtctccactgtaggcttcctacccccaayccggccagacaaagccccggcagcagggccggcacttccgagcctccggactcgggacgccgcgctcttaccctggcctcatccaragtgacgccggcgccaccgcttcccccggctttggcggcggggcagctggcggcgcgggtcttggaggagcgggtccgagaggagatgaaatggctgctgcctccggtcgccccaggctctgctccggccccaggcccaggcccgggaccaggagacttggacccgagaaggcggagagagctcttccgggtgttcaccatggtccagccagggggacggagtccacgccgcgcccgggagagccgagcaaggccggcccgccggccggtcagtcagggccagcggagccgagccgggcaatgagagacgagccggcccggagcgtgcggagcgcagacgagcacaagagagagccgggcagaggaagggaagtcggcgtgagcaggcggcgtgcgggaagcgggggcggtgctgcagaccggcagcacagacactccgccggcttcgccctcctcagcgggagccgagcggagccgccatttctacccctttctctcccgttctcgctctcgagctccgtgcgtcaaggctccagcgccgcagggccaacgagaccgcttccggccgcagccacggcggggcgctgcgaagccggccagcccttcccggctgctcgctcctctccctgccgcctccagctgccccgcccccggcgcggcgtcagcgctcggcggccggggagcgacgctctaggctgtcagctcggtggtttccagctctccccgaccgcagggctggggcgaccagaaaagccagactaatcaggacgagttcgggcgtggaattgggcctgaagccctcatgcccagccaggcctgaatgccccagaccccaccgtcacccccgtggcctggatggagcaggggacggccggcgaaggcgcggggtggaaggggagcggcgacgaaggcgcgaggagctgactgggaatccccaagctacccgaggcaagacactgaacttgagtcgcacttttcatgcctgtagaaatgagaatgacagctgtgataaaaaaaaaattcatctgggcggtatctggaacttggtaagcttaagaagagaaggggggggggaaacaccatgctagaactctgcgtttttaaacaaagcgaggcagggtcgttttctatccccttagccagatctaaggcggagccaaagaatgagtaccctgtaagagccgcctctatcrccgccccctgcccccggcccgctgaagaattaagaatacaaaaagctgaacccacagataaagcatttgcaatttaacttccaaagaaaaaaaaattaagccacacaattcatatgaaaagctctgctgtaggccgggtgcggtggctcaagcctgtaatcccagtactttgggaggccggggtgggtggatcacctgaggtcaagagttctagatcagccttaccaacatggtgaaaccctgtctccactaaaaatacaaaaaatcgatgggtgttgtggtgggcacctgtaatcccagctgctcgggaagctgaggcatgagaaccacttgaacccagaagatggaggttgcagtgagccgaaatcacgccactgcactccagcctggatgacagagccagaccctgtctcagaaaaaaaaaaaagaagaaagagagagagaaaggaagaaagaaaggaaagaaagaaagaaaaagaaagaaagaaaagctctgctgtaaagtaggaattaggttcatttcaaaaattcacagtacaggccgggcttacgcctgtaatcccagcactttgggaggccaaggcgggcggatcacttgaggtcaggagttcgagaccaacctggccaacatggtgaaaccccctctctactaaaaatacaaaaaattagccaggtgtcgtggtgcatgcctgtaatcccagctacttgagaggctgaggcaggagaatcgcttgaacccrggaggcagagattgcagtragccaagatcgtgccactgcactccagcctgggtgacagaatgagactccatctcaaaaaaaaaaaaataaaattcacagtacattagacatagcctactgtttattgggcaggagtttattaaactgtttattaaactaagaaaaattgaaaactcaggaaaagtcctgaaaatgaccaaatggcatcaaacttagagcattctggccatctaagctcccaatcattccaaaaaactgtacaacactggaaatgacaattttttttgtttgggaaccagtatggattccagaatagataaatccttctgacacaatttgcataccacatcctctcctggacacttcacctgccacttagagttgatgtcttaatgggtgggattcctcataatggaaccatacctggattttcctgggtcaagtagctatcacatcactgagcagcataaacaagtatcaattcctgtggaaagaggctggtttgggccaggcactgtagctcacacctgtattctcagcacttggaggccgaggcgggaggatggcttgagaccaggagttggaaaccagcctgggcaacatagtgagatcctctccctgccaaaaagaaagagagagagacagggtctcactctgtcacccaggctggagtgcagtggcacaaccacagttcactgtagccttgacctcccaggctcaagcaatccccctgccccagcctccctggtagctgaaactactgggtgtggtgcctgtggtcccagccactcctgagactgaggcgccatcagtcacttgagcccaggatgtccaggctgcagtgagccaagttcatgccattgtactttagcctgggtgacagagtaacaccctgtctcaaaaaaatatttaaaaaaaaaaaaaaagggtagggtgcagtggctaatgcctgtaatctcagcactttgggaggcagaggcgggcggatcacttgaggtcaggagttcgagaccagcctgaccaacatggtgaaaccccatttctactaaaaatacaaaaaattagccaggcatggtggcagacacctataatcccagctatttgggaggctgaggcaggataatcgcttgaacccgggaggcggaggttgcagtgagctgagattgcaccactgcactccagtctgggcaacagtgcaaaactccatctcaaaaaaaaataaataaataaaaaggctagtgtcctgcagaggtgtgtggtatgcaaattatatacaaaggatttgtgtgctttcctccttttttgtgtgtgtttatttgtttttgtagtcctaaattgggaaggccaagttaccataacctataccatttactatcaacaaatgttaactttatttatttatttgagatggagtcttgctctgtcactcaggctggagtacagtggtactatctgggctcactgcaacctccgcctcccaggttcaagcgactctcctgcctcagcctcccaagtagctagggctacaggcgtgtgccaccacgcccggctaattttttgtagttttagtagagacgaggtttcaccgtattagccaggatggtcttgatctcctgacctcgtgatctgcctgcctcagcctcccaaagtgctgggattacaggtgtgagccactgcgcctggaggtaacaaatgttaattttaaatccaactgagcttgagcccaggagttcgaaaccagcctgggcaacatagtgagwccctgtctctagaaaatatataagtaaataaataaatccaactggtattaggtactctgctaggccaggaaatacacagatttttaaaaatcaagaacgtttaaaaatcctcaaagaacacacagacatagagggaatgaataagatagggaagaaaccagtaaactgcaatacaatgtgaaaagaaagaatgaggcagagaccattaattccagcagggattttagggaaaacctctgagaggtagtgacccctgagatacgtgttgaaccacaaaattgtagacaaaagaaaggaagacttgaaaaagataaggccaagcaaggtggctcacgcctataatcctagcactttgggaggctgaggtgggaagatggcttgagttcaggcattcaagaccagcctgcgctggtcacatagtgacaccccatctctataaattaaaataaaattttaaaaaagagaaagaaaaagggctggttgcagtggctcatgcctataatcccagaatttagagaggccaaggtaggagaatcgcttgagctcaggatttcaagaccaggctgggcaatgtagtgagaccccatctctataaattaaaataaaatttaaaaaaaaaggaggccaggcacagtggctcacgcctgtaattccagtgctttgggaggtcaaggtgggtggatcatgagatcaggagttcaagaccaacctggccaagatggtgaaaccctgtctctcctaaaaatacaaaaaaattagctgggtatggtggcgggcacctgtaatctcagctactcagctactcagcaattctttgcctcaggttgcagtgagccaagatcactctgcactgcactccagcctgggcgacagagcaagattccatctcaaaaaaaaaaggggggctgggctcagtggctcttgcctgtaaccccagcactttgggggccaaggcaggcagatcacttgaggccaggagttcaagatcagcctggccaacatgacgaaaccccatctctactgaaaatacaaaaatgagcctggtggtgggtacttatamtgtaatcgcagatattcggaggctaaggcatgagaatcacttgaacctgaaaggcggaggctgcagtaagccaagacctcaccactgcactccaacctgggcaacagagtgagaccctgtctcagaaacaaaaataagaaaagaaaagagatatggaagagttgcctgttttctacagtacatactagaggaaataactaaaacgttggttaaatattttttgaacttaaaaaaaaaacctgcagtacatgcaagaggtggcaagatactaaggaatgctcagatcaaaagctaagtcatagcaggaacccagaacaagtaagcaagggctccaaagacagctttcatttccaatgcatttgctcaaccccagtgaatttgaccttttctctgcgtgaagaaatgcaaggccgggcacagtggctcacacctgtaatcccagaactttgggaggccaaggtgggtggatcatgagtttaggaattcaggaccagcctgagcaacatagtgaaaccccgtctctactacagatacaaaaattagccaggcgtgatggcaggcgactgtaatcccagctactcaggagactgaggcaggagaatcacttgaacccaggaggcagagattgcagtgagccgagatcacgccattgcactccagcctgggtgacagagcgagactccgtctcaaaaaaaaaaaagaaaaagaaaaagcaggccaggtgcagtggttctcgcctgtaatcccagaactttgggaggctgaggcaggyggatcatgaggtcaggagttcgagaccagcctggccaacatggtgaaaccccatctctactaaaaatacaaaaattagccaggcatggtagtgggcacctgtaatcccagctagtcgagaggccgaggcaggagaattgcttgaaccctggaggcagaggttgcggtgagctgagatcatgccactgcactctatcctgggtgacagagcaggatttttccccctccgtcttgggggaaaaaaaaaaaaagaaatgcaaaagacagtagtaaggcctaaaatctgctaaatatatggaatctaatgcaaacatcccgcaaaatcctgctacaataaggataaagctaagtatgagtgaattagaaataaatgcaccaaccttcactcatctccaggagactgcaaggagaactgcccacctttcccaacactgacactaagagtggggagcggtgggtgggggtgcagggttgggagggtcccttgagaattcataacaacacactgatcaacaggtttacagcctgaattcaccaaggctaggtatgaagaccctcaggacaataatttaagttaaatagacttgagtcaaaagtgatcctaagcataaagctgaagcaaacataaatcatctctgacagaatataccttcaacagaaagcacaaaaataaagtcccatgaatatgattcacagtaaaaacagaaaatcacaaaagaatcatcatgacaaccaggcgcggtggctcacgcctgtaatcccagacttggggaggccgaggcaggtggatcacaagrtcaggaaatagagactatcctggctaacacagtgaaaccccgtctctactaaaaatataaaataattagctgggcatggtggcacacgcctgtagtcccagctactcaggaggctgacgcaggagaattgcttgaacccaggaagtggaggttgcagtgagccaagatcgcaccactgcccttcagcctgggcaacagagcgagactccatctcaaaaaaataaaattaaattaaattaaaaaataaaggagagattaaaaagaactaatgagcaaaaaatgacaaaacaaattttaaaatcatgaaatagatctaataaaaataaaaagaataggccaagcgtgggggcttatgcctgtaatcccagcactttgggaggccaaggcaggcggatcacctgaggtcaggagttcgagaccagcctgaccaacatggagaaaccccatctctactaaaaatacaaaattagctgggcctggtggtgcatgcctgtaatcccagctactcgggagtctgaggcaggagaatcgcttgaacccgggaggcagaggttgcagtgagctgagatcgcaccattgcattccagcctgggcaacaagagcaaaactctatctcaaataaataaatagataataaaagaataaagtattcttaaacatgacacctaagcaagagccataaattagttggtcatgatgtaagtacctgtagtcccagctactcagggggctgaggcaggaggatcacttgggcccaggagtttgaggctgtagtgagccttggtcactccactgcactccagcctgggcagcagggcaagaccctgtctcaaaagaaaaaaaacaaaaacagaaacaaaaaacaaaactgtacctccaatggagctaaagtgaaacactgcaagtctatagggaggccatcaatgaagagatggtcctgatttggtgggtgtaggatgcaatccatgggactgcatctttaagagccatgaaacatttgagaaacackaaatcaagaggcaaaatcagaactattgacattaggccgggagtggtggctcatgcctgtaatcccagcactttgggaggccgagaggagcagatcacctgaagtcaggagattgagaccagcctggccaacatggtgaaaccctgtctctactaaaaatacaaaaattagctgggtgtggtggtgcacrcctgtaatcccagctacttagaaggctgaggcaggataatcgcttgaatgcgggaggcggaggttgcagtgagatcgcaccactgcactccagcctgggcaacagaacaagactctgtgttaaaataaaaaaaaaaaattgttgacattagaattgtgcactgtccaatgtgattactagccacatgtagttatttaaatttcaaaaattaaaaattcatttcctcagtcacactaccacatttcaaatattcaataagcaaatgttgctagtagccaatgtgttggacaatgcagaaacagttccatcatcacagaaagttctactggacagtgctgacctagatattcatctcaagggaaggaaatgctcaaagatgctcacttggtttctgtcctgaactggatggttggcagggctaccaattggtaaagaggatgcaggatgaggagcagattgctgagtgccacccatcgtccttctatgtgaattcaaaaagcattcactgaactctattatgtacctatgaaatagctactgtgaaaagtactttggagagtatctaataaacaaattactcagtctgtacacttataactaaaaagtsaacacagaaagaaattagaaaaagagcaaactaaacccaagctaccagaaggaaataaagaatagagtggagataaatatagtatagaaaaacaaggctgggtgtggtagctcatgcctgtaatcccagcactttgggagcccaaggtgggcagatcacctgaggtcaagagttcaagaccagcctggccaacgtggtaaaaccccgtctctactaaaartacaaaaaattagctgggtgtggcggtgcatacctgtaatcccagctactcaggaggctgaggcaggagaatcacttgaacctgggaggcagaggttgcagtgagccgagatcgcaccactgcactccagcccaagcaacaaagcaagaccctgtctcaaaaaaacaagcaaaaaaatggagcaaacacctaaatgtcagagctaaagctataaaatgcttagaaaaaaacagagaaatcttcatgacattgtatttggcaatagtttcttggatatgacaccaaaagtacaggcaaaacaagaataaattaatttgactgaaattttaaacttctgtatcaaaggatactaaccccaaagtgaaaagacaattcacagaatcagaggaaagatttgcaaatcacatatctgataagggattactatccataatatgtattttttaaaacgcaaaaactcctgtaactcaacaacaacaacaacaaaaaaaacctatttgaaaattcgcaaggagttaaataggcgtttctccaaaaaaaatatacgaatagccaataggcgcatgaaaagatattcagcatcactagtcatcagagaaatgcaaatcaaaaccatagtgagatacacttcatactcattagggcgggatagttataaacacacatacacatacacacacagagaaaataacaagtgttgggaagatgtagagaaattagaacactagtacatcgctggtaggaatgtaagatggtgctgctatttggaaaacaatatgactggtccttgaaaagttaaacacagaaataccctattccacttctaggtatatactcaaaaaaattgaaaacgccaggcacggtggcccacacctgtaatcccagcactttgggaagccgaggtgggtggatcaccagaggtcaggagttcaagaccagcctggtcaacatggcgaaaccccatctctactaaaaatacaaaaattagctgggcatggttggggggcacctttaatcccagccagtcagaaaagctgaggtgagagaatcccttgaacctgggagggggaggttgcagtgagtcaagattgcaccaatgcactccagcctgggtgacagagggaggctgtctcaaaaataaataaattaaattaataaataaatattcttgccacaataaaacaaaaattttaaaaaattgaaagtaaggagtcaatcaaatacttgtataccaaagtccataccagcattattcaagatagcagaaaggtggaagcaacccaaatggccgtcaacatatgaatggataagcaaaatgtaatatatacatacaatggaatcttattcaaccataaacgggaatgatatactgacacatgctataacatgaatgaacttgaaaataattatgctaagtgaaataagccggacaaaaaagaacaaatattgtaggagtccacgtatatgaggtatctagaatgggcaaattcatagagacagaaagtagaataggctgtgcgtggtggctcagacctgtaatcatagcactttgggaggccaaggtgggaggattgttttgagtccaggagtttgagactagcctgggcaacctggtgaaaatcctacctcaaaaaaaaaaagagagaaagaaagtagaatagagattactatgggctgtggggatggagagagactctgtctcaaagaaaaagaaaaacatacacctaacatcatactcaatggtgagagagactgaaagctttttgtctaaaattaggaacaagacaaagaagcccactctcatcattttttgagacagagtcttgctctgtcacccaggctggagtgcagtggcgtgatctcggctcactgcaacttctgcctcctgggttcaagcaattctcctgcctcagcctcccgagtagctgggattacaggtgcctgccaccacgcctggctaatttttgtatttttagtacagacggggtttcaccatgttgcccaggctcgtctcgaactcctggcctcaagtgattcacctgcctaagcctcccaaagggctgggattaaaggcatgagccaccgtgcccggcctcatcatttcttttctgtttttcttaagtctagtaatagagtctcgctatgttgccccaggttggtctcaaattcctgggctcaagcaattctcctgcctcagcctccgaaagtgctgagattacaggtgtaagccaccacacccagcctcttcatttctattcaacattgtactggaagttctagctagagcagttagacaataaaaagaaataaaaggcatccacattagaaagaaataaataaaactatggccaagtgtggtatctcatacctgtaatcccagtgctttgggaggcccaagcaggaggatagtttgaggccaggggttcgagaccagcctgggcaacacagtgaaactccatctctacaaaaaaaatttttttttaattggtcgggcatggtggcacacgtctgtggtcctagctactcaggacactgtggtggaaggattacttgatcccaggagttcgatatcaacctgggcaatgtacggagaccccatctctagcaaatgattagagctaataagtgaattcagcaaagttgttagatacaagatcaacacacaaaatcagtggtatttccaaatactggcaataaaaaatctaaaaaggaaataaatcaactccttttacaatagcatcaaaaagaataaaatactttgaaatatatttaaccaaagaggtacgagacttgtacgtggaaaactataaaacactgctgaaagaaatgaaagaaggtctaagtatggtcatgtaktgcttaaccatgggggcaccttctgagaaatgtgtcgtgtaagtgaattcgtcgttgtgtgaacatcacagagtatacttacacaaacctggatggtatagtgtactacacatctaggcaatatggcatagccttgctcccgggctacaaacctggacagcatgttactgtattgaatactgtagacaattgtaacatgatggtatttgtgtatctaaacatagaaaagatacagtaaaaatatggccttataatcttatgtgaccaccatcacatatgctgtaagtcatggaccgaaaggttgttatgtggcgcacgactataaatgcaaaaatattcatgcttaaggatttgaagactttatatataaagtgagtcatcgcaccagtattgttaagatatcaatactccggctgggtgtgttggctcacacctgtaataccggcactttgggaggccgaggcgggtggatcatctaaggtcgggagttcaagaccagcctgaccaacatggtgaaaccctgtctctactaaaaatacaaaaattagctgggcatggtggtgcatgcctataatcccagctacttgggaggctgaggcaggagaatcactagaacctgggaggcggaggttatagtgagccgagatcatgccattgcactccagcctgggcaacaagagcaaaactccatctcaaaaaaaaaattgaaggtatcaatactcctcaaattgatctaccaattcaaagcaatccctgtcaaaatcccagtggcccccccctccctttttttttttttttaacagcaatggaaaagctgagctaaaattcatacagaactgcaagcgacaaaacaatcttgaaaaagaggagcaaagttggaggactcaaacttcctgatttctatacagctactatacagctgtatacagctactatacagctacagtaatcaaaatagtatggtactagcataaagataagatacataatcaatggaatagaattgagagtacagaaataaatttatacatccatggtcaattgatttttgacaagggaagaatcctctcttcattaaatggtgctgggaccaaaaaatcggaagagctctcacagaatggtcaaagaaaagtctctttgcctaaygggatcaatttaactccttattgtgcttcaacagacacggtctcatgagcagtgagatttgaactcaccacaggctcccaaaatcactgaacaggagatgagggaggtggtggtggggggaacggcatgggcctgtaggtgaggatcaatctcaatctgagtccccgcactaaagacttacaaataaatcccgatttaggcaaaccgagactttattcggaaaggattaytgcaacaggggggaaaaggactattgcaataagggtggagaactattgcaataggaagaaggactgttgcaattgggagaatgctggactataaaataaaaaacaaatctggatatacgtaaggagagagttcagtggaagagatccaagaaaagggaaagaaactattgcaactgagagtggggattgggggaggctacagcaaccgggagaactctccaaccatgagatctgcagcgatctcctgggtcaggcagaaaagggctttccttttacagagatgagtgaacagggctagaaagacccgggtgtggggaagtggggagaagactggaggtggcagcgatgagactatacagagactgtttccctggggtccgtctattttcaggcggtggatgaggagggctgctcgctggctgcggctgaggctcggtcaccgtgtagagaggcccagggagagctgcttcactcaagtcctgtcaagtcaaggcagccgggatttgtccacatcgtgagtacaggcaggtcagctaactatttgcgaggcgaagaactggaatttagagggtctgggcctgaccttgtcacagctaacgacgggggcatccttgagtcctgacaaagtcacatgcggaagggcggttgcgtgtagtaagtccttttaggaacacaaaggggccgggcgcggtggctcacgcctgtaatcccagcacattgggagaccaaggcgggcggatcacctgaggtcaggagttcaagaccagcctggccaacatggtgaaaccccgtctctactaaaaatacaaaaattagccgggcgtgctggcaggcgcctgtaatcccagctactccggaggctgaggcaggagaatcgctcgaatccgggaggcggaggttgcggtgagccaagatcgcgccattgtattccaacctgggggacaagagcgagatttagtctcaaaaaaaaaaaaaaaaaaaggtgggtgggggtttcttcaacttcgttgtccacagggctcaggtcaagttcaacattgtcagaatgcagggatgtctctccatggtttctgaggctgaggaggtacccaggtaagcacactctgggttctctggtgagcacacaccgagctgcctgcatctcccctacccatgaaggcagctagccgccgggccagtggtgggaaggggaggcggccattagcgccgttcccgccgggacttgaagcgcccggccgcggcaagccccgccctcggcgcgcccccgcgtccgcgcgcgctcctcgggtctgcgcggagccggcgtcggcgcgcgcttgggcgcctggcgaagaccgagagaggctggcgggatctcagcggcgcggccgcggaacctgaggcggtctggggcggcggcgctccggctctgaagggctccagccaaacggagcccgcggccaaacggtgcctgcggtgcctgagctgagtgaggccgaggccgggaggccgtgcccggaggtgagcgtcccggggccgcgccgcgtccggcggggtgagggcggggcggggcggtcgcctgccggctggggccgaggggtcgcggcctgtggcttggccgccgcggatcgtcggtgtcggggggagtctcgctccggagggccgcgtgtttgcgactcgggaaggggcgccggcggcggagcccgagccagggtcccgcccagcccaggtgagcggcgaccccgagcccctgactcgcctgcggcttgacttgcgagctagctgaaggcacagctcctggttctctcgcagggcgttccgaaacttacagttatgcgcaacacaatgtttctattttcaaaggcgaacgctgcacgatcgcagtccagtgatacaaagtatgcctattagtgacttcacccgactcccaccactcactttctctgatgttttgaaggcctggtgttcgctgatttcacgtttccttaatttcttctttgtgccttttttttttccttttcgctgccagtaataaaagagtttattacttgtcagcaatgatgaatgttcgtgtggcatccagcgttgagttcctatgtacgtaatttgagataagtaaagataggaaactrctgatttgttttgatgcgaatgcagaaaataatgtggtagtatgaagtctggccggttgcagtttgtttttaggggggaaactttaaaagttcatgttgtgtcttctktctaaatatgctgaaagtcggatttatttaaaaggcaattaaattcagtgaatacagagtatctttttataacactaatgttagtgctaggcactggcggagtccaaaaatgtgtaaaaaatgtgtgcaggagggagtggttaagcacactaatgatatgaggctgactgcagtccagtgttaatggaagctcacacttactgagcagttgttttcagctgggcactgtggagggtactttacttgcattttaatttaataatgtataataattagcatacacttgatttaatttttttcattcaaaaaaattttagtacctactgtgtactgaatgctaaggatacaatagtgacaattacagactctgcctttagactctacagtgtcattgggcaaaacagatattaagcaaataatcagggcccggagcgatggctcacgcctgtaatcccagcactttgaaaggctgaggtgggcagatcacctgaggtcaggagttctagaccagcctggctaacatggtgaaaccccgtctctctctactaaaaatacagaaattagctgggcgtgatggggggcgtctgtaatcccagctactcagaaaaactgaggcaggagaatagcttgagccggcgagaggtagaggttgcagtgagccaagatggtgccactgcactccagcctgggtgacagagcgggactccatctcaaaaagtaaaataaaataaataatcacacaaataaatgccaataagcaaagacagaggctaaaataaagaatgtaagttgtttgtgagagaaggtaacagggggacttatccaagctgggaaagttttcctaggaaagtaatctttgagcttagatattagggataaataggaattaggggaagatgactcccaaaggagagaagaaaggctcaggcaaaggaaatagatggcgcggaggctagggaagatggtcatttcaggaacttcagcagttgttgtgtggraagcaaaagggtgctgtgataaagtaggttagggccaaagagatgatgcagggcttttttttttttttttttttttgktacagagtctcgctctgtcacccaggctggagtgcagcggcacgatcttggctcactgcaatctcttccggattcaagcgattctcctgcctcagcctcccgagtagctgggactataatgcgcgccaccatgcccggctaatttttgtatttttagtagagatggagtttcactgtgttggtcagactggtctcaaaatcctgacctctggtgatccacccacctcggcctcccagagtgctgggattacagacgtgagccaccgtgcccggctgatgcagggccttttaagcaatgttaaggatttgggaccagctttttctgtttctttttcttttttaaacttttatagaaaacttttcaaaccactcaaatgtagggagagaacagtacaatgaactctcccgtaatattacccaaatgacttggatgttattttaacagtaataggaagtcgtttaaaggtttacctccgtcagaaaaaaaaaaagtttaaagcaaggtaagtcttactacaaacaacttttttttttttttgagacggagtctcgcacaggcaggagtgctgtggtgcaatctccgctcactgcaacctctgcctcccgggttcaaacgattctcctgcctcagcctcccgagtagctgggattacaggcatgcgccaccatgcctggctagttttttgtatttttggtagagacggggtttcactgtgttggccaggctggtctcgaactccagaccttctgatctgcccacttcagcctcccaaagtgctggaattacaggcgtgagccaccgtgcctggccaactttttatttcaaaaagtcgtcctgactgctgtgtagaaactggattggatggggacaagaatggaaatgaggagaccacctagagttgatggtggttgggactagaattgtggcaatgaaggcattgaaaatttaagagtacctaactgatctcttctcatgttaataattttatattcacacctattggaggaatcatggaaggttttctaaaggagattgtatgtatgtatgtttttatttatttgagatagagttttgttcttgccacccaggttggagtgcaatgacccaatcttggctcatggcaacttctgcctcctgggttcaagcaattctcctgcctcagcctcccaagtagttgggattacaggtatgcaccaccacacccagctaattttgtatttttagtagagagagacagggtttcaccatgtcggtcaggctggtctcgaactcctgacctcaggtaatctgcccgtcttggcctcccaaagtgctgggattacaggcttaaaccaccgtgcccagctaaaggagattatatttaaaatgagctttgcatttccgtccagaccagaacccaagatggctgcactcttgctgagacatgttggagtggtcattgcctccgagcgcactttagccctcagctttgtatcagaaatgctgttcctttgggaatcatggccaaagaagagatggaatggttctggaataagaacacaggttcaaaccgtcccgtatctccccacgtcactatctagagttggtgtcttcctatgtcgatgtccatctgccaccatggctctggtattgctttgagcacaggggtctctttttggcatgtcagccctgttactcccaggaaagtttaagtcttacttggaactcattggtccctgtgtctggggccagcactgatggacacaactaagtttgcactcgtcttccctctcatgtatcatacctggaatgggatccaacacttgatgtgggacctaggaaaaggcctgaagattccccagctataccagtctggagtggttgtcctggttcttactgtgttatttgtagggctggcagctgtgtgaagaactgaggtgaccagcatcatcttcctacacattattgtattcayccatctttcagtttgtcagtcttatctccaccctgggaaaagttctccttatttgtttagattcttttgcgctttcagatccccttggaacagtacagtaccttgtagaccgtaatggtggaaaagggtctagttttccccttgtttctaaagatggggtggctgcaaaaactcccctttttttgcccacagcttgcctaatctgggcctagaagcagttattctctctccatattgggctttgatttgtgctgaaggtcagcttttggctcctccttcctgggatattggaaacaatgccagctctgtggcttctgccctggggactgggggtgaggctttgggcaccactgcctgtgagttgctggcttaaaggacagttctgttcattggtgagagccaggccattaacacctacgcagtgttactgaaagaagagaggtgggagtggagcagaattagtctgtcccagctagagagagmtaaagaggactagttagttcttggagcagctgctttgaggagaaaatatatagcttttgacccaagaggaagatccagaaaattattgaatatattaaagttttttttcttgcatttctagaaaagcctcttaattttttgctttctcatccaagtcatgtaccacttttttctgaaactgaattaaaatacttattaaaaaaaaggggggagggccctttgtgacataagataacatttcagtatggagccctggaatgagaatgtcctggaatgggaatgtcttggtcagccctggaatgactcaataagtaaccttgccagtctctgcctaagtgtcacctttcccataggattttctcatttaaattactgttgtcactaccactttggtccttggagtatataagtagcccattaaaaatttctaggaaagracaaaaatatattttcttcattactatgattacagctaaaataagctgaaactttccaaaagatttcattttctatcacttagtatatagtaaaccagaattcacaaaatatacaaatgaactgtcttttaagtatttggttctgatgctatcatagttggttgcttttggaggcttgggggcctaatcacattccatagaagatctaagtaaaaggaacccaacatggaaatgtgatccattggtttcttttccctcgtgtttaatacctggaatggccttatccttaaaaagaaacgtaagcttctatataaaggtagcatgtctgattgtataataccttgatacaaatccataatctaaaaaaaagtggccagttttttgtttgtttttgcattttttctcctcaaattccttttgaccatgaaatayatgttttaaaaaataaaattgtaatgtgcaatttttaatttaatttttaattatgcatttaattctttttttttcttctctttttttttttttgagacagggtctcactctgtcacccaggctgaactggagtacagtggcatgatctcagctcactgcaacctctgcctcccaggttcaagcaattctcgtgcctcagcctcccgagtagctggggattataggtgtgtgttcccacgtccggctagtttttgtatttttagtaggcacagggttttgccaggttggccagcctggtctcaaactcctggcctcaagtgatttgcccccttgggcctcccaaagtgtggggattacaggcatgagccactgtgtccagccacatttaattcttttgtttatttatttatttatttatttttagacagagtttcacttcgacatccaggctggagtgcagtagtgcaatctcagttcactgcaacctttgcttccgggttcaagcgattctcccgcctcagcctcctgagtagcttgggactacaggcgtgtgccatcatgcctggctaatttttgttttttgttgttttttttttttactcactctgtcaccaggctggagtgcagtggcgtgatctcggctcactgcaatgtccgcctcctgggttcaagcgattcccctgcctcagcctgctgagtagctgggactataggcgcacgccactatacctggctatttttttttgtattttaatagagacggggtttcaccatgttggccaggatggtctccatctcctgacctcgtgatccacccgcctcagcctcctaaagagctgagattacgggcatgagccaccatgcctggccaatttttgtatttttagtagagatggagtttcaccatattggccaggctggtcttgaacttctgacctcaagtggtccacctgcctcagcctcccaaagtgctgggattcaggcatgagccaccgcacccagccctatttaattcttaagatgtagtttttatattcagattcttatacacttattttaaatttttgtttatagattttaaaaaagaaatcagacagtctcccaagtcagaagagtctcagactcccaatttattaattttttttttttttttttgagacagggtctcactcttacccaggctgaaattcagtggcacaattatagttcactgcagccttaaactcctggactcaagcaactctcctgcctcagcatcctgactagccaggactacagacgtttgccatgatgcctggctaatgttcttatttgtagtagtgacagggtctcactgtgttgcctaggctgatcttgaactcctagcatcaagagattcccaccacctgagcctcctaaagtgctgagattacaggggtgcaccactgtgcctggcctaacgtaagcattttaaaataccacattcttagtagtccaaatctattttgactggcctttcctgttagtggacatgttccataaaactcagtcttctctgtctcctgattratttcatcactgcactttttgggatagtatttgagaagatgttyggtaaactgtgatatgctatatcaatgtaagatgatggtgatagttggaagtagaccgaagaaaaatgaaggcagttcttttcatctgttcattcttgtgccaactttatgctgataacttggatatttgtcagatggctttttttattctctgcagtatagtacatgacttaggttcattcatgtcatatgactgtgatacatttgtagcagctcactcaaytgatataaataaattttagttggttcatttgcatgttactaaatttatgatagaaaatgactgcggtaatggtgactttgtggtgtctccatgttaaaattaatttttacatcataattctatgccatgcttacaattagtaattcagtttgttttttccttattagtccataaaattgtgctactagaaactgtcatactgatactgacacttttgtcattagttttaaatcagtggcttgcacacattggtgggtggttcaataagtatataaaacatttttttttaagtttttgtttttttgagatggagttttgctcttgttgcccaggctggagtgcaatggcgggggctcagctccctgcaacctcctcctcccagcttcaagtgattctcctgcctcagcctcccaagtagctgagattacaggtgcccaccaccatgcacggctaatttttgtgtttttaatagagacagggtttcatcatgttggccaggctggtctagaactcctggcctgaggtgatccgcccgcctcagcctcccagagtgctgggattacaggcgtgagcaactgtgccgggcttttaaaaagtttaattcgtgaaatcaaaagtaaaatttcataatcatgtcaaaattaggactttttagattaagtctgaagatgtttctttttctttttcttttttttttttttttgagacagagtctcactcttgttgcccaggctagagtgcagtggcgtgatctcggctcactgcaacctccacctcccaattcaagtgattctcctgcctcagcctcccaagtagctgggattacaggcatgcgccaccatgcctggctaatttttgtgtttttagtagagacagggtttcaccatgttagccaggctggtctcaaactcctgatctcaggcgatctgcccacctcggcctcccaaagtgctgggattacaggcgtgagcttgaagatgtttcttaccaatctctataacagattatggtgggggatgaggaaagaaaaaggagtataacactgttgtattcttagtatcttcagtcctcagaacaacctgagggggataattatgtccatgctataagttaggcagctgggactcagagaagctaaataacatatacaaggtcacctagctcaaaagtgatgtagccagtattccagtaaaactcagtttgaatttgaggtctattctatcttcattctcttttgctgtcataaaacaagtaaaagcaatttgtcagtaccttataactgtaaaatgatggaaaaaagtatttgtaatttcctagagaacaataacctattactggaaactcagtgaaatcctttaagtaagacttctcttgtagctttttttttttttttttgagacagaatctctgtcacccagactagagcacattggcgtgatctcccctcactgcaacctccatctccctggttcaagtgattctcctgcctcagcctcccaagtagctgggactacaggcgtgtgctaccaagcctggctatttttttttctttttttttttttttttgtatttttagtagagacggagtttcaccatgttggccaggctggtcttgaactcctaacctcaggtgatccgcctgccttggcctcccaaagtgccgggattacaggcatgagccaccacacccaaccctcttgtagcttttagaagaaatttatttgccaggcatggtggctcacgcttgtaatcccagcactgtgggaggccgaggtgggcggatcatgaggtcaggagatggagaccatcctggctaacacatcgaaaccctgtctctactaaaaatacaaaacattagccgggcgtggtggcacatgcctgtagtccccagctactcgggaggctgaggcagcagaatcacttgaacccaggaggtagaggttgcactccagcctgggcaacagagcaagacttcatctcaaaaataaataaataaataataaaaataaaaataagtttatttatagccgggcgtggttgcccatgcctataattctagcactttgggaggccaaggcaggaggatcacctgaggtcagtagtttgagaccagcctggccaatgtggtgaaacgctgtctctactaaaaatacaaaaattagccaggcatggtggcacatgccagtaatcccagctacttgggaggctgaggcagaagaatcacttcaacctaggaggcggaggttgcagtaagctgagacctcaccactgcactctagcctgggcaacagagcaagactctgtctcaaaaaaaaaaaaattatttgtataaaygtgtggggtacaagtataattttgttacatggatatattgtacagtagtaaagtcagagcttttaatgtatccatcactggaataatttctcatcatccccccacccccacccccacccccaccccaaggatcgctactctttgctttgcacttgctgcacactgtgaaggatacaggaaatgtgtaagtcatggtacttatcctcagcgatgtcagatctggtaaagagagtgaaaagaaacagtaataagcaatatcacacaatatgatttaaatgccaaaaatctaaatgcttaggaggagactattactaagggtctaatatttcatctttatggtggaaatggatcttgagctgggacttaaaggatagttaggatttgaatgcctaggaygatgattacaatgtgaacaaagtagtagaatgaacatgttatgcttttgagataatgaagaccagatctaaactatggaaatattttattttatttttattttattattattattactgtttttgagacggattctcgctctgttgtccacgctggagtgcagtggcatgatcttggctcactgcgacctccgactcctgggttccagcaattctcccacctcagcctcttggtagctgggattacaggcgccctccaccatgcctggctaattttttgtatttttagtagagatggggtttcaccatgttggctgggttggtctcgaactcctgacctcaagtgatccgcccacctcggtcttccagtgtgctcggattacaggcatgagcctctgcgcctggcctattttattttattttttgagatgaagttttgctcttacgcccaggctggagtgaagtggcacgatcttggctcactgcaacctccacccgccgggttcaagcgattctcctgcctcagactcccgagtagttgggattacaggtatgcgccaccacacccatgcgtggttcgccgtgttggccaggctggtctcgaactcctgacctcaggtgatccacccacattggcctcccaaagtgctaggattacaggcatgagccaccatgcctggcctattcattattttttagttgacaataattttatatatttatgggatacattgtggtgtttcagtacttatgtacattatggaatggtcaaatcaggctaattaccatgcccctcagctcaaatacttaacatttctttgttgtgagaacatttaaaacccattccttctgctattttgaagcatacagtattattaactgtaggagattattttgaattagttgaaaataatgttggagaactgccaagtgaaaaacaaacagccccaccagattataatgtccaaaagagctgggatctttatctattttgttcaatatgtatcccaagcacctagaatcattcatgtctgatatatagtaggtgctgaataagtatacactttagttatttttaacaactttccatcattataattgatatacagtaagatggatatatatatatatatatatatatatatatatatatatatatatatatatwgttttgtttcattttgagacagttttgctcttgtcacccaggctgaagtgcagtggtgcgagcttggctcaccagaacctctgcctccaaggttcaagcgattctcctgcctcagcctctggagtacttgggattacaggcacctgccrccatgcccagctaatttttgtgtttttagtagagacggggtttcaccatgttgaccaagctggtctcgaactcctggcctgaagtgatccccctgcctgggcctcccagagagctgggattacaggcatgagycactgtaccattttatttcttaaaaaagaaacaaatgagtcaagctgatctgaatggtcagggtgggtgtttatatttttctctttcctttgtgtatgtttgaaatatgtagacatttttaaagtgaagcaattaattttaggaatactacgtttgaaggaagaaatcttatgagaaaacgttaatgggcatagagttatgatttcctgaagtttttttcctttttttttttttttttgagacagagtctcactctgtcacccaggctggagtgcagtggtatgatctcggctcactgcaacttctgcctcctgtgttcaagcaattctcctgcttcagcctctcaagtagctgggactacaagcgctcgccatcacacccgcctaatttttgtatttttagtagagatggggtttgaccatgttggccaggctggtctcaaactcctgacctcaggtgatccacctgccttggccgcccaaagtgctgggattacaggcgtgagccatcacacccggctgctgggttttgttttttaagacggtctccctctgttgcccaagctggaatgtagtagaatgatcacaggtcgctgcagcctcaacttcctgggctcaagcgatcatcccatctcagcctccggagtagctgggactacaggcatatgccaccgtgccgggctaatttattttttatttttatttatttatttttttgagacagagtctttccctgtcgcccaggctggagtgcaatggcgcgatgtcagctcaccacaatctccacctcccgggttcaagcagttcttctgcctcagcctcctgagtagctgggattacaggtgcgtgctaccacgcctggctaattttttgtgtctttagtagagacgggtttcaccatgttggccaggctagtcttgaactcctgaccttgtgatctacctgccttggcctcccaaagtgttggtattacaggtgtgagctaccacacacagccaaatttttgtattttttgtagagatggggtctggctatgttgcccagcctggtttggcacttctggcctcaaacagtcctcccactttgacatcccaaagtgctgagattacaggtgtgagccaccatgcctggcctgtttatttaattttaaaattgtgaaaaagtcattgatttttttttcaagccatgaatcaaccaaatgtcatatgaagctcttagttgtttttttttttttaacaaagtaatctttattgtggtcataatacatcttttcatagtcattagtttaaatgtggatwcacattgcttttcacagcttcaaatttatgatttggagagtaagaggcaagttatatttcataaggattcaaatctttgaaattactgctactcttagattattaagagtaattttctgatagagcaaaagtactgccttttaaaaaaacaaatgaaattgcggtatagcactctaggtgtatatatttttagggtagagtttttcatcccaaattttattatgaaacttttcaagtgtgtataaaaatggagagaacagtaaactctcatatctactcattacccatcttgatgattatcaagttgtggccattttgattttaattatattccatccactccccaatccacttgattgtttgaagcaagttccagttatagtattcatcagtcaatatttcagtatgtatctaaagcagtgacttaaaaaacttatagctacagtcccatcgtcacaccctaaaaattaatcatcgctccaaaataacatcagatatcccgtcactattcagatgttacggattctttcataacttttttttacggttgatttgtttaaatcaaaatcgaaatatggtccatacattgtaatacattgatatatttctgaaatatttaaagaatctactgtcatcacatttttctccctcataatatatgtgttgaagaaaatggatcatttttcctaaagaatttcccacattctggactttgttgattgcattcttgtgatatcatctgattatgctcctttgtgccctgtatttcctgtaatctggtagttagatctagaggcttgaatggattcagattcacatttttggcaagaatagatgatggtacaagcttttacactgaggcatgtttttttgtctggttgtctctgtttgtgatgttagcagccattgatatcattgcctagattcattattgcattagcagttgcaaattggagacattataatttttttttctttttgttttaagactgagtttcactcttgttgcccaggctggagtgcaatggcgtggtctcagcccactgcaacctccgcctcccgggtacaagtgattctcctgcctcagcctcccgagtagctgggactacccattaagtaactggtccttccccattcatctcaatccctagtaacctctgtcctactttctgtctttatcaatcacctattctagatattttatatatttggaatcataaagtgtttgtccttttgtatctgacttttttattcatgtagcatcatgttttcagcattcatccatgttatagtatgtatcagaatttcactccttttatggctgaataatattccattgcttatatacacctcattttgtttatccatacatctgttgatggatacttgggttgtttccaccttttggctattgtgaatattgctgtagccaccaaaatgttttcctcagcagctgcagtatttcacattcccaccagtagcgtaccagggtttcaatttcgttacaaccttgccaacgcttgttttctgctttttgttttctttttaatagccatcctagtgggtgtgaagtagtatctcattatggttttgatttgtgtttcctaggaactattgattttgagcatcttttcacgtgcttattggccatttttatttcttctttggaaaaatgtctattcacacaagtcctttgcccatttttgcatatctttttttttttttttttaagagacagattcttgctctgttgcccaggctggagtgtggtgacatgatcatggctcactgcagcctcaaattccctggctcaagtgatctcctgcctctcagcctcccaagtagctgggaatacaggagtgtgccactgtgcccagcttgcctacctttttttttttttttttttkgaaacagagtctagctttgtcgccagactggagtgcagtggtgcaatttcggctcactgcaacctccacctcccgggttcaggccattctcctgcctcagcctcctgagtagctgggattacaggcatgcaccgccacgcccagctaatttttgtatttttagtagagacggggtttcaccttgctgtccagaatggtctcgatctcctgaccttgtgattcgcccacctcggcctcccaaagtgctgggattacaggcgtgagccatcgcacccggctgcttgcctaccatttttaagttgccattttcttgattcagcattcccttggttgctgtaacccttctttgactattttctagagttctgacaaagttggttctaagagtttctacttgtcttttgatatttctgtagaggggacaggtgcctggacctacctgttcttccattttgctgatgtcaccctcaagagtttaattttcctttttctttttctctcactctctttcaataaggagtttaaacattttaaatcttgtatatataatcctgtgtcacttaatgaagggcatacattctggaaagtgtcattaggcagttttgtcattgtgtgaatatcatacaatgtatttacacaaacctgatgttatagccaactatacacacaggctgtatggtgtagcatattgctcctaggctacaaacctgtacagcatgttactgtaccaaatactgtaggcagttatgatataatggtaactatttgcgtatccaaacatatctcaacatagaaaagacacagtaaaaatatactgttataatcttatgggaccaccattgtatatgcagtccgtcattgaccaaaatgttgttacacagtgtattactgtatttggaatgtattttggttatgataatgccacattactgtgagtttattaaagggttcatctcaggctggagtgctgcgacgcagtctcggcttacttcaacctctgcctcccaggttcaagtaattctcatgcctcagcctcctgagtagtggagattacagatatgtgccactatgccgagctgatttttgtatttttagtagagatgggttttgccatgttggacaggctggtctcgaactcctggcctgaagtgatccaactgcctcggcctcccaaagtgctgggagtacaggcatgagccaccatacctgacctcatcttttttattaaaaaaaaaaaaaatctgatcgtatagactcacatatttttgttttattcaatggagcagaatccactagtattgttatttttttagatgttcagtttaccagatttaccgaatgggagccccttcagagtgcctttggggtcactttttcttttcattttttctttttaatttattatttgtttcttttttgagacagtctcactaactctgtcaccagagttggagtgcagtggcgcagtctcagctcactgcaagctccgcctccagggttgaagtgattctcctgcctcagcctacctagtagctgggattacttgcgccgaccaccatgcctggctaatttttgtatttttagtggagatggggtttcaccatgttggccaggctggtcttgaactcctgacctcaggtgatccaccctccttggcctcccaaagtgctgggattacagacgtgagccaccacacctggccctgtccttatcattctttgggtaccttttctggggtaaaagtytccatgttcatctttctctgccccagccctgaagttatccttttcttgaaggagcaatttaagaaaaacattctccttaaacagtagaatatttagaaaccaacatataggcacttgatgtgctcattgcttctggtatgtcattgcttccaggccttctcagcagaccagtggtttggactacacctgtcacttggtgtccctggaagattggttccaagacccccatagataccaaaatctgctgatgctcaagtcccttgcataaaatagcatactatttgcagataacgtatgcacatcctcctgtatactataaatcacctttaaattacttataatacctgatactatgtaaatagttgttatgtaattttaaaatttgtattattttttgttgtattgtttttcttatttttttttccttgaatatttttgatccatgattggttgagcctgcaggtgcatagggctgttgcccaggctggagcacagtggcatgatgatgaccctctgcatccttgaactcctgggctcaagttatcctcccacctcagcacctcaacttcctgagtagctggaaccacagaggtgcaccataatgcctggctaactttttttttctgagatgaagtcttgttctgttgcccaggctggagtgcagtggtgtgatttcagcacactgcaacctctgcctcccaggttcaagtgattctcctgcctcagccttctgaataactgggactacaggtgcgtaccaccacacttggctaatttttatattttttagaagagacagggtttcaccatgttgaccaggctggtcttgaactcctgacctcaagtgatccacccatggctgggcactgtggctcacacctgtaatcccaggactttgagaggccgaggcaggtggatcacctgaggttgggagttcgagaccagcctgaccaacatggagaaacctcgactctactaaaaataaaaaattagccgggtgtggtggcgcacgtccgtaatcccagctactcgggaggctgaggcaggagaatctctggaacccgggagatggaggttgtggtgagccgagattgtgccattgcactccagcctgggcaacaagagcggtactccatctcaaaaataaataaataaataaataataaatgtgatccacccaccttggcctcccaaagtgctgggattacaggcatgagccactgcgcctagccattttttgtagagtcagtctcactattttacccagactggtcttgaattccttggcttcagcaatcctcctaccttttcctcccaaagtgctggaattacaggtgtgaggcacatgcccagttcatttgttaagtcaaatggtatattatactttttttcataataagttttaagaagtctttcttttgtcagattatcagacttaaaatgtattttctatcattgctttattttgatgatgaaaatgacagctttgagtttgctcactttttctttagacacttttaagtaatactttaggactacatggtaacttacatattaagctttttacttactttctttttacttactttctttktacttttacagtaaggcgaaagagaatgaaagacgtagataacctcaaaagtataaaagaagaatggtaagttaattcaaactgaattgctttgttaatgcctttgttaatatcgtcctgtatttttattacatttcacttgcagagatagtagagtacgttttaattatgtatgactacttcattgtcatctactatgttgaagtaatttttttaccatagctgcattaaacaaattttattgaagttactgaatgttttttattaattttaaaaagttaaattatctgtgttcatacattacttctgttatttgataaattaaataactatttacctcattagcctcttgtgatagatayactattttagtgtcatagtgggaatatggctttggagtcagataaacctaggcttgaatccygtctctgccttctattatctctctggcctttgggcagcttaggtaaattctttgagcctcaatatctcatctataaaataaggatacaaatacctacctatctgaaaggttttatgtgtgtatctttttttctttttcttttgtttttacagacagggtgtctgttgcccaagctagagtgcagtggtgcaatcatagcttgttggagccttgaattcctggggacaagtgatcatctctccttggcttcctgagtagctgggactacaggcttacaccactgcctccagttaaatttttaaatttttttgtagcaatgaggtctcactatattgctcagaactcctggcttcaagtgatcctcctgccacagcctctcaaaatgctaggattataagcrtgagccaccatgcttggcctattatttattttttaactcaggtatttataggcttatataaatatttgatgctaattatataattgtgaggttgttggccgggcacagtggctcacgcctgtaatctcagcactttgggaggccgaggtaggcggatcacctgaggtcaggagttygagaccagcctggacaacatgatgaaatcccatctctactaaaaatacaaaaattagccaggtgtggtggcaggtaccagtagtcccagctactcaggaggctgaggcaggagaattgcttgaaccttagaggtggaggtttcagtgagccaagaccgcaccactgcactccagcctgggtgacagagcaagactcctccgtctcaaaaaataaataaaaataaataaataaatgtgaagttgtgtcagaggtctccaagaccacccctagttttgatgatttactagaagaatttgtaagatttagaatgtagttatactcatgattataatttattacagtgaagggttgcaaagcaaaatcagcaaagggaaaaagtacatagggaaaaccaggcacaagcttccaggggtcctcacccagtggagtcacccaggatgtacttaattcccccagtaacaagttgtgacaaattcatgtgaagtattgtctaccaggaaagctcattggagatgagcctagagtttttagtgggagctagttacatcctaaaatttcaggctatcataaggaaagcaggagttcaatataaatcacattgtttatataaactgtacattgagccatccttataaatttagggtgatgggaaccttctagaaatccaagtttgcaggtgcggccgggcgcagtgcctcatgcctgtaatcccagcactttggaaggccgaggcgggtggatcacgaagtcaggagatcgagaccatcctggctaacacggtgaaaccccgtctctactaaaaatacaaaaaaaaaattaactgggcatggtggcgggtgcctgtagtcccagctactcgggaggccgaggcaggagaatggcgtgaacccaggaggtggagcttgcagtgagtcgagatcgcgccactgcactccagcctgggcgacagagtgagactctgtctcaaaaaaaaacaaaaaaacagaaatccaagtttgcagatgccagcccaggaccagccttgtaagcaagtctttcaaaagatagcaatcagatctgctatattaactcatttctgcgcagtaataaattgaatgactgatttgaaatggtaaaattaacttagaacaggcctgttttaaaatggctttattgaaatataattcacataccatataattcattcacttaaaatatatagttcagtagtttttagtacattcacagatttttgcagtcattaacatagtcaattttcgcgcatttatattaccccaaagagaaaccccatatccattagcaatcccacccattgtcctatgccttgcccctgacaaccatgaaactgctttctttttttgagacggaatctcactctgttgcccaggctggagtgcaacggcgtgatcttggctcactgcaacctccacctcccaggttcaagcaattcccctgcctcagcctcccgagtggctgagattacaggcacgcaccaccatgctcagctaagttttttgtatttttagtgcagatggggtttcaccatattggccagtctggtctcaaactcctaacctcaggtgatctgcccgccttggcctcccagagttctgggattacaggtgtgagccaccatgcctggccgtctgctttctatttctacagatttacctgttctggacatttcatataaatgcagttatacaatatgtggtcttttgtgactgactgctttcacttagcataatgttttcaaggttcacctatgttgtagagcatgtatcagtatgtactttgaattttttttgtttttgttttttttgagacggagttttgctcttgtcacccaggctggggtgcagtggtacaatcttggctcactgcaacctctgcctcccaggttcaagtaattctcctgcctcagcctcccaagtagctgggactacaggtgtgtgccaccacgcctggctaatttttgtatttttagtagagatggggtttcaccatgttgtccaggctgatctcgaactcctgacctcaggtgatccgcccacctcggcctcccaaagtgctaggattacagacgtgagccaccgtgcctggcctgtactttgaattttaagtaaaatatttggtaaagtacacaaaaatattggtgatagtttataattttctttgtaacaaaagtggatttgtaaaaatgttttgttaaaaacaatggtccagggaaaaatgcaaagaaaactgccttttttttttttttttttttttttttggtgagatgaagtcttgctctgtcaccaggctggagcgcaatggcatgatctcggctcattgcaacctccgcctcccaggttcaagtgattctcctgcctcagcctcccgagtagctgggactgtaggtgcacaccaccacgcccagctaatttttgtatttttagtagagatggggtttcaccatkttggccaggatggtctctatctcttgacgtcatgatctgcctgcctcggactcccatagtgctgggattacaggtgtgaaccaccgcacycggccttttttttttattttttgagacagagtcttgctctgtcacccaggctggagtgcagtggcgtgatctcagctcactgcaacctccgcctcccaggttcaagcaattctcctgcctcagcctcccgagtagttgggagtacaggtgcccaccaccatgcctggctaatttttgtacttttagtagagatggggtttcaccatgttgtccaggctggtcttgaactcctgacctcaggcaatctgcccacctcagcctcccaaaagtgctaggattacaggcatgagccaccgcgcccagccaaaaactgcttttctaagtgtatcagttgttcaaaggttataaatggtgaagttctatgtttaccatatgtgctatctaagcgtccacagatgcaaatctttcacccatatgaacaacagctaattcataaccttatttatgcagaacacagtagacaatgagaaagcaaacaaaagaggctgttctgctgcccaaatagttgtttcagagtcccttacctgaagcaaaggaaacaacagaatgaaaaggcagcctatggaatgggaaaaaaatatttggaaacaatatattttataagggattagttaccaaaatatatatcagatactcctacaactcagtagcaaaaaactaataatcatagcaactgtattagtccattttcatgctgctgataaagacatacccgagactgggcaatttacaaaagtaagaggtttttttttcctttttttattctttttttttttttttttgagacggagtttcgctcttgttgcccaggctggagtgcaatgatgcagtctcggctcatggcagcctcagcctcctgggttcaagccattctcctgcctcagcctccctagtagctggaattacaggcatgtgcaaccacacctggctagttttgtattttttagtagagacagggtttctccatgttggtcaggcaggctggtctccaactcccgacctcaggtgatccacccgccttggcatcccaaagtgctgggattacaggcatgagccaccgcgtccggcaaggaagaggtttaattggacttacagttccgcatggctggggaagcctcacaatcatggcagaaggcaaggaagagcaagttacatcttaacatggatggcagcaggcaaagagagagagtttgtgcaggggaactcctctttttaaaactatcacgtctcgtgagacttatttattatcatgagaacagcatgggaaagacttgctcccatgattcaattacctcccaccrggtccctcccacaacacatgggaattcaggatgagatttgggtggggacacagccaaaccgtatcaataacccaattaaaaaatggaagaaaacgccgggcgcagtggctcacacccataatcccagcactttgggaggctgaggcgggcggatcacgaggtcagaagttcgagaccagcctgaccaacatggtgaaaccctgtctctactaaaaatacaaaaagtagccaggcgtggtggcacacacttgtaatcccaactactcggggggctgaggcaagattgcaccactgcactccagcctgagtgaaagagtgagacagtgtctcaaaaaaaaaaaaaaagagaaaagtggaaaaaaagtctgaatagacatttctccgaataaggcatacaacaggtatatgttcagtgtcactagtaatcatcagggaaatgcaaatcaaaataagagtaatcacctcacacctgtcaggatggctgttgtcaaaaaacaaaagagctagtcctggtgaggatatggagaaaagagaacccttgaacactgttgatggggatgcaaaatggtgtagctactatggaaaacagtatggcgattcctcaaaaaattaaaaatagaattgccacagaatggattgctgaatagatccagcaatcccacctctggatattatccaaaggaattggaatcagaatcttgaagagactgggtgccgtggctcacatctgtaatgccaacattttgggaacccaaggcaggaggatcccttgagggaaggagtttgaaagcagccttgttgacatagtgagaactcatctctacaaaagaaaaattgaaaaactagccagcttggtgacacatacctgtagacccagctactgaggaggctgagacaggaggatcgtttgagcctaggagttctaggctgcagtgaaccatgatcgtgtcactgcgcttctccattctgggtgacagagccagatcctgtctcaaaaaaaaaaaaaaatctcgaaaagagatgaatgggtaaagaatatataatacatacccaaaatggaatattatccaatcttttttttttttgagacagagtttcgctcttcttgcccaggctggagtgcaatggcacaatctcggctcaccacaacctctgcctcccaggttcaagtgattctcctgcctcagcctcctgagtagctggcattacaatcgtgtgccaccacacccggctaattttgtatttttagtagggacagggtttcaccatgttggtcaggctggtctcaaactcctgacctcaagtgatccgcctgcctcgacctcccaaagtactgggattacaggcgtgagccaccacgctcggctattcagtcttgagaaagaaggaaattctgcagtatgcaacaacatagatgaaccttgaggatataatggtggttgccaggggctaggggaaagtgaaaatgaggagttgctaatcagtgggcataaggtttcagttaagcaagatgaataggtcctagagatatgctgaacaacatagtacctatagttaaccacactttattgttcacttaaaaatatgttaagaggttaggtctcattttaagtgttcttaccatgataaaataaaaaaaactttttagaaaatccctcacctgaagcttctgtacttttattattataggaactcctgacattttaagatgtgtttactggctgagcgcagtggctcacgtctgtaatcctagcactgtgggagrccaaagcaggcacatttcttgaccccaggagttcaagactggcctggggcatatggtaaaccctcatgcctacaaaatacaaaaattagctattggagaggctggaactataggcatgtgccaccatacctggctaatttttcgtattttttttatagagatggggtctccctatgttgcccaggctggtctcaaactcctgggctcaaggggtcctcccacctccgcctcctaaagtgctgggataataggcatgagccactgcacctggcctcctttccaacctgtatacattttacttcctttccttatcttactggattagctcggacttccagtacaacactgatgaggaatggtgagacgcagcatccttgtcttgttcctgatcttagtgggaaagcatctagtttctcctgattaaatatgatgttagatgtaggcttttgcagacattgtttaccaagttgagaaagttccctttctcttcctagttggtgggggttttattatgaatggttgttagatattgtctaatgctttttctgcatatgttgatatgattatattatttttcttctttaggctaatgatgtgatagattacatgaattaattttcagtgttaaaccactgcagcctcgcatacctaggataaatcctacacggttgtggtgtttacttttttatatacattgttgtattctgtttgctaatattttgttgagtatttttgcatatatgttcatgataaattttctgtagctttcctttcttgtaatgtctttggttttagtattagcatagtgttatcctcgtagaatgagttagaagtattccctctgcttctattttctggaagagattatagagaattggcatcatttctttcttaaatgtttggtagcattcatcagtgacatcatccagacctggtgcttctgtttcggaaggttatatattattgatttaattcccttagtatgcataagcctattcatattatctgttccttcttgtgtgtgttttgatagagggtgccttataataaattggttcatttcatctaagttatcaattttaggggcataaagcagttcttaatgcctttgctactcttttttcctgtgcctatacactcatcaaaagtgaaacaaacccattaccacctgttcaatggagccagagtgccccagttttctgaactgtaccttatatctcttattgtagttattttcttttttttttttaaagacagaatctctctttgtcgccaggctggagtgcagtgccgcgatcttgactcactgcaacctccgcctcccaggttcaagcatttctcctgcctcagcttcccaagtagctgggactacaggcacatgccaccactccagctaatttttgtatttttagtagagacggggtttcaccgtgttggccagatggtcttgatctcttgacctcgtgatccgcccaccttggcctcccaaagtgctaggattacaggcgtgagccaccgcacctggcctggtagatattttctttttttcttttttttttttttgagacagagtctcgctctgttgcccaggctggagtgcggtggcgygatctcagctcactgcaagctctgcctcccaggttcacgccattcttctgcctcagcctcccgagtagctgggactacaggcacctgccaccacacctggctaatttttgtatttttagtagagacggggtttcaccgtgttagccaggacggtctcgatctcctgaccttgtgatccgcccaccttggcctcccaaagtgctaggattacaggcgtgagccaccgcgcccggccttttttttttttttttttttttaatgtttttgtttttgttttgagatagggtcttactctgttgcccaggcctggagtacattgacatgatctcagttcactgcaaccttggcctcctgagctcagcctcccaagtagctggggctacaggtgtgcaccaccacgcccagcttattcttttctttttttatagagatgggatttcgccatgttgcccaggctggtctccaatcctgggctcaagcagttctcctaccttggcctcccaaaatgctgggattacaggcatgagccattgtgcctggctgtattttctattgtaactatttcctacgatacatctctactctactctactcttactatacatttccactccactccactccactctaccctgaacctcttataaacatagaccgtttcttactcgtcttcatatctccctgccacctagcatgtagtagatactcaataaatatttgagtaatttgaatgcacatgatgaagtttaatagaatttacacattaaataaataacatgaaggaatgaaatttcagctactctggatgctcagctttattggctttgtatttagtaattactaatggagcactaactaccatctgaacagaagaaacmgttaaataccagaaagcataaaatggttataatgatattactaatatttgagagtgtactgtgtgccagtatgtatactgatacttactatataccatgtttaggcttttatatatattttcatttaatcttcacaacaaccatgtgaaatgagtggtggtatctgtatttcacagataagcaaagcaaatcacatagaagttaagtttattgtccattgtcagtgtgactaaatgaaggcacttaaatacaaacagcaacacccagacttttagacaatatgctatactgctatgtgactatgctgattaaaggaaggggaaaatcactagtgttataagaaaccatcttagggtgtaactatttctatgtaagaggtatcatgtcattgctttggaaaaggcataatactttgtgatgatatggagtattttaagagtatatacgagaggactacctagggaaggaaaaaaatgtatacctaagttaaagcactgccctgagtatcggcattttagtaacaatatagtgatggccttttttttttttaagagatgaggtctcactatgttgcccaggctaaaatgcagtagttagtcacggcattctagtgggctcagtcacagcacactacagcctcaaactcctggcctcaagtcactcctcaagtgactacagacgtgcaccaccacgccaaggctcagtgatagctattctccatgacagtctagcatagtgattaagagcagagacattggtagcttgagttcagttcctagcactgcctcctagtagctttgtggtctctggcaaatttcttaagctttttcttcatctattaaatggggataaaaataatacctacctttagggtcattgtgaggatttgaatgagttggcacatgtaaggtacttagaatagttctttataagatgtcatggttaggatcacagacttgggagacagagtggcagcatggttagttaacagtatctaactttgccgggcgtggtggctcacgcctgtaatcccagcacttcgggaggctgaggcaggcggatcacgaggtcagatcgagataatcctggctaacatggtgaaaccctgtctctactgaaaatacaaaaaattagccaggtgtggtggcgggtgcctgtagtcccaactactccagaggctgaggcaggagaatggcatgaacccaggaggtggagcttgcagtgagccgagattgcgccactgcagtccagcctgggggacagagtgagactccgtctcaggaaaaaaaaaaaaaacagtatctaacttatatttcctggcacagtataagaggtataaaagtatgatttataatactttataaaagtattatttatagaatttgagaaatcgtatttctgtacttttataaattttcctgcatgatttcaaaagagaacaaccagaaaccatcttttcctggcaaacagaatcttagataatatttctttttcttttttctttttttttttttttttgagacagagtctctctctgtcgccaggctggagtgcagtggcatgatctcggctcactgcaacctccgcctcccaggttcaagcgattcttctgcctcagcctcctgagtagctgggactacaggtacgcaccaccacgcctagctaatttttatatttttagtagagacgaggtttcatcatgttgtccagaatggtcttgatctcttgaccccgtgatccgcctgcctcagcctcccaaagtgctgggattacaggcatgagctacctcacccagctgatatttcttctataaagaaataaaaatacaaaataaaaaccagtaaagtattaaactactataggctggatacagtggctcacacctgtaatgccagtactttgggaaacagacacgggaggattgcttgagcccaggagtttgcgataagcctggacagcatagtgagaccctttttctccaaaacatttatttatgtatttgctctgttgccaggctggagtgcagtggtgcaatctcggctcactgtgacctccacctcccaggttcaagtgattctcctgcctcagcctcctgagtagctgggagtacaggagcgtaccatcatgcccagctaatttttgtattttttgtagagacagggtttcaccacgttggccagaatggtctcaatctcttgacttcatgatcctcccgccttggcctctcaaagtgctgggattacaggyatgagccactgttcccagcctctccaaaacatttttaaaattcagccagctgtggcaatgtgtgcctgtagaaccagctacttgggggagaatcacttgagtccaggaggttgaggcagcagtgagctgtgatcatgcaactgcacttcatcctgggtgacagaatgagactctgtctcaaaaataaataaataaatcactataaataatgttttcagtgggaaatattctgaagtgtgcaaaggaacaaaaatgcaattgttcctgatgcattatcccctttagttcaaragtgttttctgttaccaaaaaaacgcatagtaatcccttttaaagtcattttgagccctttaaaaataacacatttttggccaggagcaatggctcacacccgtagtcccagcactttgggtggccaagacaggcacatcactggagcccrggagtttgaaaccagcctgggcaacacagtgaaatcccatctctacaaaaaattagctggacatggtggttggagcctgtagtcccagctacttgggggtctgaagtgggaagattggttgagccctggaggttgagactgtagtgagctgaaattgcgccactccactccagcctgcacgacagagagggaccttgtctcaagaaaacctcaaaaaacagaacaaaaacaccacacattttctactccagaccagtggtttttaacctagagagatttttgcccctagatgcatttggcaatgtgaagagatgtttttggttgttataacactggggattggggatggggcagggatgtgcatcctacttgttgtatctcatgggtaaaggccaaggatactgtttaacattctgcaacagtgatccccaacttttttggcaccagggactggttktgtggaagacagtttttccacggacctgtcaggagagaaggggagaaggggagatggttttgggatgattcaagcacattacatttatttgcactttatttctattattattacattgtagtgtataatgaaataattatacatctcaccataatgtagaatcagtgggaatcctaagcttgttttcctgcaactagatggtcccatttgggggcaatgggaaacagcgacagatcatgaggcattagagtctcataaggagcctgcaacctatatcccttggatgctcagttcacaggttcatgctcctatgggaatctaatgccaccactgatctgacaggagacagagctcaggtggtaatgtgagcgatgggagcaacagtaaatacagatgaagctttgcttgttcgcctgtcactcaccacctgctgtgcaacctggtttctgacaggccatgggcttaggggttggggatcccaatctccagtgcacaggacacctcatacagcaaagcattattcatttctaaatgttartagagctgaggttgagaaaaccatgctctggactaaaaaggggttaatgacttccccaaggttatattaacttaggagagggcctgaactacagacatgcacgtagcatctaagttcaatatccttaactagaacaaaataagtaaatttttagagacctaatagttaatagtgcctgtttttctttatcttgtttagggtttgtgaaacaggatctgataatcaacctcttggtaataatcaacaatcaaattgtgaatattttgttgatagcctttttgaggaagctcagaaggttagttccaaatgtgtgtctcccgctgaacagaagaaacaggtaaataaatgtctattacttttctttttytttcagtgtttctcaatatatggacctgttagagggtccctaaggtcaaaattgttttgtttgagacaaggtctttctctgtcacccagactggagtgcagtggctcgatcttagcccactgcaacctcaacctcctgggttcaagcagtcctcctgcctcagcattcgcaggtarcccggacctcagcacacaccaccatgcccagctaatttttttattcttttgtagagacggggtcttgctttgttgcccaggctggtctcaaattcctgggctcaagtagttctcctgccttggtttcccaaagtgctgggattataggtgtgaggccaaaactgttttcataatagatattgtttccctttttcactatgttcacaagctaggcacacctataatcccagcactttaggagactgaggcaggaggatcacttgagcctaggagttaaaaaccagtctgggcaataaagcaagacccatctctacaaaagaataaaaaaattaactgggcgtggtgccatgtgcctgtagtcccagcttcttgggaggctgagttgggaggattgcttgagctcaggagtttgaggctgcagtgagccatgaccgcaccactgcactccagcctgggtgacagagtgagaccctgactgataaggtaagggtaaggtaaggtaaaaaaataactgtgttcactttgcactgatattgcaaaagtagtggtgggtaaaactgcaacaccttagcaggaatcaaggcagtggcaacaaactgtgctagcagttactggttgaacatcccaaatccactgaatccaaaaatccaaaatgcttcaaaatccaacatgttttcagtgctgacatgatgctcaaagggatgcttattgggggcatttcagattttgagtcttgaatttggaaagctcaaccagcaaatatttcagaatctgaaattcaaaaccctctggtcgcaagcatttcagataagggatattcaacctgtactttattctttgcgtatacttccaaggggaaaaaaaaactaattttaattaagaatgtccttgatgcagtagaatttataaattttgtttcttgaccgggcgcggtggctcatgcctgtaatcccagcactttgggaggctgaggcgggtggatcacgaggtcaggagttcaagatcagcctgatcaacatggtgaaaccctgtctctactaaaaatacaaaaagtagccgggtgtggtggtgcgtgcctgtaatcccagctactcaggaggccgaggcaggagaatcgcgtgaacctgggaggcggaggttgcagtgagttgagattgcgccactgcactccagcctgggcgacagagctagacttggtctcaaaataaataaataaattaattaattaattttatatctcaaaccttgaatacacatggtaatattctgtgtgacaaaatgtgaagtatacataaagtatttctacaatatacagaagtgtctcaaggaaaggtgcagttatttgagatcaataaactgtctgctttttcatggcatattgtttctgcaagaaagaatggtttacatacagactatggatattccaactcactctgtcacccaggctggagtgcaatggcacgatctcagctcactgcaagctctgtctcccaggttcaagccattctcctgcctcagcctccctaatagctgggattacaggtgcgcaccaccatgcctagctaattttttgtatttttagtagagacagggtttcatcatgttggtcaggctggtctcgaactcctgaccttgtgatctgcccacctcagcctcccaaagttctgggattacaagcgtgagccaccgyacctggcctggtagatattttctttttttcttttttttttttctctgagacagagtctcgctgtgtcgcccaggctggagtgcagtggtgcsatctctgctcactgtaagctccgcctcccaggttcatgccattctcctgcctcagcctcccgagtagcccggactacaagcgcccgccaccacacctggctaattttttgtatttttagtagagacagggtttcacagtgttagccaggatggtttcaatctcctgacctcgtgatctgcccgcctcagcctcccaaagagtacttggattacaggcgtgagccactgtgtccagcctttttttttttttgagatggagtcttgctctgtcactcaggctggagtgcagtggcacaattggctcactgcaacctctgccttctggattcaagccattctcctgcctcagcctccccagtagctgggattacaggcatgcaccaccacgcctagctaatttttgcattttagttgagacggggtttcaccatgttggacaggctggtctcaaactcctgacctggtgatccacccacctcagcctcccaaagtgctgggattacaggcatgagccaccgtgcccggccctgcctggtagatattttctaataatgaatgaagtgagcctggcacttcaaggaaaacaacttatagtagctgttgaaaatgattaatttttttttttttttttgagacggagtctcgctctgtcgcccaggttggagtgcagtggtgcgatctcggctcactgcaagctccgcctcctgggttcatgccattctcctgcctcagcctcctgagtagttgggactacaggtgaccaccaccacacctggctaatttttttttgtatttttagtggagacggagtttcaccctgttagtcaggatggtcttgatctcctgacctcgtgatcygcccgcctcagcctcccaaagtgctaggattacagacttgagccaccgtgcctggccaaaaaatgataaatttttatttaaccaactttttttttttttattttgagacggactctcgctctgtcgcccaggctggagtgcagtggcgtgatctcggctcactgcaagctccgcctcccgggttcacaccattctcctgcctcagcctcctgagtagctgggactacaggcacccgccaccacgcctggctaatttttttgtatttttagtagagacaggatttcaccatgttagccaggatggtctcgatctcttgacctcatgatccgcctgcctcggcctcccaaagtgctgggattacagacgcgagccaccgcgcctggccttaaccaactttttaagtgaaaataagacttttagaaaattgccactataggctgggcttggtggcttacgcctgtaatctcatagctttgggaggccaaggtgggtgaatcacttgaggccaggagttcaagaccagcctggctaacgtgctgaaactctttctctactaaaaaatacaaaaattagctgagcttggtgatgcacgcctgtaatctcagctactcaggaggttaaggcatgagaatcacttgaaccagggaggcggagctcgcagtgaaccaagatcgtgccactgcactctagcctgggtaacacagcaagactgtctcaaaaaaaaaaaaagaaaagaaaaagaaagcaaccataccttgacagcttctcaaaacttaaggaatttcctagtgagattagtgtcattttgataaatataaatttttttatataattaaatgtgtcagcagttggaagatctgcataatcaagaaaaccagtattttccaaatgagcaatatatgatgttatacagtgatgcatgagtaaaagagccaaagaatcacatatactaaaagactttaacgtaacaagtatatgaaaagatggttggtaagtttcagattccacattcagattctcaactaacttttgagatactactactacttattacattttgaagaagtgtcaaagaagattatcctgggaaggctattaaaatacttctttttctaactacataactgtatgaggtttggttattaaaaaaaacatttcaatcaaaataacatgtcaaagcagactgagagcggtaccaattatgagaccccagctgattttttgacgtgagacattttaaaaagtrtttgtgaaaaatcctttcactctgattcgctttttaaattaaaacttaatctattagttgtgaaaggcttatgttgaaaaaaggcttatgttaaaaagcagacttattactccttgaccctagcatctactttcttttttcgtttttttaagatggcgtttcactactgttgcccaggctggagtgcagtggtgcgatctcatctccccacagcttccacctcctgggttcaagcgattctcctacctcagcctgggattacaggcatgcaccaccatgcctggctaatttgtatttttagtagagacggggtttctccatgttggtcaggctggtcttgaactcctgacctcaggtgatccacctgccttggcctcccaaagtgctgggattacaggcgtgagccaccacatctggccacatctactttccagaggcaacagcttataactcttagatatttctactgacatgagctttctgtttctgataatatgctaatagtgatagttattgatttttcagatttttgaattatgtattcacttcgtattatacataataaggatttagctctttttctaccttccccctctcctcagatcacctcttcccattcttctaacatagttgtgtcacaattggggattaaatcaattgttatttatatctgtaaaagtgtaaatactgtacagcataagcgggagctaccgcgcctggcccaccagttaaaatttttctaagggaagattgcggtgaaacccttcttccttcagtggattggttgtcgactaggggagctctactgctcttgctctggaatctatgatcctgagtattctctctcctgattactcaattctgtgcctcgcccaacatcgcytcccccttatattttaatgtttatgaagccagttgtagtagtccatttttacgctgctgataaagacatacccgagactgggaagaaaggaaatttaatttgacttagttccacatggytggggaggtctcataatcatggcatcagcaggagaaaatgagcaagaagcaaaagtggaaactcctgataaacccaccagatctcgtgagacttattcactatcacaagaattgcatgggaaacacgggcccccgtgattcaattacctcccccttggtccctcccacaacacacgggaattctgggagatacaattcaacttgagattttggtgaggacacagccaaaccatatcaatgattttgattttttgtggaaactgggtctcgctatgttgccagggctggtctccaactcctaggctcaagtagtcctcctgtcttggcctcccgaagtgctgggattacaggagtgaaccaccccacccggcctgaatagtgatagaagaaattttcaaaggactttcaatcctactacattttattaacatgacgcattttgtttcctactgttttgcaggtagatgtaaatataaaattatggaaaaacggattcaccgtcaacgacgatttcagaagttattccgatggtgccagtcagcagtttttgaactccatcaaaaaggggtgagtagccaggtgtggtaggtcaagcctgtaaacccaaaactttggcaggctgtggcgagaggattgcctgagctcaggagttcaaggccagccggggaacatagccagacctcatctctacttaaaaaaagaaaattaccagccagcccagctactcaggattgcttgcacttgggagactgaggctacagtgagccatgcttgcactactgcactccagcctgggcaacagcacgatgccctgtctccaaaaaaaaaaaggcgggggtcgggggggtgggggtgggcttggtggctcatgcctgtgatcccagcactttgggaggctgagatggggagatcacctgaggttgggagttcgagacaccagcctgaccaacatggagaaaccccatctctactaaaaatacaaaattagccgagtgtggtggcacatgcctgtaatcccagctacttgggagtctgaggcaggaattcacttgaacccgagaggcggaggttgcagtgggccaagattgcaccattgcactccagcctggacaacaagagcaaaactccatctcaaaaccaaagcaaaacaaaaaaaacaacgagctggaatgagtaatctttgtaatcagaagatattttaggcattgttttggtgaaagaatccattttaatgttcacacactccctacacattcacagatatactttttcttttgtacattcacatttttataagatgaattttcttaagagaaccacaactacaattttttttttcccgagatggagtcttgctcttttgctcaggctggaatacagtgacatgatctcagctcactgcagcctccgcctactggggtcaagtgattcttgtgcctcagcctcccgagtagctgagattacgggtgtgtgccaccatgcccatctaatttttgtattttttaataacagtttcaccatgttggccaggctagtcttgaactcctgacctcaagtgatctgcccacctctgcctcccaaattgctgagattacaggtgtgagccaccacgcctggccaacaaatataattttgaagaaagtttaggaacttgaattctgatcaacccaaatcttacttaaactaatttactttactaagtattttctaatacctcattttctttattatttaattttgtttaaatgtttaaatatctttaaagtctttaaaatggtcatggtagaagtctctctgaccctactctggcttgggaggctgcccgattcatgaataaaaattttaaaagaatctgccgggcacagtggctcatgcctgtcatcccagcactttgggaggccgaggcgtgcagatcacgaggtcaggagatcgagaccatcctggctaacacggtgaaactctgtctctactgaaaatacaaaaaaattagccaggtgtggtggcgggcacctgtagtcccagctacttgggaggctgaggcaggagaatggcttgaacctgggaggcggagcttgcagtgagccaggatcacgccactgcactccagcctgggcaacagagcaagactccgtctcaaaaaaaaaaaaattttgttttaaagaaaaaaaattgtagctgggcacgggggcttacgcctgtaatcccagcactttgggaggcggaggcgggtggatcacgaggtcaggagttcaagaccagcctggccaacatagtgaaaccccgtctctactaaaaatacaaaaattagccacgcatcgtggcrcgtgcctgttagtcgcagctacttgggaggctgaggcaggagaattgcttgaacccaggacgcagaggctgtggtgagccaagatcacagcactgcaccccagcctgggtaacagagccagattccatctcaaaaaaaaaaaaattgcaatgtttactatatatttatgaatctaagtattatacatgcttggtctagaaaatttttttaagtattaagaactcgaaaatcagccaggcatggtggctcatacctaatcccagcactttgggtagccaaggtgggtggatcacctgaggtcaggagttcaagaccatcctggccaacatgggaaaaccccatctctactaaaaaatacaaaaattagccgggcatggtagcaggcgcctgtaatcccagctacttaggaggctgaggcagggagaattgcttgaacccaggaggcagaggttgcagtgagctgagatcatgctactgcactccagcctgggcgacagagcgagactctgtctcaaaaaaaaaaagaacttaaaaatcacttataatttaaccactctgaagtaactgctgttaacatttttgttgaatttcattttatcattttctgtccatagatgcatatatactatgtgtacatttatttttaaaacaattttaaattcatcattataaaatatttgaatatatctgagtattattttatcacaacagtgccccgtaatttttatatatacttaattgttcttggcaacatagagttttttgttattatgttttttgaggctggagtgcagtggcacgatcatagttmattgcagcttcaaactccccgtctcaagtggtcctcctacctccgcctcccaaatagctggaacgataggtgtatgtcaccatgcccagctaattttttttaatttttagtaaagatgaggtcttgctgtgttacccaggctggtctcaaactcctgatctcaagcaatcctcctgcctcgatctgccaaattgcagggattaccagcgtgagccaccacgcccagccaagtattttaaattttaccactatgaaaaatatttttgactattttcttttatttatgtaaaaaaaaaaacccagctatgtttagatataattaacctaccataaaattcatccctttgaagtatatagttaagtatttttaatatgtctacagttttacaatcatcagcacaatctaatttcagaatatcattattgaaaaagccgaatatattgctgaaagaaaaaaaaatcagatactagaagtcactctccattttcccctgcagccctaacataaccatgaatctactttctgtctatctctatggatttctgtcactatgtatttacctgttctactcattttcacattttgggctattatgaataatgctactatgaacatttatatacaagtttttgtgtggtcatatgttttcatttctctcaggtataaatctaggagtggaattgttaactcttatattaactttatgaagaactgcccaaatgtattccaaagtgactgtaccatttaacatttctaccagctatgtatgaggcttccagtttttccacatcctaacacattagcttctgtttttttaaattatagccattttagtggttgtaaaggggtatgtcattctggttttgatttacatttctctaatgaccagtgatgttgagtgtcttttcatgtgcttattgtccattcgtacatcttctttggagaaattcctgttcaaatcctctgtccagtttttttatttgtttgtttgtttgtttttttgagacagagtcttgctctgtcggcgaggctggagtgcagtggcatgatctcggctcactgtaacctccgcctcccaggttcaagtgattcttctgcctcagcctcccaagtagctggaattacaggcatgtaccaccacatccggctaatttttgttttttagtagaggcagggttttaccatgttcgccaggctggtcttgaactcctgatctcacgtgattcacccgcctcggcctttcacagtgctgggattacaggcatgagccaccgtgctcagcctgtttatattttcaggtggtttatttgcctttttgttaagttgtaagaattcttcattttttctgaatacaaattccttatcagatacatgatttgcgaatattttctctcattctttgagtgccttttaactcaaacagaaaaaaataaaacaattacctagaattgctatatgtatacagtggtatttattcactaaaatattttttaaactttcttattgaagtatggcttatatacacaaaggtacaggccaggtaggccaggtgtagtggttaatgcctgtaatctcaacaccttcggaggccaaggcaggaggatcatttgatcccaggaattaaaccagyccggccaacatagcgagaacctgtctctacaaaaaaaaaaaaaaaaaaacctaaaaaaatcacccgtggtggcacacacctatagtcctggctacttgggaagctaagatgggagaatcgcttgagcccaagaggtcgcagctgcagtgagccatgttgttgccactggactccagcctgggcaacagagtgagctcctatctaaaaaaaaaaaaaaaaaaaaaaaaaaaaaaatagaaaagtgcagaaatcataaatatatactaaatgaatttgtattatttccgttttcagaataaatcaactactttattagaatttgttaaaatttgtcctttggccgggcgtggtggctcacacctgtaatcccaacactttgggaggctgaggtgggcagatcacttgagcctaggagctcaggaccagcctgggcaacatggtgaaaccccatctttacaaaaaatacaaaaattagccgggcatggtggcctatagtccccgctactcaggagtctgaggcaggaggatcgcttcagcccaggaggtcaaggctgcagggagccatgattgcaccactgcactccagcctgggaaacagaatgagaccctgtcccaaaaacaagaaactcaaattatttatttaacagagatatccagtcttttggcttccctgggccacattggaagaagaatggtcttggggcacacataaaatactaaaatacactaatactgacgatagctgataagctttaaaaaaattgcaaaaaagtctcataaatctcataatgttttaagaaagttttccaggcacggtggctcacacctgtaatcccagcactttgggaggctgaggcgggcagaacacaaggtcaggagatcgagaccatcctggctaacacgatgaaactccatctctactaaaaataccaaaaaaaaaaaaattaactgggcgtggtggcaggcgcctgtagtcccagctacttaggaggctgaggcaggagaatggcgtgaacccgggaggcggagcttgcagtgggccgagatcgtgccactgcagtccagcctgggcgacagagcaagactccgtctcaaaaaaaaaaaaaagtttacaaatttttgttgggccacatttaaagccgtcctaggccacagattggacaagcctggtgtagtatatagtcatcaagtatttcatgactttagtactattttaggtactgctataaaactcatgctggttggggggcagtggttcacgcctataatcccagcactttgggagkctgagggaggaagattgcttgagcccaggagttcaagaccagcctggacaagaccctgtctctacagaaaatttaaaaaatatatgctttcacaataaaaaataataaaaactgatgctgttcatgagcttatggtcttaaaaattatattcctgtgggtttttggtattcatattatttaactacattgttttgaatacatttagttatttcattgtatagaatattatatatttctgtatatttctacatattcattttttgtatgtacagaatgtttttcagagaaataaaatacattgggagctttatcattttctttctttgttttccaagggaattaccttcagaattacagggaatttttgataaagaagaggtggacgttaaagttgaagacaagaaaaatgaaatatgtttgtctacgaagcctgtgttccagcccttttcaggacagggtcacagactaggaaggtaaatatgcctattgtcttgttttgcatagatcaaggcttaactaatattctgtctatcagtattttacccatgtagaccacatgaatggagcttatcatttctcccattggaaatcagattttttttaatgttaatttttatgaggacacataagtcatagttacctaagtatatattaacaatgcctggccaggcatagtggctcatgcctgtaatcccagcactttgggaggccaaggtgggcggatcacctgagatcgggagttcgagaccagcctgaccaacatggagaaaccccgtctctactaaaaatacaaaaaattagccaggcgtggtggcatgtgtctgtaatcccagctcctcgggaggctgaggcaggagaatcgcttgaacctgggaggcagagattgcggtgagccgagatcgcgccattgctctccagtctgggcaacaagagtgaaactctgtctcaaaaaaaaagaaatgccagcaatacagtaaaaaatcatgcaggcttttttgtttttctttttttcaaatcaaaagggcttggcttattaaggacagaattcaatagttaagttcttttgtgtcccttgcactcaccactgtagagtacatgtactagcttttgaatattattgttctcttttttttgagacagagcctcactttgttgcccaggctggagtgcagtggcatgatcttggctcactgcaacttctgcctccctggttcaagcaatcctcctgcctcagcccctctagtagctgggattacaggcatacaccaccacgcccagccaatttttgtatttttagtagagacagggtttcgccatgttggccaggctggtcttgaactcctgaccgcaggtgatccacccacctcggcctcccaaagtgctgggattacaggtgtgagccaccgcacccagcctattgttctcttttatggttaccactgtctgcaacattttgttctgtgatctatgtatgaattttgaggtaataaaaatgaaaatcagtgtcagtatcaaagccttaaattattttcaagttttacagtttccatcctatctaacagaatatgcagagagattatatagatatgagagctctttgatttttataaattctcatattttaaattatcaagattggtaaggtgcatacatattcatccacacatacaaatatatctggatgcatccttcagaatgatcaggaagtactttatttagtttctttttcattataacctaaggactaagctcaataaagaacttataatttcttctagaaatttaacctgggcagtaggtaaaggtaaagtccatagatctatgaaccttctttaaaattatccattctgtaaagcactactcaaataataccagtaataatatatgtagcttacaaattactcagatatgtataacttcatcagattcttagaaccatcatatattgtggacataaataatatatctttctgttattactgaagaaacacatataacttaaaaaatcttccttaaagttatacttgctataatatttttatagtaattatttaataataaagttttattgaatggaaaaaacgtctaactttgttgtctggatttccttagtgccacaccaaaaattgtttctaaagcaaagaatattgaagttgaaaataaaaataatttgtctgctgttccactgaacaacttggaacccattactaatatacagatctggttggccaatggaaaaaggattgtccagaaatttaacattactcataggtgagtcttcaatttcagtatttgatattttttcaccaagttaaaatttcattttttctttttggttcagtcaacagtttattttttagagatagaatctttctttgttgcccaggccagagtgcagtggcacagtcatagctcactgcagtcttgaagtcctggattcaagcaatcctcccacctcagcctcctgagttgtagaactacagccacatgccaccatgcccagctaactttttttttttaatttttatttattgccagctaattttaaaaattgttttgtagaaagggagtctcactgtgttgcccacactggtctcaaactcctggactgaattcatcgtcctgccttagcctgccaaagtgctgggattacaggcatgagccatcgcatcctgccaagcattttatttatttatttatttttttgagtcggagtctcgctctgttgcccaggctggagtgtagtggcacgatctcagctcactgcaacctctgcctcccagcttcaagtgattgtcctgcctcagcgtccaatgtagctgggattacaggtttgcaccaccaagcccggctaatttttgtatttttagtagagacggggtttcaccaggagtttggccagggtggtctcaaacttctgacctcaagtgatctgcccgctttggcctcccaaagtgctaggattacaggagtgagccacctcgaccagcctggccaaacattttaataaatagttctctaaacataattatgtctagacagtttttttttttttttgaggcaaggtctcactctgtcacccaggctggagtagagtggcgcgagccaccgtgcccagctgataatgggtatttttaaacattgaatgaggtaggccaggtgcaatggcccatgcctgtaatcccagcactttgaggggccaaggcaggaggatcacttgagctcaggagttcaagatcagcctgggccatatagtgagacctcgtgtctacaaaaaaatttttttaaattagctgaacatggtgatgcacatccgtagtcccagctacttgggaggagaattgcttgagcccaggaggtagagactgcagtgagccgaattgcaccattacactgcaagcctgggtgacattgagaccctgtctcaaaaaataaaaataatcataacaataacagtaatgaagttggccgggcacggtggctcacacctgtaatcccagcactttgggaggccgagacgggtggatcacgaggtcaggagatcgagaccatcctggctaacacggtgaaaccctgtctctactaaaaatacaaaaaaaattagccgggcgtggtggtgggcgcctgtagtcccagctactctggaggctgaggcaggagaatggcgtgaacccggaaggcggagcttgcagtgagccgagattgcgccactgcaccccagcctgagcgattgagcaagactccatctcaaaaaataataataataataatagtaataataatgaagtattttcagtctgttttaggattttcattctcatcatttgattcatttttctgtttaagtagatgcataattataaaagaattatttttaatgttttaaattagtcattagcattatatgcatatccttctgtcaattatagtgaaagaatgaaaatacagaaaaacattaaaagaaattgaagttaatatgaattccaccactcagagataatcaatagtatcagtttgatgcatttttccagtcttttatctcttcctaaaagctttttttttttttttgagacggggtcttctgccacccaggctggagtgcagtggcacgatctcagctcactgcaaccttcatcccccgggttcaagcgattctcctgcctcagcctcctgagtagctgggattacaggcacgtgccaccatgcctggctaatttttgtatttttagtagagatggggttttgccatattgcccaggctggtctcaaactcctgacctcaggtgatccacccacctcggcctcccaaggtgctgggattacaagcatgagccaccgtgcccagccttcttaaaagcttttttttggctgggtgtcgtggctcattcttgtagtcccagcaatttgggaggctggggactattcaggaggctgaggtgggagaatcacctgagccccggaggttgaggctgtgatgagccatgatctcaccactgtaccccagcctgggtgacagagcaagaccctgtctcaaaaggaaaaaaaaaaagtttgttttgttttaattaaaaatagaaacatgtcatatatagcatatgtaatttttctttttttaaaaaaattttttttcaggaaatgtggtacagataaatamcaaatatagggagagagttaaaagaataagaataaaatacatatgtaccacctacctcaaaacatagattcttatcagtataccttatgtgtctttctgtgatcatgtctcttcttctgtggaagaggtaaataaccactgtcctaaatttgtgttgataatttgctgcttttatttatagctttacctagtatatatgtattgctaaaatagactaaattgttttgcttatttccaaataattactctgaatttcaaaccagcaaaaacttacagaaaaaggacctggcacggtggctcacgcctgtaatcccagcactttgggaggccgaggtgagcagattacgaggtcaggagatggagaccatcctggcaagcacggtgaaaccccatctctactaaaaatacaaaaaattagccgggcgtggtggcaagtgcctgtagtcccagctactcgggaggctgaggcaggagaatggcgtgaacctgggaggtggagcttgcattaagccgagatcgcgccactgcactccagcctgggggacagaacgagactccatctcaaaaaaaaaaaaaacaaaaaaaacttacagaaaatgttcaagarcaatataaagaacttttcttggccaggtgcagtggctcacgcctataatcccagcattttaggagaccgaggcaggcagatcacaaggtcaggagtttgagaccagcctgaccaaaatggtaaaaccccatctctactaaaaatacaaaaaattagctggccgtcgtggcgtatgtctgtaatctcagctactcaggaggctgaggcaggagaatcacttgaacctgggaggcagaggttgtagtgggctgggatcgtgccactgcagtccagccagggtgacagagtgaggctccatctcaaaaaaaaaaaaaaaaagaaagaaaaaacttttctccctaagcattcaagagttagtgccagtctgatgacccatcacttgaaatacttaggtatagattatctgtaaacaaggaacttctcccacataaccacaatacagccatttaaatcaggaaacttaaccttaatacgcttgtatcgactaatagaccctaattcagggttttccattttatctaataccttcctttatagcaaaaggccattcagaattacacattgcacttagttgtcgtatctcagtttgaaatagttccttgtcttcctttgatttttataaccttgactttttaaaatattacaagccaatttgttttgtttgatgcttcctcatgattatatttaggtcactaattttggcaggggtgtgacagaactaatgctttgtacctctcattgtattccaacaggtggcatcatttacatttgtcccattatgatgatgttaaatttgacactcgattaaagtggtgtctaccagagtcctttactgtaaagttactcattttccctttgyaattaatctgtatttagtgggaaggactttgaaataggatacttatgttgctcacaagacctcagattgattgattgattgatttgtgtctatacctactcatagtttgctattttattcaatagtttatgaactcttaccatcattatttattttgatatgcacattgtctcaggtacagtttgtgagacgtcctttaaactgattcctgtgttattttgaaatggtcccataattcttgaacatttccttgttttcagcacaaaattttttttcaagttcattctacgcttttccaggaatccctagttctttttagtggacagcggtattgacaatccaggatctgggtactagatatgcttattgcttatcaggataccactgcttccaggccctctgtttgaaaagaattgtttgtgtgcacacgcacacacacacacgccaaaaagaaaactatttcaaaaattgaagaggggatacttccagactcattctatgaggccagcattaccctgataccaaaatcaacaaagacacacacaaaaaacctatacatatacatatgtgtgtgtgtgtgtgtgtatgtatatatatgcacttaagtttatatctgtatttattcctttttttttttttttgagacagggtctcactctgtctcccaggttggagtgtagtggtataattacagatcactgcagcctccacctccccagactcaggtgatcctcctcagtttttatacttttaatagagagggggtttcaccctgttgcctaggctggtctcaaactcctggactcaagcgatccacctgcctcggcctcccaaagtgctaggattacaggcatgagccaccacacccggccttatttctatatttttatatatcaaaaaccgtgaatccacgtagatacatccactttcagtctggtagggccaggcgtggtggctcatacctgtaatcccagcactttgggaggccaaggcgggcagatcactggagcctagcagttcaaaaccagtctgggcaacatggtgaaactctatctctacaaaaaacacaaaaagttgccagacgtggtggcactcacctgtggtctcagatactcgggaggctgaagtaggaggatcacctgtaccctggggaggttgaggctgcaataagctgtgattgcaccactgcattccagcctgggcaatagaaccagaccttgtctcaaaaaatatctatataaggattgttctaattttctcctttccatatttgtaactaacttctacagtgcaaggcctggctccagttataattaacacatttatttaatcagttttcctatatgtgaccaatgtcctttttccactgctgcctcctaccccacatgtaagccttcctcacactgcttgggctttgactctccttgttgaattccaatatggattccctcctcttcctgctaggctctctgacacatcatcaccccagggcaccccttcactggaatgccctctcacactgcttgacttgaggactctatgccagtgacctcctctgcttggtagactgacattctgggctgcctctaagatgctctcctcaccactgtctggttctgacacactgcagtcaactgctcttccatatgaatgcttttttactctgcttgggacaacctgctctgttgtgatttttactgggcaatagctgactgattcagccatgtaaacttggactgttacccataaaggtagactgaataattatttttataatggaagacagtaatcaaaaaatatttgcagctgggcgtggtggctcaggcctgaaatcccagcactttgggaggccgggggggcgggggggcggatcacttgaggtcggaagttcaagaccaacctggccaacatggtgaaaccccatctccacaaaaaatacaaaaattagctgagtgtggtggcccactcctgtaatcccagctacttgggaggctgaagcaggagaatggcttgaacccaggaggtggaggttgcagtgagctgaaatcacaccactgcactccagcctgggtgacagagtgagactccatctcaaaaaaaaaaaaaaagtatttgctatggctgcacacataaacatggatgagtcccaaaaacataatgtagagataaagctatagaacacatacactatgattccattcatgtcaggtttaaaaaagtaaaactgtccttaaaagctactaagccatgactactcttctcctacccaccagcttggatatttttcctcaccccacttggcctctgacatcctacactagacagctcttatatgggccaccacaactcccagcatttctgaaatagatgcctcccatgttctgtcctactaatggcttggtggcttttggactgaatcattaaaaaattgtgtttttcttccgttttttctgcttattttattagttaccaagaaagttgtgctaaaatctccaactatgattatggatttgtctatttcttatttacttctgtcaatgtttgctttatatattttaaagttatataattgggtccagcagagatgaaattgtgtttttctgattaattgactttgttggggagaaaagattttcttcgcccattgcctagattcatggctgagacccctttaacaaaagacagattaacaaaagaaatgcatgtgattttatattttattttatacacacacacacacacacacacacatatacatatatatatattatatttttttctgtcttttttgttttgttttgtttttgagatggagtctctctctgttgcctaggctggagtgcagtggtgtgatctcggctcactgcaacttctgcctcccaggttcaagcaattctccctgccccagactcctgagtaactgggatcacaggcgcctatcaccacacctggctaattttttttgtatttttagtagagaaagggtttgccatgttggccagtctggtctcgaactgctgatctcaggtggtccgctcaccttggcctcccaaagtgctgggattacaggcgtgagccacagtgcccggccttttttgttttttgtttgtttgttttgttttgtttttttgagacagtctcaactctgttgcctaggctggagtgcagtggcatgatcttggctcattgaaacctctgcctcctgggttcaagcaattctcgtccctcagcctcccaagtagctgggattataggcacctgccaccacgcctggctaatttttggggttttttgttttgttttgttttttgagatggagtcttgctctgtcgccaggctggaatgcagtggcgcaatctcagctcactgcaacctccgcctccctggttcatgcgattctcctgcctcagcctcccgagtagctgggactacaggtgtgtgccaccatgcccagctaatttttgtatttttagtagagatggggtttcaccatgttggccaggctggtcttgatctcctgacctcatgatcctcctgcctcggcctcccaaagtgctgggattacaggcatgagccaccgcgcccagcctaattttggtatttttagtagagacagggtttcgccatgttggccaggctggtcttgaactcctggcctaagtttgatgaggaagtggatagtttgtggagaagtatgattggagggcaaaaggggtatgatctaatggtaataaattaaggggaacttagcttagcctgttcgttcagattcttcgtggcatctctgcatcttcaaggataaggttgttcctttcctctgggtatacgaacaatacctcggaaakgaaggttttatgacctacttcagaggaaggacagataatttcttttttggtctgctttgaggggagaagggcaaggggagaatgagactgatctacctgtttctgctgtttcctcaaatgccaaggtgccatattttagggtagcatatcttgaaccctgtcaacctttttagcactgtcacatgtctctctcaatccttggtaatgctttttgtgttaaatctactctgcctgatattaatatggtcataacagcttccttctaattagtatttgcctggtatatttttctacttacttttaatttcaacgtatctgtatatatttatctgtgtgtgtatttaaaactatctcttgtaaatagttgagttttgtttttaaatctaggctaacagtattagtttctggttttgtggggttttttcctcctgttttactctgcaaggaggtttctgttttgtggatttctttagctaccatctacctggtgctttctatgtgtttggctctcttgaaggcatttcacttttatttctgtcaaaaccattctagacagctggaatcacacaactgattatcataataatagaagaagcacaagtttgaaattgtgtcctggaatgttcttttgtgacctaaattccttccaaatgaagaggagagcaaactaaagatgtagaaatgggaatggggatttgttattctggcccaagcttatttgtttatcttcagggaaataaattttaatcttgacttgtttatctaggtgaataacaatgaaacacgtagctttttttccccctaaatgactgaagcgtttaaaaatttttggccaacagcatttatttagtaatgattaatcaggctttttcttttctgttttaaatatataatatattttggtagagacagggtctcacctgctgggattataggcttgagccactgcccctggccaacaatttcactctgttactctcttcctttttgctatttttgtcaacaaatatgttacttctacgaacattttaacaaccctcaaaatgctattacttgtaaacaatattcacttatatatcattttactttttctgttttttacccagtttgatgttttagcctgaacaattatgcttagtatctcttaaatttttttaattttttaattttttttttttttcaagacagagtcttgctctgtcacctggttggagcgcagcggagtgatctcagcacactgcgacctctgcctccctggttcaagcaattctcctgtctcagcttcccaagtagctggcattacaggcatgcgctaccacacccagctaatttttgtatttttttggtagagacagggtttcaccatgttggccaggctggtctccaactcctgaccttgtggtccgcctcggcttcccaaagtgctgggattacaggcgtgagtcaccgagccctgcctttagtatctctttaattgcttatctactaatgatgaattctcttagctttgatttgaacacatcttcatttttaaagaccattttcactaggctagaactgtcaggtttttctagcacatcagctcttaagaatgcccatatgttgtcttccagcttccactctcctactcaaaaatcagctgtcagcctttttcttgctcttttgaaagatattaagtcttttttcctctcagtttaaaatttttctctttgttcttagattttaatagcttgaatatgatgtgcctaggtgttagttatctttgcattatattgcttagaatttgctgagtttcttggatccatagttaaggttttttgtcagtttggggagtttcttggccagtattgatggaaatgttctcgtattttattctcttttgtctttggcatttgtggctttatttacatgtatgttagatgttttcagtgtatcttatattcttttctaatttttttcttctttttccttctgattcagtctgcatattttctatttgacctgtcttcgagttcagtaatctgttgtattggtctggtctgttaaatacatgtgttggaattcttactttcaattctactgtcacttgtagacttttcatttgagtctgttatttttcaggtgtctggtgaaattcctcatctttttattttatctgttgcttcttctggattttagcataccttataattcatctggtcattagaccttgtttatggaaacattgtagacgtttcagatgacatcatcttcctccaaagatacctatgcttctatcagacagattcctaatggattatgttgattttattaagagttagttggattgactgtagactttactggggctggttggttatctgttttgcttttagagcatggacttgaaccttagggtctgacccttagaagtggtgaaaacctgggtgtttaccaagactcctccacattggcagagcttaaactctagagtctgtgtgcccagcattttggagctgctagaatctctcctcagtcgctgttttctgttgggttctttgaattctcattctactaatagctgaggagttagccaataacttaagaatttgttacggttttctggtcacgtttctttatgggtccctctgtttcaggattttggcttataaatcccagcttcttgtctctccttggtgtagtgaaatggcttttttttttccctctaattcactgctacaaattggaaagtgccctcagtgaaaaaaccagtgtaaatgtggagctcaccttgtgcatttccttcctacagggctctcagatgatttacattggttggtcttcagtgctttcacatagcgcttttatgtttagacgctccttgacttatgatgtaatgtcccaataagcccatccacgttgaaaatgcatttacccagcactttgggaggctgaggcgggcggatcacgaggtcaggagatcgagaccatcctggctaacatggtgaaaccccggatctactaaaaatacaaaaaaaattagccaggcgtggtagcgggcgtctgtagtcccagctactcgggaggctgaggcaggagaatggtgtgaacccagggggcggagcttgcagtgagccaagatcacgccactgcactccagcctgggcgacagagcaagactctgtctcaaaaaaaaaaaagaaaagaaaaaaaaaagaaaatgcatttaataccctgatgaacccattgtaaagttgaaaaatagttacgtcaaagcattttaagtctgtatattgtccagcttttatagcaatatttttaggagcactacttcaataaaagccatttcatcaatgatcaaaacaaaatcctcttattgtctttttattttttatttatttgtttttttgagatgaattcttgttctgtcacccaatttggagtgcagtggctcaatctcggctcactgcaacctgcaccacctcccaggttcgagcaattctcctgcctcagccttccaagtagctgggattacaggtgtgcgtcaccacgcctggctaatttttttttttttttttttgagtcagagtcttgctctgtcgccaaggctggagtgcagtggcatgatctcggctcactgcaacctctgtttcctgggttcaagtgattctcctgcctcagcctcccgagtagctgggactacaggcgcgtgccaccatgcttggctaattttttatatttttagtagaaacagtgttcaccatattggccaggctggtcttgaactcctgaactcaggtgatctgtctgcctcagcctcctaaagtgctgagagtacaggcatgagtcaccatgcccagccctcttaatgtctttttacactctgctgaatctttagttatgctgcatttgcattcctattgttgttcaattatgccttctctttttctgttttcttttttctttttctttttcttttttttttttttaagatagagtttcgctcttgttgcccaggctggagtgcagtggcacgatctcggctcactgcaacctccaccttacggtttcaagagattctcctgcctcagcctcccaagtagctggaactacaggcgcctgccaccatgcccagctaatttttgtatttttagtagagatggggtttcaccatgttggtcaggctggtctcgaactcctgacctcatgatctacccgcctcagcctcccaaagtgctgggatcacaggcatgagccaccatgcccagacttttttttttttttttaataagagatggggtctcgctatgttgcccaggctggattggcagggctattcacaggtgcgatcccactactgatcagcacaggagtttttacttgctcaatttctgacctgggctggttccccccaccttagggaacctctttcacctggagttcaccatattgattccaaagttactgcgagcacctgattgccatagcacactacagccccggaaatcctgggctcagggaatcctcccacctcagcttcccaagtagctgggactatacgcatgtgccactgcgcccagtgctgttttcttttttatttagagatagggtcttgctatattgcctagattgatctggaattcctgggctcaagtgatcctcctgctttggcctcccaaagtcctgggattacaagtgtgagccagcctatttttcttgataaatcttgtcagatttgttcatttttattagtctctttaaatactaactttctgcttagtcaattctatttctgaaaatacctttatactttcattggatttattttcttcttttggtaaattagatgttaaggctgtgataaaatagcaatttacataagcacatctgatttcttatatctctggatttaagaatgtcaacagtctaaagcctttatttatttatttttatttatttatttttgagacggagtcctgctctgtcgcccaggctggagtgcagtggcgcaatctcggctcactgcaacctctgcctcccaggttcaagcgattctcctgcctcagcctcctaagtacctgggactacaggcaccaccacacccagctagtttttgtatttttagtagagacggaatttcaccatgttggccaggatggtctcagtctcttgatctcgtgatctgcctgcctcggcctcccaaagtgctgggattacaggtgtgagccaccgtacccggcctctaaagcctttatatattgcatttgttttgattttattagttttgccagaactttattttaatattttcttttttttttttttaagatggagtcttgctcttgtcacccaggctggagtgcagtggcgtcattttggctcactgcaacctcgcctcctgggttcaagtgattctcctgcctcagcctcctgagtagctgggattacaggtgaccaccaccacacccagataatttttgtatttttagtaaagacagagtttcactatgttggccagactagtcttgaactcctgacctcaggtgatccacccacctcagcctcccaaagtgctgggattacaggcgtgagccaccacacctggcctattttaatattttctaacttaatacataaatatagaatatctctcaacattgttttttgtttctgtcatttccactttctagtttttggttgtcatcatcattgatacatgagctttttaatttatttttcactcatccaatatttattgtatctctgataggtacttttctaggcaccaaggatgtatctatgaacagaaacagaaaatacttgttttgtgtaatttctagtcaggagagacagaaaataaataagtcatataatatttgagaagacacatttgaaaaatataaaagcagagaagaataatgggtaagaatcttggctgggcacggtggctcacacctgtaatcccagcactttgagaggcttaagcgggtggatcacctgaggtcaggagttcaaacaagcttggccaacatggcaaaaccccatctctactaagaaatacaaaaactagccggatgtggtggcaggcgcctataatcccagctactagggaggctgaggcagggagaattgcttgaacccgggaggtggaggttgcagtgagccaagatcacgccgctgcattccagcccaggcaacagagctagactccatctcaaaaaaaagaaaagaatctttttttttgagacagggtctcaccctttcatccaggttagggtacggtgacatgatctcagctcactgcaaccttcgtctcccgcgatcaaccttcgtctccctcctcagcctcccgagcagctggacctgtcttttaagtccacactccaatccttccacctccagcaatctttccccagttcttttaacctttgttttcttgctttttatatttatgttctttgacataagctttaacctttagttatccaatttttggtacccaaatgaatacacaggactgggtcttagacttttttggtagcccttacaggtttaataaagtggcacgtagtgaattttagtgaattgattgaatgagagaattctttctttagtgataggcatatttcattaattctgagttgcacattttttcacattttagcatctgtgaaatgaggatgcattctataatccatggctacatgacgatcatgatacaattgtgacagcctctgtaaaacatagccataattcctttgtcttacctaagataattaacagtagtaattcatagtactaattatcttacctaagataattaacagtagtagtagtattgtcatcaaatttctgggagtcaaactttaaaagatagcccaaataatcagttatatcataaattcagttattctatatattaacatatccagagtctgggtgttgtggctcatgcctgtgatctcagcactttgggaggctgaggcaggaggatcagttgagcccaggagttattatgatggcaccactgcactgcatcctgggtgacaaagcaagacgctatctctaataataacatatccagatacttttaccagttgttgttactataaattaggtaattcaaattttcctaaaattatattaatagtttttgctgttttacagagtaagccatatcaaagacttcattgaaaaataccaaggatctcaaagaagtcctccgttttccctggcaacagctcttcctgtcctcaggttgctagatgagacactcacactggaagaagcagatttacagaatgctgtcatcattcagagactccaaaaaactgcatcttttagagaactttcagagcactgatttttgatagactaagtggaaaatttgcagagaaatgatggttgtaagtggacatgcaaaccaaaattggggattggagaagtcagactcactagacttttggttcgagtactattgaactctctcctgatgagaagatgtttagataagtacaagttaagaaagtagcatatgactggaaactatattcagtgcactttctccraaagactacccagaaaaatagacttattttcaaataccagttatcaagatatattaaatagctgtattgtttagaatcttaatatgrtataaattagcatatgtattcacaatattcattcagacatcattcccagacagcagggatttatttaaatgttagctgtctgagtttttaaatagctaatacgaccgggtacagtggttcatgcctgtaatcccagaacttcgggaggccgagacaggcagatcacgaggtcaacagattgagaccatcctggcaaacatggtgaaaccccatctctagtaaaaatacaaaaattagctgggcgtggcggtgcgcaactgtagtcccagctactcgggaggctgaggcaggagaatctcttgaacctggcaagtgtaggttgcagtgagctgagattgagcaactgtactccagcttggcgacagagcaagaccccctctcaaaaataaataaaataaagtaaaataaatataaataattgtggccgggtgcaatggctcatgcctgtaatcccagcactttgggaggctgagatgggaggatcacttgaagccaggagtttaaaaccagaatgatcaacagagtgagacccctgtctatatatttttttaatttaaaaaataaaagaataaaattgtgtagctcagtatagtatcaagattaatctgcctactcacatttctacactttataaaaatgtaataaaagaaaattatctttctaaaaagcctattccctttccattttattttctttcaaaaattatggatttgtttttggctaacatttgggattagccattcatttgccaccactcacttagaatataatgccggtgtgtgtcacattactagtattttttaaatgcatcatataaagtatggttttctgtttctttttcgtttgtttgagatggagtttcgctcttgttgcccaggctggagtgcagtggcgcaatctcagctcaccacaacctccacctcccgggttcaagagattctcctgctcagcctcccaagtagctgggattacaggcatgcgccaccatgcttggctaattttgcatttttagtagacacgggatttcaccatgttggtcaggctggtctcgaactcccgacctcaggggatctgcctgcctaggcctcctgaagtgctgggattacaagtgtgaaccaccgtgcccagctggttttctgtttcatacatcagagtcaacttgtgaatacatttaaagattatttcattttgatatcacgaagaaaaacaggctttatatctcagactttaactaaatccagttagacctcaatttttcactgtcagattaaatccccatacctgaaaataagtttaacatttttttttgcaaatgatctattgaatcagatttaaaatgaagcatgcattgagtgtgccaaggaactaagtggtccatagcagcagtaatgttcatagggtgcgagatgcctgctatgaaacagcaactctcaaacatttttatctcaagaccatttgtttatgtgagctatatatattattatattaaatattaaatttttaaaatatttatttatgggccaggcacggtggcttacgcctgtaatcccagcactttgggaggctgaggcaggcggatcacaaggtcaagtgattgagaccatcctgtccaacatggtgaatccccgtctctactaaaaatacaaaaaaaattagctgggtgtggtggcatgcgcctgtagtcccagctacgtgggaggctgagggaggagaatggcttgaacccgggaggtggaggtttcagtgagccgagattgcgcccctgcactccagcctggtgacggagcgagactctttctcaaaaaaaaaaaattattcatttaaaaataacttctggctggacatggtgtctcacgcctgtaatcctagcactttgggaggccaagacaggtggatcacttgagcccaggagtttgagaccagcctgggcaacaaggcaaaactctatctataaaaattacaaaaattagtgcagtagctcacacctgtaatcccagcactttgggacactaaagcgggcagatcacctgaggtcaggagttcgagaccagcctggtcaatgtggtgaaaccatgtctgtactaaaaatacaaaaattagcctggtgtggtggcacatgcctgtaatctcagctactagggaggctgagggaggagaattgcttgaactcaggaggcagaggttgcagtgagccgagattgcgccactgcactctagcttaggcaacagagtaagaccctgccgtaataataataacttttttttttttgagatagagttttgctctttcccccagactagagtgcaatggcgcgatcttggctcactgcaacttgtccccccgggttcaagcgattcttctgccacagcctcccgagtagctgggattataggcgcccactaccacgcctggctaatttttgtatttttagtagagacggggtttcgccatgttggcctggctggcctctaactcgtaacctcaggtgatccgcccgccttggcctcccaaagtgctaggattataggcgtgagccactgtgcccagccaataataacttataaaacatgaaacgatttagtgagaaaagyggccggttttttggggggaattactttctgtcataaagaagatagatgggttctcatgtcttctacattcagtctgttgtgcagtcacatatcatgtagactctggaaaacacctctgtatactggtgaaagaatgaaaagaagcaaataatgccttagtatgattatgaaaaacgttttgacttcacagtgccctgaatgggtcttgggaatctccagggatccctcaggcacactttgagaaccaatctatataaagtgatggttcacaatgattctgaagccttagtttcagaatcatttggggcagcttttcaaaaatgccattcctgccacctaccacaaagattctgattcactgtatctgtgatgggtctcagatctctgcatttttaatctcacgtgattcttaagtatgtggtggaagtacctttcttcaggaaattctgtcctaagcttttaccctgagaaaataaaacctgcatgctttcaccatggacggtgggagactccactgaaacacatctgctagaccactaagtttatccttgtcacccagtttgctcttggaaagagtctgttcccttttgtcactgaaccaatcatgacataaacttgtgctttacctcctatagcacagccgagacaaggctggaacatttaattaaggtttttactaaggactcaggaataacaacagggaaatatctatgtaactagatgacctgacataaaatctatcttctgattgcagtctattgtgagaatgctgcttttcctagctcccagccttccatggggcagaaggctcttttaattaggaagagagggaggacaaaggagagccttttcttttgtccattactcttagaaatgaacaggtacataatagaaaataaataattattgttggtaatgtttacacagcagtgttagagcctctctgtagtgaaacaaaaataatgttcttaccaaaaaaaaaaaaaaaaaaaagaggcaatgataaaatcaatgagcttatctttctgatatagaaaataacaggatgacagttaatacatgttcaggaatctaagaaaatgtttcatataggcctatcatgtagcatttttatttgcataattatagtcaacatatgattctccatgtaggggtctctcattgagaatgtttcctgtgtacctatagaaaagcctctttggtagattttccggtttataattatttaaccagaagatacatgggaggttcttttgtatgtacctgtagaatacatcccagtaagggtcctatggagaaagacctgttgtcatcaataaccttcattattctaactgtgaaacgttcattaatgcgaataatatcctcaaagattttctacaatgagaatcatccagtaaagctttttaactgagaatttaaaagttgtaaaattgttagttaaatgtgtataattatcaaaagaggttgactttggaaaacaaacaatttgctaagggaaggaaaacttgaaaataatcaccttagatggggcatacaatttgacctaagcaattgtttcaaaactgtcttcagtttcttgaaaataattgttagggctgatatatagaaatacatatctaggccaggcacggtgactcatgcctgcaatcccagcactttgggaggctgaggtggatggatcacgaggtcaagagatcgagaccatcctggtcaacatggggaaaccccgtctatactaaaaatacaaaaattagctgggtgtagtggtgtgcgcctgtagtcccagctactcaggaggctgaggcaggagaatcacctgagccccrgaggcagaggttgcagtgagccgagatcgtgccactgcactccagcctgggcaacagagcgagactccgtctcaaaaaaaagaaaaaaagaaatacatatctaatgttacagattgtggtttattggttaattactatgcatttttttcagtttaaaaaataatcttattttatatacttctctcggtataatttttcatgacatttcagcatgttgataatatgtgtgcatctatttcagtgccttaaagtattttgagagcaatcttttgctgacagttgaagaactgttaatgaaatactgttcattaaaaggatctgtgaaatcatttacccttgttataaaatagttatatgcaaatacacttgtcattttatttggcaaagtcattcagtttgataatcaacaaacatttattaggtgcttttgctttaaccaacattactttcatttaatactcagaaatgtaaagatgtgctatttttgaatactaactcaatgatatgtttaatttttcatttattctttgtgttatcagctgaactagcatgaagactctttagtagggtttactcctttgttcttttcctaagtacaaaccattttatgaaaaaattgctcattgcactaaaccttcagatggaaatggcttattcagtagaccagtatttggctttgtcatttgttttaatgtattttttgcacagataatttatattcattatagaaaactataatatgcagatatgctaaaatgatccttaaatcacctattattctgcctttcacatataaccactactggtcctagtggtgcatgcctgttgtcccagctattcaggagactgaggcaggaggctcgcttgagcccagaagttctggggtatagtgtgctctgccagtcggtcaggtgtctgcactaagtttggcatcaatttggtgatctcactggaacgggggactaccaggttgcccattggaaaaggagcaagaacgaatgctgatcagtagtggtagtacacctgtgaatagtttaaaaagtgaaaaaaaaaaaagccaggcgcagtggctcatgcctgtaatcccagcagtttgtgaggccgaggtgggctgatcacaagatcaggaattccagaccagcctagccaacatggtaaaaccccgtctctattaaaaatacaaaaattagccaggcatggtggcacgcgcctgtaatcccagctactcgggaggctgaggcaggagaatcgcttgaacccaggaggcagaggttgcagtgagccgagatcatgtggctgcactccagcctgagcgacagagcaagattctgtcttgaaaaaaagaaaaagaaaaaagtaaaaaataaaaattagaaattaaaaactactagtaacattttgatgtgcatcctttcagatattttttagtatatcagcttttagtcttgttttaattaaaaggcagctgcctttgttatttaatcctactttattgaaatctaatttgtcttttgcattaaaaattacattatgaacttaccatcactttaaatagaatactgactgttagggaaatgacttttattataattacattttttgctgtccaaaagagttattgtttaattttttttttttttttgagatggagtttcactcttgttgcccaggctggagtgcaatggtgcgatctcagctcactgcaacctccacctcccaggttcaagcgattctcctgcctcagcctcccaagtagctgggattacaggagcccgccaccacgcttgactaattttatgtttttttagtagagacggggtttcgccatgttggtcaggctggtcttgaactcctgacctcaggtgatccacccacctcagcttcccaaagtgctgggattacaggtgtaagccactgtgcccagtcattttttaatttttaaaattgtttttacctgctgcctttcaaacttaaaattgcagtagtataaacaacaaagtacaagtgttgagaatgcaatatttccaaaccttttaaaaatgcatatcagtaggatgtacttgaaagtagattgattatctagctgaacacagtggctcacgcctgtaatcccaacacttagggaggcagaggcaggaataaagcttgagcccaagagttcgagaccagtcggagaaacatagcaagatcctattctccacagaaaggaaaaaaaaaaaaaacccacaaattgtaaaagtagattatctaaagaaactttggctttagtttatatttaatttccaaggaattaaatatttagcacatgcattatctaatctatccttgtatttgcaatcagggaaacaaaatgtacccattttgtagattaaggaattaagacatataaaatggaatgacttgctctaaactgggtagtgtatcctttaggattagatttagctgtgacagaaaatccagaataatagttgcttacaaggtcaaattttatttcccatgcaaaagtccagagggaagcagttcagggctggtagatcaacctcataaaatcatcagattcctgtactgttgatctgccaatctcatcactctgtagacttggggtctcagggtagctgcactagcaccagccgacacatttgtatttcagccaataggaagaagcagatatctttccttttaaacagctttattgagatgtaattcacatgctgtgcaattcacccatttaaagtatacaattcaggctaggccgatggctcactgtaatcccagcactttgggaggccgaggtggatcacctgaggatcaggagttcaagaccagcctggccaacatggtgaaagcacatctctactacaaatacaaaaattagccgggagtggtggcacatgcctgtaatcccagctactcgggaggctgaaacaggagaatcacttgaacccgggaggtgggggttgcagtgagccgagatcgtgccccggcattccagcctgggcaacaagactctgtctcaaaaaaataaataaataaaaataaagtatacaattcaatggtttttagtgtatttatagggttgtgcaaccatcacaatttaactttagaaaatgtttgtccattctaaaacctcacatgccttagcagtaactccctagcccagtcccaagcaactacaaatgtacattctgtcactctctatttgcctattctagacatttgacataaatggaataatacaatttgtagtcttgtgactggcttcttttacttagcatactgtcatcaaggttcatctgtgttgtagcatgcattggtccttcattcctttttcttgcccaacagtagtccattgtatggatataccacattatatttattcattcataacctgatggacattggcttgtgtcctctttggcatatatatatacacacacacattatatatatatgtatatatatatgaatgctgctaatgaacattcatgttcaagattttatgtgaacatgttttcatttctgtagggtgtatacacctaagagtggaattgcgggtcatgtggtaattccacgttttactttgagaaactgccaaacttttccaaaggactgtcactagtttccattcccactagcagtgtataggggttctgatttctccacatcctccccaatacttgtctcattttaattacagccaccctgtggatatgaaatggtgtctcactgtagtttcgatttgtatttccatgtgcttactgttcatttgtatatctttagagaaatatccaaattctttgcccattttagaattggattgtcttttaattgttgagttgtgaaagttgattccaatacaaatcccttttctcccattctgtgggttgtctttatacccacttgttggaatcgtttacagcacaaaggttttcattttgaaaacttttgtagttcatccagcttgtgcttttggcgtcctaagaaacaattgcctggcccaatatgatgaagagttgcttctgggttttttgtgtttggttggttttgtttttgtttttgtttttgagacagagtctccctctgtcacccaggctggaatgcagtggcacgatcttggctcactgcaatctccgcctcccgggttcaagcgattctcctgcctcagcctgccgagtagctgggattacaggcatgagccaccgtgcctgtcccttgctcctgttttttcataagttttacattctaggtctatgatgcatttttagttaatgtgtacccctgttactggtggaaggtatctgagtcacgtggcaccaaaatatgtcagcaggagtgaatctatatgggtctgcagcaacctcagttcctgcctcctcagaagaaagaattccactgaggggcataaggcagaaggagagactgaggcaagttttagagcaggaataaaagtttattaaaaagctctacagcagaaatggaaggaaggaaagtacacttggaagagggccaagcgggtgacctgaaaaagaagtgcacagtttgaccttttgacctggggtcttatgcattggcatacttctggggtcttgcatcccttctcccctgattcttcccttgggaggcctgcctgcatgggcagtggtctgccagcacttgggaggggagtgtgcacactgtgtatactggagttgtacccatgctcactggaggcgttcttcccttaccagtccggtgtccttcgagggtcacatgtcagttaaactccgcaatttgtgtaagcccacttgcccagctcctgagatcttaccgagaagctgatcaccagtttcaggttttctctatctattgggagactgcctttccctggccccgctggatcaatgatcattttagagggagcataacaaccgcctgactgtcgcctgatggttgcctgacgtacctggttggaagcgtggccctctcctgcccttttcgaggctgactagctacctgctgtcaccccccttcccttttaaggacttttctggaatgttggcctgtgccacctgcttttattcgctggccagaacttagttactggccatccccgtggtctgtataggagactcgacaatgtatatttcaggcgttgggcatcatgtgtagccggcggaatgcctgttcagccatggtccagcctgaacgagcgggcctcttgcttcattttgcaggggagctgctgcttgcccgcggtcaccccagcggtctggcggagcccttagcgcgcagggccgccgtctgcgggcgctcacgcccccggggatccaccccaaggagaacggtcctgagggcctgccgggcctttccccccgcggattttggttcttcgctgtttccctttggggtgcccttcgcggtttctgcgtttcccccgcgttgccagcagccactcgcgccgcgcccctagcccagaaccgcccctcccaagggcgataaccccgagggcaacggccgcgggcggcgctgcggtggcaatggcggcgccccctgcaccagccgccaaggggtccccgcagcc

SEQ ID NO: 94375 - DNA, 52317 bp, Homo sapiens
ctttcctggtaaaacacactcttatctttctcactcacaacgtctcaagattttagtggctacatacagttctatccaatcacagaatcagctcaaatatggaacagctcacactatattttcaagaatattactgttttagattataattgggcataaatttcctaaattttactaggtcatcttgaaagttacagctggtttccaagcagtttttttttgtttttttttttgagacagattctcattctgttgcccaggttggagtgcattggcagatcatggctcactgcaacctctgcctcccaggttcaagtaattcccctgcctcagcttccccagtagctgggatcacaggtgtgcaccacccaccagtctcaccagttaatttttgtatttttagtagagacggggtttcaccatactggccaggctggtcttgaactcctgacctcaagtgatcctcccgcctcagcctcccaaagtgctgggattacaggcgtgagctactgcggctggcctcaaagcagtttttaactgcaaaatgggtccttattccccgggtctagagtgatataattaagtctttttctttgggggtacaggggggaagtttttcctcataaaaaatgactcttcagcaagtacacatttctaatggccaatgcacagcacagcagcttaaccaacacaagggtgtcttaaccttcacaacagatcattatggaatgtgataggaattgctacaaattactcttggctgctactaggatgacactatgagaatagttatgttgttccgaaaaagaccattctgtacagcttgcccaaaagtggatggacacacccccaggaaaatgagcattagacccaccatccctgagagctggggagaggcctcattttggtctgaccttcttatagcctcttgttcacttctagatgactaaagagaacccaaagcacgcgaggcggcccttacaccttcctgggtctagaaacagactaatccacctgcagggcagtgacacttaaagccccatctgggatgcagaatgcaagtgggttgttggcctcagccaggcctctcgcctttctagtcaggagatatggcacaatctgaaaggctggaaatccaatgtgtctcaggatttgttcattcctgagtcgtctccaggttctttctttataaagcttattttatcccagaaaatgtccacacagttgcacagtttgtcagtgggacagatcttgaccaaacatacgaactgagccacagtgttcaaacaccttgtttgcatccagccacccaccacagccaacaccaaatacctttgggtcatcagcctcaggtttttcagtctctgaatcgtcatcttcctacaagacaaagaatttagaggattaagcttaaaggagcgggcctgaggagtctcacatgcataactaggggccggagcaaacagcccatttacccagctggggtcatcccaccaagaatccctcccctaccatataactcagaaccagagaaaaataaggggaaaaagagatattctggaggggaaaaaaacaaaaaacaaaaaagcatcagcagctcaaagtcaagttactttagtggtgagacagtccacatcaatgaagatgcccgagttcaaagtcacatacataaaaatggagaaagcttgcaatatgttttaggaaagagtaagatcaggccacacaataaaacaggcatcgtgtttccactgaagtatcagttatttcaaatcaggattatgagccttctttccttttcatatacacatgtacatcagactcggacctactctaacagtgtccaacaccaagtgccaaggcttacacacagctgtatcgcagcacctcaaccggcatttgcacaaacatcaacacaggaaggcaggcatcaaactacctgagcaagtgacctgggaaaggcaggactaaagggcaatgcccaacctttcaggagtcccagttgagtgggctctgcctccacctaagtgctcacagaactgccagtgatccattctacccagtcctgttccttatccagatgaggtcagcctgacacaaaggatcacacacggtaaggcattctccaaagcgagcccgycattccactgaacgctaacgctgatgctatgaaggtcaaagatcaggagcagatgctggaccagctaccttattagctggctaaatccatgtcacctccactacccagaacactcccaatgcacagaagcctttaactaaatacccaggaaaaaatggtttcatttgaaactactattttcaacaaagctacatttcagcccaaacattacacagcactccatatattaatataaataccactcgagagacttgaacaaactagactcatgatttggagacttaactgtcctgtaaggtaccagtgagtccaaggctttaaatgcaatctccataatctccttaaaatgaaatcagtcatgccaaataaacagagatggagctcagacaaatacaatcacatttcagaatctctacaacaagatctgatgagaggattttactaaaatatgaaatgaagcttaaacatgatgaaaattctaagcaaagcaaatatgaaataacacttcaaaaacacattatgcaaacgtactaaagagttatgaatattaagccagaatgtgtgtacttcagaaaagtcagaaaacaacttgcaaaacttttctgaataatttcagtcaactctgaattatcaatattaatggatggggctaaaggcatgaaagtatctcccaaaatgcatcatgtacaaaacgcatttctgtttgttgtggaaataattttttttttttttaagatggagtctggctctgttgcccaggctggagtgcagtggcgtgatctcggctcactgcaacctccgcctcccgggttcaagcgattctcctgcctcagcctcccgagtaggtgggactacaggtgcgtaccaccatgccctgctaattattgtatttttagtagagatggggtttcaccatgttggccaagatggtcttgatctcctgaccttgtgatccgcccacctcagcctcccaaagtgctgggattacaggcatgagccaccgtgcttggctggaaagaattttaatgctaacatttacataccaacatgtaacaaaaatttcaaacaaataatatattttaagtgatttaattaaaacttgctaagcagtcagatttgacatctagactcaactctgcctgtcttatgctaagcaccaacttcaatttccttgcgttttctgcaaacttaaattctggctcatgttgctcaggtgattatgtgtctaaagactttcttgttaataatagcacaggttctcctttctccagcacctactgaacttcaggcaagatttgtgatcaagaactaagggcaccattataaaaagtgccaaataaaatgtcaagaaagaagttaagaaggccagggatggtggctcatacctgtaatcccagcactttgggagggtgaggcaggggaattgcttgaggccagaagtttgaaaccagactgggaaacatagtgaaacaccgtctctacaaaaaatttttttttaaattttaaaaatcggccaggagcagtggctcacgcctgtaatcccagcactttggaaggatgaggcgggtggatcacctgaggtcaggagttagagaccagaatggccaacatggtgaaaccgtctctgtgaaaaatacaaaaattagccaggcgtgatggcaggtgtctgtaatcccagctactcaggaggctgagggcaggagaattgcttgaacctgggaggtggaggttgcagtgagcagagatcgcaccactgcactccagcatgggcgacagagcaagattccgacaaaaaaaaataataataggttagctaggcatggtggcgcccacctgtagtcccagctactgggtaggctgaggtgggaggatcacttgcgcccaggagttcaagactgtagtgaactatctatgatcacaccactgcactccaatctggacagcagagtgagaccctatctcaaaaaaaaaaaagaaaagaaaaagcaggtgaaaacgaattttcctttcttatcttgttaataaactgagaagacttaaatgagccccaaccaagattaaaaataatgcagagttgactgtagatataaatgatacaccagttaggatgaatgcctgctataaatggagtaaatcatttaaacagggaaaaatcaacataaaacacccattgatatctgggttaaataaaataatccactatcttttcccccaaatttcaattcaaagattaataaaaaatgatccatgtgaaaatacattttcaaacagatctgatatccaatccagtttcttccactaatactaaaacaaaacgggagagcaagggatggagctaaccatgaaatggaacactgttggcacagttccaaaatctgacaaatgaaattgtgctttcagtagctctggatctgggagattyacctaccgactgtctactgttctcatcttcttcttcttcataaccatcttcatcaccccctagacgagaaaagtcatcctccccataggcatcagataccaatccgcctttctcctctgaaaggttaaaaaacaaacaaacaaacaaaaagcaagaaaaaaaaaacaagagttacaatgtaagaaaaaatgtccagagatttgagtggccaagactatctctgaagatacaaagggaacctaaatctcatgttaagttacaataggcccagattcggctctctgagaaggccagcatttactgaataaaatcattaaaaggtcagggaacaaaaccgagtactaaattctgtttctaatgctataaacactagataaacactaaagtgtttataggaaaccatcagagaactttctgactggaagagaccacacaaaatcacaaaacatggaagtacctaacctaatccaatccccttcactttccagatgaggaagctaaggtcctgatatgttgttaggtaacttgttctttattctcccaaaggaatctgtttccattatctaacattgtgcttctcaacctgaggaggagaacatcaccgttaggctttaaaaactcacaaaataagaaaaatcacctgggatccttaaaaagttcacaaatgcccacatcctaccccagttctaccgaattaggttctctcactttgggcatcagatacgtttgtttttaaaagctccaagatgtgtttagggcacattcctaactaaaagttataaagttaacgaacacaatctttaccatcttccacgtatgttttacttatcgctctccctcatcaaacaacgagcccaggggaaacaggcagtggctgagcagccgctccctcttcgtccatccctctgtctatcactatagccggcacggagtgtttcagtaagtttaggcaaattaatcgaaataacgggaaggagattcttcattcttagtccacagtctctaatgctctatctcaccccggaccctggaccattcttcggggtccggtgcttggagcacaatgaccatcttgttccctcccgcccagcgagggtacagcattccgggcagacacccgattcccccttccagcttcgcacttgggccttaccagccgcgctgcccaccgcctcgattccagcctcrccatcagactcgggctctgaatcttccgcgtaaactgcgagagacgacagaacattcttcttccccgccatcttattcccacagcccgggcgtggctcactcctatgactcaagacgccgacttccgggcggaaaggcasgttctttcggawcccaggagacccccgcgccacactggaaaccaatcaaaacggcagtttcctgcgcctgkctccgccctcatgccmkcgctcgcgctacgtcatcactgcgcgacggatataagattgcgtgggttctgcctaaagctgaattcccagcgctttggcttctctgagttggggttgtgtataggggtcttcgaacagttccggaaccagccagcagcctttaattcttgggcggaccacggccggttctratatcttagggtgaagagagggaggtgtcggccagccaagagagaarattgcggatcttgggctcaggaagacgggagaaggggttcggggtcccggggtggaagaacggtcgtcgtggttgcgcttatagaagtaggagcaggtggtggatcttaggaaaacggttccccgttctccragctgttctgaagacatttatgtttcttctcttgatctgatttctagctctgtgctataccgtggcctggaatagttcaatgttttcattttcattgagcgtaaaagtggagatgttaattactgaggaatgtattgcttgaggcagttcaccttcagctttattacttaaaaataatacattatttaagtgtaatatagcaaattgttacagaaaaataatctgtatttttaatgcaaaacagagggttctcgtggcaaccttttactacctttgccttaacctttggccactgttcttggctaagatgagcagccaccataccacctttccttttgaccctgagcggcgagtccggagtacgctgaagaaggtctttgggtttgactcttttaagaygcctttacaggagagtgcgaccatggctgtagtaaaaggtaacattaccaagctaccttcctttaaatttatgctggctataccataacgctgcggcagaacaccctcctcctcaccyttcgtactgcctcacctttggtccataactggatttggaaatctttagagttgtcaaagcttgtagtttcgtttatttgttttaattagagatggggtcttggcatgttgctcaggctggtctccaaatcctgggctcaggcaatcctcccacctcggcctcccaaggtgctgggattacaagcatgagccaccacgcccggcccaaagcttgtagttttagtggcagaaccacccagctggtctatatttcatagctagatttacacatggtctttgaaaacacttcagattctcattattgttcgtttgtacacacaaacgaacagcaacagtgagggtggtaggaataacttaactcggtcactggcctcctaggtaattcccttgttgcaggttgagtggccttggtcccagatagagaaggaaagagtaataatgttataaacctgagatacggtgacaaatggaagttgccaagaggcgagcagcaatgtaatattaatgatacatgtctaaacaaaagccctctaagtaatgtcctctcatgtctacacagatgtacccactcatctagcagtactctgctttcatggctgtttagttcaatcatccatatcacagcagactcagacttctttttttttttttttttttttgaaacagagtcttgctctgtcgcccacactggagtgcagtggcgcgatctcggctcactgcaacctccgcctcctgggttcaagcaattctcctgcttcagcctcctgagtagctgggattacaggcacgtgccaccatgcctgggtaatttttgtattcttagtagagacagagtttcaccatgttggccaggctggtctcaaactcttgccctcgtgatctgcctgccttagcctcccaaagtgctgggattacaggcgtgagccactgcgcttgacccagactttttaaatcttgtttttaaccattactagaaatggtttgggcatgtatccaagtttcccaggatccttgcctytttcatagaaaggacaggaggggaattaggattacatcgagaccctcccatgtgccagacactctgctaggtgcttttcctacattctcatttaattttcaacaacttcaatgaaaaggcaggaagcactgagatattgttrtcttgtattttttcaggtaacaaggacgtctttgtgtgcatgcccacaggggcaggaaaatccctatgctatcagstccctgctctgttggccaaaggcatcaccattgtagtctctcctctcattgctttgattcaggtgaggcttagggcaatgaagatggtagcccaaaaagattcggggaaggttttttgaggctggaaatttcacttctctattggtcttttgcctcttattttcttttctttttctttttccttttttttttttttttttgagacagagtcttactctgtcgcctaggctgaagtgcggtggtgcgatcttggctcactgcagcctccacctcccggcttccagcaattcttgtgcctcagccccccatatagctgggattacaggtgtatgccaccatacccggctaatttttgtatttttagtagagatgaggtttcaccatgttggccaggctggtctcaaactcctgacctcaaatgatccgcccacctcggcctcccaaagtgctgggattacaggtgtgagccaccacacccgcccctgcctcttattttctatgatttgcctatctcattcgctatattgggtttctgtatttccccaatgtagtgttctccactggtgcatatcactctgggaggttatgaatgactcctctgaggtccctcaccctcctttgttatttttttgttcagaggagtatgaaactgtatttgtacacacatatacactcagtctcatgtatacacacacgtgcactcgtgatgttgagacagaagttgcagatggatagatagctaagttgatatggggaatccctggtgtcctgcttattttggtaagggcacagtatgtgaaacagaaaaaaagatgagaaactgtctgggaccttattaacatctgctctacaggtgttctgactatttaaggcctgcagatgggctgatagaatcagaattgaggaagtgtggctgtgtgggtaagagccatccaccatgaaggaaggtagagagggaactacagtaataacttggtgaatgttcaccaggtcccaggcttcgtgctaagtgcyttacatacattaatttctttctttcttttttttttttttttttttgagatggagtttcgctcttgttgcccgggcttgagtgcaatggcgtgttctcggctcaccgcaacctccgcctcccgggttcaagcagttctcctgcctcagtcccccgagtagctgggattacaggcatgcgccaccatgcctggctaattttgtatttttagtagagacagggtttcaccatattggtcagtctgatctcgaactcctgacctcaggtgatctgcccgcctcagcctctcaaagcgctggaattacaggtgtgagccaccgcgcccggcttacatacgttaatttcacctctcagatgtaaattttaagttatacaacaatgctattagatagaattgtataaatcgttcagagggtaagaaacagccagcgagcatgtggcgattaagtgagccaggatgaaatctaaatctgaagtctgtctgacttcagagcctgtgctctaaaccacttcaccttccatagagattgagcatccctaaagcaaaaatctgaaatctgaaatgctccaaaatccaaaaaattttagtgctgacgtgattccacaagtggaaagttccacacctttctgacctcatgtgatgggttgcggtcaaaactcagccaaaactgttttttcatgcacaaaattattattattatttttaatatatattttttattatactttaagttctaggtacatgtgcacaacgtcatgtcaaaattattaaaaatatataaaattacatctaggctatatgtataaggtatacgtgaaagaaaaaatgaatttcatgttcagacttgggtctcatctttaagagatctcattatgtatatgcaatctgcaaatattcctaaatccaggaatatctgaaatctagaacacttttggtcccaagcatttgataaaggatattcaacctctactacttctatgcaaagagaatatatattggagggtgggaggaggacagtttatgactgggaaatcctccagggacttgcagtgatgtttacctgagtcctgagggccagttacagcctctttctcttctcttaggaccaagtggaccacttgctaaccctaaaggtacgagtaagttccctgaactcgaagctctctgcacaggaaaggaaggagctgcttgctgacctggagcgagaaaagccccagaccaagattctgtacatcaccccagagatggcagcttcatcctccttccagcccaccctgaactccctggtgtcccgccacctgctgtcttacttggtggtggatgaagctcattgtgtttcccaatgggggcatgactttcgtcctgactacttgcgtctgggtgccctgcgctcccgcctgggacatgccccttgtgtggctctgaccgccacagccaccccacaggtccaagaggacgtgtttgctgccctgcacctgaagaaaccagttgccatcttcaagactccctgcttccgggccaacctcttctatgatgtgcaattcaaggaactgatttctgatccctatgggaacctgaaggacttctgccttaaggctcttggacaggaggctgataaaggggtgaggcattgaggtggaggccaagcagctgttagagcagtggggtgcgatgtgatggagatggagattrgtctaagacctttggtttttctagctttctcagccaggcttcctaaaacttgtgcacaaaaagagttgtctctttggtttcctggcattgtcctccttaccagggtttccttgttctggatcctgtggaaggcaagcagccagccagtctgtgtgatgcctctgcagacccatgcaaagctcatgaagaggaggcagagaagttaaacaggttgagttttgagcagcttttggcctgttttttttttgagatggagttttgctcttgttgcccaggctggagtgcaatggcgcaatcttggctcaccgcaacctccgcctcctgggttcaagcgattctcctgcctcagcctcccaagtagctgggattacaggcatgcgccaccactcccggttaattttgtatttttagcagagacggggtttctccgtgttgcccaggctggtctctaactcctggcctcaagtgattccccccaccttggcctcccaaagtgctgggattgcaggcatgaaccattgcatccagcctggtcctgctttttataaagtgacagagcctcactgggtgtcctgcctcagaagagactgaagccgacgagagaaggaacacagagcttcttttagagcagggtgcattacactgggcctattgttctgttcttgctatgcttattttcttcctgcatctccccattcagttatctggctgcggcattgtgtactgcaggactagagaggcttgtgaacagctggccatagagctcagctgcaggggtgtgaacgccaaggcttaccatgcaggtaaggggcacccaggccacttgagtctcttcaccctcagaggcttcttagctggtctcttgttctttacagatcctggttatcaggtgacccaccatcttattgcagatactcaggcagagctaaagtgatacacttaaatcccctaaaaggagtctagacatgaaygaggtctaaaatgagaattgtgactcctgagttcttcccactgtatgcctacccagcagcaggtgatacgtttttacaagccaaggtaatggtgttgtaggaagagcacaggctttggaggccaacggacttgggcttgaatcatggccctaacctttgccaaatgctctgtgccacacatgggctagggtctttgtgcctgtcagctgaggctcagtaaagttaagcgcctgatgttaaggtcagacagctgggaagtgaaagattcagggtttgtgaagtgcctagcacacagtgwcaaacccaaaataggcccccggtaaacccaagggaaatgtgagttcccttctccatcttcccctcctttacagggctgaaggcctctgaaagaacgctggtgcagaacgactggatggaggagaaggtccctgtaattgttgcaaccattagttttgggaygggagtggataaagccaatgtcaggtgagctttggttcttgccctgccctcctggtctgggcctggctcagggtggattgcctagtgctgtgcccaaaggaccaggtgcatgtgctccttcgagggctagaggggaaggaagctccaggagagagtccttagaatacagcctgaatgctgacagctcctgtgcggcctgctcccaggtgactgcacggcatggttctggcaccccccaggatggggcagcatgcagtctgtcaggcttgtcctttaacatagtcctgttcactcacatctcagtaggtggatcctatgaggaggtgggaataaaggaactatagtcatgcacctcatgttgatgtttcggtcaatgacagactgcatagactgagatcctgtaagattgtaatggagttgaaaaattcttatggcctagtgatttgcattacagttgcctacaatattcagygcagttaacactcgatacatgtttacagcctagctgtgcaggctgcagtaccatctagatttatgtaaagactatccaccgtaatgtttgcacaatgatgaaattgcctaacaagtcatttctcagaacgtatccctggccgggcacagtggtccacacctgtaatcccagcactttgggaagccaaggcaggtggatcgcttgagttcacgagtttgagaccagcttgggcaacgtggccaaacctccatctctacaaaaaatacataaaaattagccaggtgtggtggtgcgtgcctgtagtcccagctacttggggggctgaggtgggaggattgcttgagcccgggaggcggaggttgcagtgagctgagatcatgccactgcacttcaggctgggcaacagaccaggaccctgtcttaaaaaacaaacaaaaacaccaaaaaccaaaacacaatatgtattcccatcattaagtaatgtgtgactgtattttaagctactccctgtggaaggtcaaaggcaaggctcttagaaccatcattcctttttattgcttactaatagtctagaagagtcggggtgcatcccagcctcctagccccacactggcaactaataggaagtcttttatatctggccatgaccttcaagaggcgttttgggctacagcctgaagccctttggtctgattaacgacaaataataataccttgtatgatttacggagcatgtttgcatacatggtcttcgtgaacctcacagtgaccctgagttagggacgaaattttatagtgcgttacatttgaaagaacaccgacttcagaatcagagttcgaaccctgggtatgctgccaggtgtagtggttcacacctataattccagcactttgggaggaccagatgggaggattgcttgagcccaggagttcgagaccagcctgggcaacatagcaagactccatctctataaaattaaaaattagccaggtatagtggcatgtgcctgtagtcctggatacttgggaagccgaggtggaaggattgcttgaggccrggggttgaggctgcaatgagctgtgattgtgccactgtactctagcgtgtgcaacagagcaagaccctgtcttgaaaaataaaaaacaaggccgggcacagtggcttatgcctgtaatcctagcactttgggaggccgaggcaggcggatcatgaggtcaacagattgagaccatcctggctaacatggtgaaaccccgtctctactaaaaatacaaaaattagctgggcatggtggcgcccacctgtagtcccagctactcaggaggctgaggcaggagaatcgcttgaacccgggaggtggaggttgcagtgagctgagatcactccactgcactccagcctggtgacagagcaagactccatctaaaaataaaataaaataaaaaacaagcaaaataaataaaatgaatcctgggtctgtggtatcttgttaagagccagttttgaaggcagacacccctaggcccaaattctagctctgctgaccctttactgtgtaaccttgtacaaatttacctttctgaatctcatattctggagaatgggctacctcacatgatggtgactaacaattaaatgagacatatataaactggcacataggaggtatttaataaatattattcctttccctctccaaagaagttataaataacttattcaaatttgcatagctcataagtggcagagcctcattttgtttctttaggtccagtattttttccactgggccctggctgagttttttggcccctcatatgtgctggatttgcccccccttaactcctgctgtggcctctaagctgggctgcttctagaagggagacgtgctgatgggctacaggtgtcttaactattctaactctgggactatccctctccctccctatctgctggcctccctgctctcctagtcatgattactcctccaaaggacactcagcttctccaccatctcatgctgcttgtccctttggatcctacaggtttgtcgcccattggaatattgccaagtctatggctgggtactaccaggagtctggccgggctggcagggatgggaagccttcctggtgccgtctctattactccaggaatgaccgggaccaagtcagcttcctgatcaggaaggaagtagcaaaactccaggtaaggcttgggcagtagaaggtctttcagtctgacccaccactctccagttttgtgaagctgatttctgaactctgatgatgcttgtgtaagctagaggaggctgctcccaacctgtaagtatagcaaagggaaatggcgtattggttaggtaggcagcttacaacaagctaggttagactttttctttctaaatatttaaatatttaaattatcttaatactagctttttttcttttttcttttttttgagacagagtctcactccgtcgctcaggctggagtgcaatggcatgaactcggctcactgcaacctccgcctcccgggttcaagcgattcttctgcctcagcctcctgagtaactgggattacaggtgcatgccaccatgcccagctaattcttgtatttttagtagaaacagggtttcaccatgttggccaggatggtctcgatctcatgacctcgtgatccgcctgcctyggcctcccaaagtgttggggttacaagcatgagccactgtgcccacctttttttttttttttttttttaagagacaaggtctctcactgtcacccaggctaaagtgcagtagcatagtcatggttcacagcagcctctaactcctggccataaataatcttcccaccttgagtagctgggaccacaggtgtgtgccaccacgcccagctaatttttttttcagtttttggcagagatggggtttcactatggtgcccagactggtctcatgactcctgggctcaagtaatcctcctgcctcaaactcccaaactactgagattacaggtgtgagctactgctcccggccttaatattgtcttttgtgtacatgttattttatgtggtcaagatcagtactgccttgtttcttttgttaaagagatggggtctctctgtgttgctcaggctcaagtgcagtggtgattcacaggcgtaatcatagcacagtataccctcgaactcctgggctcgagtgatcctcctgcctctgcctctcaagtcgctgggaccagaggcatgtgccactgcacctggcttaatcttcccttgttttttgtttgtttgttttgtagagacgagctcttgttatgttacccaggctggtctcaaactcctgagctcaagtgagcctcccaccttaggctcccagagtgctgggattacaggcgtgagccgccgtgtccagcctataagtacttatttctaatctctgccaaaatgacaataaaggggccgggcgcgatggcttacgcctgtaatcccagcactttgggaggccgaggcgggtggatcacgaggtcaggagatcaagacgatcctgactaacacggtgaaaccccgtctctactaaaaatacaaaaaattagccgggcgtggtggcgggcgcctgtagtcccagctacttgggaggttggggcaggagaagggcgtgaacccaggaggcggagcttgcagtgagccgagatcacgcctctgcactccagcctgggggacagagtgagactctgtctcaaaaaaaaaaaaaaaaagacaatagaaggataaatatacataaattcgcaaggataatgaaagtaggagagaagacaacagcaggtagaaatgacaacacattgtgcctagaaacacaaaaaccctactagaaatctactcaatcataagaaaatctggcaaactggttgaatataagagaaatagtttaaagatcagtagcttttctctagtcagatgagagccaaggaaaaaaaaaatcagtagcttttctccacattaccataaatacctagaaatagaaacaaaaaaaaaacttaatttacaacaataaaacttataaaatacttaggaataagtgttacaagctgttaacacgagtttttttcaaaaagctccccagtaggctgggtgcggtggctcacgcctgtaatcccagcactttgggaggctgaggcgggcagatcacctgaggtcgggagtttgagaccagcctgaccaacatggagaaaccccgtctctactaaaaaaatgcaaaattagccaggtgtggtggcgcatgcctgtaatcccagctacttggaagaggctgaagcaggagaatgacttgaacccacgaggtggaggttgtggtgagccgagatcgcgccattgcattccagcctgggcaacaagagtgaaagtcggtctcaaaataaaccaaaaaaagctccccagttgctttgaatatatggccagggttgacaaccactgatttagatgaagaaaactaaaatctcaccaagagaaaacaagctctgggkccaggagcagtggctcttgcctgtaatcccagcactttgggaggccaaggcaggcagatcacctgaggttaggagttcaggaccatccggcccaacatagtgaagcccgtctctaacaaaaaaaatacaaaaattagccaagcatggtggcacacacctgtagtcccagctactgggaaggctgaggtgggagaatcacttgaacctaggaggttgaggttgcggtaagctgagatcataccatggagtggaggacgcactccagcctgggcgacaaagtgagaccctgtctcaaaataaaaataaaaattaaaaaggccaggtgcggtggctcacgcctgtaatcccagcactttgggaggacgaggtgggcagatcacgaggtcaggagatcaagaccatcctggctaacatggtgaaacyccatctctattaaaaatacaaaaatattagctgggcgtcgtggcgggcgcctgtagtcccagctactcgggaggctgaggcaggagaatggcatgaacccggaaggcggagcttgcagtgagcccagattgcaccactgcactccagcctgggtgatagagcgagactctgtctcaaaaaaaaaaaggccaggcgcaggggctcatgcttgtaatcccagcactttgggaggccaaggcgagcggatcacttgaggccagtagttcgagaccagccggccaacatggtgaaaccccgtctctactaaaaatacaaaaattagccgcgcgtggtggcgggctcctgtaatcccagttactcgggaggctgaagtaggaaaatcrcttgaacaaaggatatgaaaagcaaataatatgaaaagaaagttcccagaaaaatttatcaaatgacatgtttaaaaatgttaggctgggtgaggtggctcatgcttgtaatcccaacacttcgggagaatgacatgggaggatctcttgaggccaggagtttgagtagtttgggcaatgtaacaagactttatctctacaaaatatttaaaaattagctgggtgtagtggtatgcacctgtagttccagctacgcaagaggctgaggtgggaggatcacttgagtccaggaggtcaaggctgcagtgagctgagatcataccattgcactccaacctgggtaacagagtgagaccctgtttcaaaaactaataataataaaaaaaattagctgagcatggtgatgtgcgcctgtagttctagctactcaggatgctgagctgggaggattgcttgagcctaggaattcaaggctgcagtgagttatgatcatgccactgcactccagactgggtgacagagcaagactctgtctccaaaaaaataaataaataaacaaataaaaatkcaatgctgtatgtggaaacttgaaggaaaaaaaagacatcttcagataacaaaggtttcaaaaactttcccctggtatgtcatgtctcagaagctattaaaggatgttctccattgtagagaggcagtaaacctagaaagcaaagatggaaacttacccaggagtaagtcttggcacaggacaatattggrgagtagtccggaaagacagctgtgtcccaggcctagggaaaactggtccagattgcactagggggcagaagactccaggaaggaaggttctaaacatcaaagtggaagctggcatctctggctcctatcgaaatgaattgttcattatgttaggacagttaggggtgaattaataacatactgaaatctaagtaaatggagaaaaacaaagctatttcaggggaaacacagttacacaagaaaggaaatgtgatcacaggaaatataaaaatgcaatcacttcggtttagctgtgaactctgttgacatagtcataataaggaaaatatggatttaataagaaattgtgttgtaaacatattgggaagttgggggtacagaatctgtgtgtatttgtgtgtattggtggggatgagttacctgcccaaagcagaaactcaatagatgatgtctcagatatcagtgtctggtttttgtttttttggggttttttttttgttttgttttgttttgttttgtttttcagacagtctttgtcgtscaggctggagtgcagtggtgcaatctcagctcactgcattctccayctcccaggttcaagcaattttcatgcctcagccccccaagtaactgggattacaggcgcccaccaccacgcctggctaatttttgtatttttagtagagacaggtttcaccacattggccaggctggtctcgaactcctgacctcaagtgatccacctacctcagcctcccaaagttctgggattacaggcataagccaccatgcccgggctctttttttccttttctgtattaaataattcacagtattttaaaaggatatgttggcaaatagacatgtacacaaaaaaggccgctgatgaataatcacatcactcacaaatgctcagtattctgctagttgattcagccacaagtccatagacaggcttataacagagtgaagccaggaacggtctctgagcagagctgcaccagagcttcggtcactaagaggggaattacctccaggaatgggcaaggaaggaagttggctgccatctttagagttccactgccctgaccaggtgtccacatttgaaatgtatagtgcccattccttacctaatagtggttcctggcccaaggtgagcctgtactttgaattggataagggtgcagaggtcttcctggtgggaaggcctggagctgttgttgctcagctgtggggaccacctgctattgccctactcccctctagtgggagccaaagggaaggctggctgatgagtgtctgcggattgaggatgtggcagggactggtgcccccacctccctccgccccaccaccaaagatggggctctgcctgctgtgtgcctgtcaccagcaaccggcagtcatgccttgggtttcccaggtggagaggtggcaggcaacattttaaaaagaaaacaggaaactatattgtgtgggggaggcaggagtggagatgagaaaacagtttggattttgtgagaggggctttgggggagtttggtagttgttggtaacttaagtgctttttcttccttttaagttagttgcaggctttggtttggaaagccccagggaagtggggtgggggacagaaacctgaggctcttgcccctttatctgccttcacagtaccatctccttcccccagctttaccctgcgctcaggagccaggcctcagcgcttcctgctatccacttcccataagccactcctctgatattagtccatagccaaaggagctgtgggtccaggcctggtgaccagcccagctcagcccgctcattcagggtgctccctacctgcaggcaggaggcaacaccctgtctgctaccattagcaccttccagagcccacctcccctgcccagccgtaccctgctctgccccatctgggatgctgtgctcaggcatgagctggcagggccgcacacagcctccctggtaagtagagactcaggaaacctttggggtcctcctgttttctggttgtgtgatccaagtggtgcacactggccccttgggtgccaactgaagggcttgggaatcttgctctcctggtgtagctggcagctgcccacccccacccyacatgggtttctgagtcggcaggtcaagcattattttattttattttattattttatttgagatggagtcttgctctgttgcccaggctggagtgcagtgccacgatctcagctcactgcagcctctgcctcccgggttcaagtgattctcctgcctcagcctcctgagtacctgggatcacagacatgcaccaccatgcctggctaatttttgtatttttagtagagatggagtttcaacatgttggcaaggccggtctcgaactcttgaccccaggtgatccgcccacctcagtctcccaaagtgctgggattacaggttttaaattgtattttaaattcatgttttaagcttatcaagaagagtcacttaaccttttaatatatctccctccaatatacacagaagtatatgtgttcatatttgttaagttcacaacatttgtgcgtgtatttactattattaaaataggtgatattatatagcgcttcctaaatgccagtctgtgggccctttgcatgagaacctcctgagaagcttttcggaaactctcaaaagctcatcccagaaaattcagttcagtagtctgggggttatgatacatagtcaggtttggggacacttttgtaaatggctttattactgtcatttaatatttttctcccttgttacttttttttgtttttgagacggagtgcagtggcatgatctcagcttgctgaaacctccacctcctgggttcaagtgattcttctgcctcagtctcccaagtagctgggactacaggcatgcgctgccacacctggctaatttttttgtatttttagtagagacagggtttcaccatgtaggtcaggctggtctcgaactcctgacctcaaatgatcctcctggctcagcctcccaaagtgctgggattacagccgtgagccaccgcactcggcctcctcattactttttgtggctctaaggtagtccaattctataagacttgctaartggtcattttttgtccccaggaaaagagaggaaacaaagcatctgataaagccactatcatggcctttgatgccctggtgaccttctgtgaagaactggggtaagtgacttattttatatgtggagcaaagtgtcagtgagatcatttacttccccggcacgccctagttaagcagctgacataagacagcccgtaggctaccaagggacacctgcctgcaaaggcyrttgtgtcgggcagtgtggaagtcaggaccttgctcttctctattggaggccccgggatctctcgcagtgtggggatttgctcagtattctgagtggtgtccttccctccactccaccctcttctgggatggctggccccacaagccactcagttccaagggatgtgaccagctctgagccatcggctttgtggtcatcatgtgccaccgagctgggacttctggcatcacttgagtagtcctcacccttatccaggacccacacagaagcctgtggccccacttacctcggggagtcatgtgctttgaactcacgcatctgttttacctgcatctgcaggcgatggggcaggggccacggaaagagtctgagggctgcttggtgtagtcaggttgtgtccaggcatgcggagctgtgagtgcctgcaggagagacacccaggaggagtttttacattttggtctaaaaagctcttggattcatctcatctcatggaatgatcctgtcggatgacgctgacgtgattgcttcagacttagaggtgaataaattgaggtccagagaggtcacagtcacgaagctcatggtagactgaggccactaaacacccgtctcctgattttcagtggcgtcctcatttgcatacacctgggccatcttggtttttgcaagaaaaaagcgaggaaatcagagaaactctttgggctgtgtgtttttatttccacctcctcctgttgaccagtgagtcggtggcttctggactgaagctattttcttctccaaactgctgtctctaatttggcctctgtggcaagaccacgcccagcaaaagtggtyggctgcagtgccaggaccacccttgcctgcagcctttgcgaccagagcccttttcaagcacaattaatatgggagttgctaaatttggccttcttaggcttcttgagcagagctcttatttctggtgaggaatgaaagggccaagtgttcctgttcattgtgagtcctgtttgctgaaaaaagctctggggctgtctgaggctctggaatgctctctggagggttaactctgcctgtccccagggtctgctccgcctgccaggcaagggaacaggtcctcccaagggcctctgccttcatttctcctgtcaccttccggggagctgggacttcttagtgcatcagtggcctggttgccaggggctggggtccaggcatctgtggactcaaggagtccaggtgacggtgttgcgctgcctcttgagcagcctcgtgcctgtctcctttgctacatgtgatgattctgaaatccaggcagcaggctggaataaacgctgctggtatgtctgtattggctactgttctttgaataagtgaatgtttctttattgcataactggcgtgtagcacaaagaaaaagccccttctccaccagatatttgcttcctaagaatagttctcattggaggctgaggtcgaagcagcctcccaccagcgatcccttggggcgggcacctggcagtgagggacagagctagtggggtgggctcagcagaagtgggtgcatttctgcaaaggaagctgtaggtttcttgtcagtttgttgtggggtctgaggcacatgggagtgggaccagcagaaaagatactcaggtcagttaactaatgaggcggggctgtggcagccagcggttttcctctcttctctatctgtagctactttctctgggctgcagccttgaaaaagcagtgtttgattattcataacaatgagtgtcttttagtgtcacagggaacagttattaggtttgaagcaacctccagcttgaggcctcggcatcttgagatggaagagcagccttgtgtttagacctggattgaattgggccctgttgtttcctgggatcttggggctgggggtgcccaacagcctggcatcttcttgtttctctgtgtgtttactcattcattcatttattcagctgataaatattgactgatgccagctctgtgccaggcacattggacatgggggatacactagtgggcagaaatagccccgtcccagagccggccatggtggctcatacctgttataccagcactttgggaggctgaagtgggaggatcgcttgagcctgggagttcaagaccagcctgggcaacatggcaagaccctgtctctactaaaaatacaaaaaaaaaaaaccaaaaaacacaattagccaggcatggtggcacatgcctgtagtcccagctgctcaggaggctgagatgggaggatcatgtaaactcagaagtcgaatctgcagtgagccgagatggtgccactacagtgcagcctgggtgatgggagtgagaccccatctcaaaaaaaaaaaaaaaaaggccgggcgccgtggctcatgcgtgtaatcctagcactttggaggctgaggcgggtggatcacaaggtgaggagatcgagaccatcctggctaacacggtgaaaccccatctctactaaaaatacaaaaaaattagccggtcacggtggtgggagcctgtagtcccagctactcgggaggctgaggcaggagaatggcgtgacccgggaggtggagtttgcagtgagcccagatagcgccaccgcactctagcctgggtgacagagcaagactctgtctcaaaaacaaagaaacaacaacaacaaagacatataagtcctgtaaatggtgtttcgagagtataaaacaagtggccttaccctaatccttgagggttagggaagatttacctgagggagtcaggttcaaacggagatacaaaggatgaggaaggactaactaggccatagagtaaagtgtggtgtgagggagagcatcccggtcaatgagaatagcatgtgcaaaggccctgtggtgggagagaacaagcatattcaagaactgaaagacacgctgagaacccaggggcagggcaggatggggtgggcaagatggctggagacaggcaggctagagcgtgcaggccccggtgcggctttgttcgggaagcttgctctggtggctctatctggattaaaaatgagctctcacaagttagcagatttgaaaaggaatttttatttcatttggttgtgtctttctctgtcaaggatttgtgaaattgctggctgggcctgtgagcctgttagagaaccttgttagccatagctccttccacctgaggcagtggagccatcctctccatgtgcttttagggttctggtcggggaaccctaaaaacaatagggtcaaggagccagaattggtctcagaccagcctccccatcttactagtctgaccaaccctaagccagatacagtattttactagactttttcctgrtgggaaaggaagacaccagggcttggcccctgagccagagggaaccgcgaaggggcccaccactggaatgggggcaggtcagctcgcctcccctgctgccatctcagtccccagcaagtcaggtcactcctcttcacccgcttcacactgagtgttttctgtggaagtgagtaaaccaaacacgatggcaaataagatgagaagcaggacagcggtgatgaataagataatcactgccaggcccccctggtcccaggggttctgccagaacgcatcattccagattgtctctttgaataccagttggtccatgagaatctggaaaagagggacagaggacctgagtgcaggcagccctcccaggccctgtcccaggtgctatgctctgcccgccgactccagcctctgtagcagcctctgtgagcagccggcccgcctggcagccaggggacatgaaagggctagagtctttgtgctggatgcctgcagccagcagcaaatggcatttcccccgctctagatacaggagccaggactggcgcaagaagtggggccctggattcttcctaggggatgcccctggattctccagtccttctttcctgagtagcaagtgtgagcaaggactctctctcatccctgagacctacttggctagaatctaaaaagcatcatgatagagtctccctgtttttcctgccccaactgccaaacatttgggaggcatttgagagagcgtataggagccgaggaggggccaactccagctgaggcctcggtagcctccttggagcagctgagaatagaacttaggagtcctctagaagcggagctccttatcgcagactgcaagcccatagccaggtgagggcagcccaggtggagaaggagggagccattacctgattctgctggtagctgttctgggtcctacaagggcaattcagggtggtccttcaggctcacactttgtggagggctgagctgaagaggccgccaggtgaccagagctgcaccctgactcaaagaagcaactgttgagaggaaaaggcatgagcgtggccaagcggccctgaccagaccttagttgctgtcaccaaacaaacaaaggtgggctagggctggttgcctggcaaccacggctccctttctgcctttcacgttcccccttcagctcctttctgcccttgtgtgatgtcattttgggggtgctcagggcacgtgttcatgagtccctcctgagagaagtcagacttggggtggacggggaagagactggaccgagggcctttgccccaggccatcaggccgcctcacctgtggctgggctgggctgtcctctgtctgggtgacgtgtggactgcggacctgccccgagctcaggaagccctggggctgggactggcgtagggctcacttcctgtgttgtggggtgaatgattaactgcagccctggctggcgcctggtgcctcctggaactgtttctrggggaagtgttgctcccccctgaggcttcccattggtgcctttgtctgctccctgggcacggcctcagcaacattgtgtggttggtttctgcccactggcacaatagggaagctgggaagaggggatcaagcctgtgccctggtgcttgaaacctagtggccaccatatactcctttaaaagctaggatgtgagggcccgctatggccaggaaccatgccaggcactgtgtgtccagttgtgagatcagagaggcgggccctgccctccaagggcttcccttctagccctcgggtgcttatcccagctggtaaagatctaggagctttgagaaatgcccaggccccacctggtaccacttatatcagtctctggggttgcyaggatgtcgtattgtttacacatccccaggtgattctccccaggtgtggccagggttggatgacagatggaggcagatttagaacagtcgttcttaactatcatgggcgtcactgacccgggttacctgatgttttctgtttccttgtgtgaaacttactgactaaggcccttggcatgctgaaygctcacagcagtgggccagtctctagctcaccctttgcgtgcagctccgtcagttaagtcagatgcttatcaagagtcaagtgttggttcccaaacctgttcatggcagttgtacttgtaattacataattgaatttaacatcccgggaaccaatgaagcaacaataatagctgaaaccccaattttacatgtggggaacgggcacagagaggttaaataacttagccgaggtcatcagctagtaagtaactgagttggagtttgaatccagcagcacacagtctgagcgctgaagcacctgtgctgcacctcagagcgagtggagaaagaaattctttctagaaatacctattgactactttgggatgactttggaatcactcagataatgttcctgttgaaaaagatgcagacatgataactaaacatcagggacattttgtaaaaacccagaaggttttcacacccagcttcctttgcctttaagttccaatgactttaagtttttgttctgctttaaagaaaccaaaactagaaaataacaatccaggagctgtggttggcaagcccacactcaaccaaaactagaagatagcaatccaggagctctggttggcaagcccacactcagagaaaaggccaggaaggccggccaaggaawaggtgtatgtttccatttaatgtgagatatgtaaaaaagtaatagatgtgtagagaacttaggtgttctttaacaaaagttgctttgaccagctctttcaattaactgccggccccaattggataattttttttttttttttttgaggcagagtctcactctgtagcccaggctggagtgcagtggtgtgatcttggctcactgcaacctctgtctcccgggttcaggcgattctcctgcctcagcctcctgagtagctgggatcacaggcgtgtgccaccatgcccggttgggaggaaacttttatatactctctgccaagtttttctaatgagattcttgtatccgtggctttattgkcattttttatttttattttattttttttgagacagggtcttgctctgtcactcaggctggagtgcagtgccactgtcatgccccaggcagtcctcctgcctcaacctccacaggagtagctgggaccacaggtgtatgctaccacacctggctaatttttttttatatttgtagggacagggtctccccatgttgcccaggctggtctcaaactcccgagctcaaggatccttggccttccaaagtgctgggattacatgcatgtgatatactatgctggtctgttgttgttttttgtttgtttgcttgagacggaatctcactctgtcgctcaggctggagtgcggtggcgtgatctcagctcactgcaacctctgcctcctgggttcaagcaattctcctgcttcagcctcccgagtagctgggactacaggcgtgcgccaccacacccggctaatttttttgtatttttagtagagacaggtttcaccatgttggtcaggctggtcttgaactcctgacttcaaatgatctgcctgcctcagcctcccaaagtgctgggattacaggcaggagtcaccacgcccatccctattgtagcttttaatcaggcatgatgtacagacagtgtggcacgcaggtcttcagagtagagtgcagcccttttgaggagccgagagcagcctgccctgtggcggaagcagagggcacagcttggggtgggcatgaagaggctggcgasatgattgtggggaccacttaggatgctgctgcagtgaccacaggtaagcattgatggtggcatggtccaggatggcacagtggcgggaacagagaggtggtgaccaagtcagacgtcctctaaacctgaaaccagcctgatggctgccccttccatggcccccacctgtcttcaggccgcccaggtctgcagcatctttctgtttattctttcccacagtggggcaactgctgccacctttccatgcccatcttccccagggaagaccggcacaagaagctgcctcttaaaggagcgggccaggctgctgtcggagagcaggtctggtttgttaatctcagtgggtttgaagcctgtgaaggagttggcccgacagccgggcctggtgtgtgccagttggccaaggagcagggaggagtgagtcctgtgagggcagggaccgaatcctgtgcggactcagcagttgttcaccgcctgccctagagcggccattcggcctgtctgtgcccagggctgtctgtggttcccacctctccgcagctgggctggggaagcagaatattttctaacaaagggcctcagcctcagccgccctggagcagggctattcttatgctgatgaaaactggcttatggaaaagtcacccaggaattgggctgcttccctgttggccatctcccaaacagaaggcttccagggaccctccagccattggtgctgggaatgaaaaatgcagggtttcctgtccgtccactaccctgtgtttttcttccgggaggggtgcctcattgggcaccaccccagctcttacctgttgggtcccacccagtcctgcgaaggttattttgagacagagtttggggtgtgggtgttttgggtgtagggttggtcgatggaggataatggattagagccttatctgtactgcaaccaggaggccaagttctgggtctcagagccctgggtgtggtaagcagaggctctggagccagataggctggactcaagcaggccctgctccttttcagctggttgaatgtagacaagttacctaacatcrctgaggcccagcttcctcatctctaaaatgggggtaatagtggtatcttcaacatggaggtactgtgatgagtaattgagtttatctgcaccaaaatgctgaagacaatgctgagtatgtgtaactcctcagtaaattttagccatcttcatcatcatcttcatcctcctcctcatgatcatcgtcatcattctgaatcctattctttggagggggctgagaatggacaaatttttgaatttcttttcttttgtatgaaaacacttactctctgggtctttaacctaaacctgtcagacaagtccgtggacactagaaagtgaaaccagagggtgagagcttcccctccctgcctgctattgccagtgtggcctggactgccagctggaaatggcgggggtgtggcaggggctgggatcccctctccatgacatgtttcccaggtagacagggctctgctcccaggtggccagagcacgggtcacgcaggccaagatgatggaagcatgtgaaaaacacagacttcttgaggctctggggaagccccggggaggcacctcgggatgctctgtctggacccattggcatttctggagccatgtgcctcccctcccctcactcctgggttcgtagctctacctggaaagttctctggaagaaaaactcagctgaaaggagggggtaaggaaggaaaggtgctgcttctcagcaagaccagtctttaaaatgggtccctgttgccctggttggtcccatgtttagaggggcaaataataacgggtcatggtgatggggctctaaagatatgcccagcaccgagctgagtgctagacataggtcatcttagtttatcctcacagcaaaccccaggaagcagtaccaggatttgctccatttcaccaagggggagttcggcttagggaagttgagtcacgcagctgacagggtgagggtgtgagcccagacagcacacaaatgggggagggccacagggtcaggaggcaggttacaggtgacattagggccttcctctggcagtttgtgaagacccactggtctgagtctgctagtgtgggatgtgcaggccaaaggtgcaggcagttgacagagtaaagtgctgttcctgagcttagctcctgcctttgggcaaacacagtctctgccactctgcagagtagtgcctcagcctggcagagctcattagcagctaatgcatgacaggaatttcatggcaccgtccactggtcccgtggtgttaaccgcctgtrtggcatgcttctctgcgtggttttccagctttcgtgggcacagggagagcagaggcctgggaaggacgggcaccagccataccccctcccaatgtacagagcccagcccaacctcagggagtccggcaccgcagaaacacgtaacacaaaagcttttacttggaaactggcaaatactggactagaatactgacatgctcacgctctggcgggagctcggatgcagaagctattgcacaaagcccctctgattgccttgctcctctttggcatgtatcagcagagccccaagggccaattgcccacaggtggggactgttctccatcaaggtatggggacccctacttccttgttttgttaaaaagtgcaggtaggcgaagaagcccaggcagttgacccagtctttgaaacagctgactccccagcacccagtgtccactggcagatgagaggtttgcacctataccagcccttgtttccttggtagggctcaagttgtcagtgtccaggtacctgggctgggccagagctggggccaggggagcctggtcttgaggggtaagggctgcagggccaggctgatggcctgtgtcatggcattggccatctcctctccagcttctcctcagccatcgcccgtccgtcatggtggtgtcggctgcacctggaccttcctgcctctccgctcagggcagcagcagtgagtgcagcagcagctgcaggctatcagcagcaacagcagaacagtagctggagggccgggagagagcacgggactcaggttgggggagagaaaggatgcccaccctcctcccagagaaacccactgcctgccagggtctttcccccacaggtttggtggaggtcagaaagatccgagaggctggtgagaggtgcggacggtccccatgccagccgccagggccaacctcctccatgttgtgtcttctctttcactgcccaagcctggctcccgtcatccccgcgtttgggatccyggggtactgctgggcccagtccccagcaccgcccatcacccaagcagcatatcagaggatgagggaagtcccttggcttcccccaagggacaactggttttcctccttgatccggcagacacccgccacctctgccagccctctggctggcaccatggtgtggtctctcccagatgccagggagagccatggggtgctgagtgccccaactaacctgtgaaaaggatgatgactgagaaggccacgatctccacgggctcagcctggggcagtctctgcagcttgagcagcagcctctcgcccacggcgcgcatctcctgcacgaagtcggtggcagccatgccgcgctggcttcctgttggggctcctgccgggctctgctggggcagagagaacacctggagcctccacggctggccccacactcgtcgcagcaccgagattccaccctcgcacccatccgcagcccgcagaacaagtttgtcaggtctcacacattgcacccctggtgacttccacctagtggtggccctcagtccccacccagctgacacagctcagggtggaggaagccggtgaggacagtgagaccaagggcttgcttcgggggctgccggccaaggcggcggctggtggtggtttctggcttcgctgttccattcccttgtcttgaggtaccactactgggttttgcctgggtgcttgggactggcacagctccctcggggtggggagactgggataggatgccaagctggtactcttgccttccatcaatgtggggacagaaggagcaggttctcccgagagcaggttcatggggcttctggccagggtcagtcagaggtgaaaactgcccccctgtcccccaggccccccaacctctcccaccagcccagtttctacactcatgcctgttctgccagagggggaggccgcaccgtgtccctccaggttttgccagggtttctgtcctgtctgttgggagggggtcaggaggcccaggttgctcaagccagcccctcccctgctggcgtcatctgtttctctagcctgaccaggaaagtcctctccactcccacccctgccccaggagagcctcttcctgtctcagggtgcccaagaggcccaaggtgccactccagaaggctttccccttctgcctctcctgtgggcatgagggagctggtgcctctttagagaggagccagagacaaccttgtcccaacccagcctgatccagttcaccaaggcagttgctctaatccaggggtggtggtggggacaggtggccaggggctggtgccagacctttggctgtaattatcgttgccttgtcccaggtctcagccggttctcgctgagatggctacgtcagtgaggccagtcactcccggtgccgctgccttggcagagctggtttagaaccaccgtgaaggtcatcgaacggggccctccaccctgcaattggcctgcggccatccttgaggccatgtggtctttgcatgagcacccaggatggtgaggaacctccgcctgctgaggcagcccacccactgcagaaggtcggactccctgctggcccccagttagtcccacttgtggtcacttagaccttgccccctcttctgcctcgtagcccttcaggagcaagatggcagccggcatgtaccttctggatttccttctctgccaggggcctgctctagtgttttcagctgctcctccttgaatgccacctccacttcttccttttgtgacatgaacaggttgcttcatgtctctgatatggaatgagatgcccgtgttttgaggctattgggaggactgaccatctagcagcacattgtagacagccataggggggtgcccggcacacgagaatgcccccccgggacgggtctcactggctttgggggctgtcacccccgtgcaycgtcactagcacccccaacaccttttgggtgtctgtcctagggtgtctgcggtgtgtgccctgaaggaaggtaggcaagctggaggtggggagctatgtttttgttgttggttttggttttctttgagatggagtttctctcttgttgcccaagctagagtgcaatggcatgatctcagctcactgcaacctctgcctcccagattcaagtgattctcctgcctcagcctcccgagtagctgggatcacgagtgtgcgccaccatgcccggctaatttttgtatttttagtagaaacaggatttcaccatgttagccagactggtctcgaactcctgacatcaggtgatccgccctcggcctcccaaagtgttgggattacaggtgtgagccactgcgcccggcctggggagctgtttttttaagtgatgatgagggtagcaggcagaagatggctccgtggaaaattagatgagttcttgtcaaaagccgtgggttccctgagttagatccacccagcttctcacacctcacctggagtgagtgcgtttctgtggaggtgaggatctcagttttcaaatgtactgagaggcatagggtcctagaatgctatagatcatccgctcccgcctccttccttctatacgtggggaagctgagacccgagagagcaagcaacttctctgaggttacacagcaggacagggccccagccagcacccccactggtgccccacgctgtctctccatggaggcctgtctccagcttagaccagcaagatagccaggagcagccccgctgagggtactgcccgtgcagtgggctcagtacaggagccagggcccgagagccccctggaagccagctggctgtgctcggccagccccagcccacatttgtggatctgaagctgcttttatcagcatatcaccaccaggccggggccacaccaggctctttgagactacctggagtccttgtcaccacaggtacaggtcttgtgagtctagccagcctgagtgtaggactgaaccctctggtcagactgaatgggacattctctctggccaggtggagcaggcttgcacaaggacagtggtcccctcttggttccgggacctccgtgccatcctcacgccccagctttccaggttccctcattcttagagggacgacaatgccgacagtgtcccttacgggacagtttgcgcgtggttcaggagctgggctgcctttctcccctccctctctgtctacacttggtctggcgttttcagcctgactggcactgtgcccacacggcctaatgtagcccagcagagacactccttcaaagagggagcgggcagggagagctttttcgcttgtgccacacccagagacccagggagagattgcagggggcacttttccttgtgagcgagagacctggggctgtgctcaccagaacagggaggaggaaggttggactgaggctgaatttactggtgcaggaaaagtggggtttgttgctgagaagctctggccagcctcctccaggggctgcaaagtgggagagctgcagactcatgccgkgtggaccccggcctccagcggggaaaagtgtcagttcccagcagcagcaggctgcggctgtggacagtgtcatagctttgcgcccagggcttccctagggggctgactggaagctgaatttgccagccaggcatggccagcctcacccagccccagggtctgacccaggggtactcacggtatcctgtcacacagtgagcagaagtaggaccgttggacgtggctgttctgcccccagagagctggagaggaaccccgggaccccctttgttttgcagttgatatcttgtcatttggagcgtaaacccgcgactgaaccttcatggcgcaggtgggggagctgaggggtcctgttctctaaagaggaggaggcgcattccagccggtccccaggtggtcttcccagcgggctatttaaagccaggccaaggagtgcctgacacttggtgcccaatataaccagcagccgtcaggtgactgtgtggcatgtgccccagccgctgctcctaagggaaccttagtgttcccagctgtggcgaggggaacatgggagctctgaggctggccacctctcctcccctttcccttcctaggtttggcaggaggaaggcagggaagcccaggagggctactgatgatcccatatttttcccgtctttctatctcaggttcacccaactccttccaaaaccacacttcccacctgcgaaccagggcaaccagtccctcccaaccccacgcttggtagtgcccacctgcgaaccagggcaaccagagtccctcccaaccccacgctcmgtagtgccttggttggaggcttctcagggtcctcaggggttcctgagtggctgccagagcaagtggtggctccctctggccttaagagggagtgtagcccagctgccaccaggccctcctgctgcccaggctgcccagccagccctgcttggagccttcagagggtgtgccctggctgcagtagcggtcagcacaggggaaacactcagggcagagaaggctggcagagccggagggatgggaagcattcctttatgtggcatctcctggcacacggagccttkcaacaggcaggcatcccgcaggccagacagctgccacttggtcccgaagcttccctgtttcctcctcgcagagctgatactccaaccccaggcgcctcacgaggaagggctggcagcaggcggcgtgtttgagactgataagcgaggtgtgttggcagcgcggggccccagagggctgcttgctctgccctgttgtttcgtcatggtgggttttagtcacccttgccctgttgggcattatctcgtttgaggtccacctagaaggaggcataactgacacttgtgggagatttgcagggtcctgtgcctgagcagccgggggggatgcccctatttgtggcactgagcctttgggtgactcccctttttgccctggctccaactggaagtagaaagtggtgcttgaacccctggcaggccctgctcctgtagccacccagggcgggaggaagcgctttctgctgctggtgttagaaacagtaggcgctctttctgcagctacagaagctggctgttcattcaccctccgtcctggttcagggactgtgttggagagaccctgtccactcgtgtcctgtggatgcaggacagggatccccacctgcctgcctggggcgtcttgtgagtgacagccactggggtctccaggctcaccgctgtgccccgaccccgacctggcctgactcttccctactgtgcgcctcccaacaccgcaggagcttgtctccccagacaccagccccagccgaagcccccagcctctgctgagctgagaacacttgggctagtccttggtttccacatttccctgggtcattgtttttgtttctcactagatgccagcttgtttgctttgaggaaaacatatggggggtggtggctttaacgctggcttgaggacagggcggcaggaggagtaggcagcctcggctcacgggccctgcccaggagggctgctctcagtgttccccaaagaaccaaacagccgggtcctgcttccttaggggtggtgtcatgtcagcctgtgcatcacggtggcacagcagaggtcccggttgccagcgtggtccctcccagcctcacttctgtgaccttctgcccacctgagcctgagttgaaagtcagtcctccaggttcctggtttggtgttcaaggctcatcaccagagggagatctaggagtttatggggttctagatgggcccagggaggaggacccaggctgagccgtgagctgagaacaccagcagtgagtgggccaagcccctgaaaggacacagatgggcagagtcctgctgcatcctgggggcgccgcatgctggctgggcagaccctgcgctgacctcgacagggctctgccctaatcctgggaaaaagggaggctcagcaggccggcagccattctctcccaagctggacagccaaatccctcttttaagccccctgaataaaagagctgaaatgaacttgcagaataagcaggccctcggggcccctctgctgcacagcaggcggagcaggaggcgctctgagcagagcccccagccctcccctagtgcagggtcccagcagcagggagagtgcaggtgtgtgcaggaggctggctgacttccctgcagggaagcgacccagcatgtccccgaagacctctccgtgtttatggtagactgtggcccttcaccctgggggcaggggacccttgctgctccctccctgtccccccttcttctgtggccattgccactcacctgggagctcaggtgttgggggctgagcagcagtgccccagcgcggagcctccacgtgctgtcctcgtacttccttcgtgggcgccgctgctcccctgggcgcctcagcccagctcctctgctgacagccagctgctgtctctgcctggcttttttgttgttggtcgtcctggagatccaagtgtcaaattaccgtcgcgagggggagcccgaggaagccctgcttgggaacttgtcctccaacttcatgtcccggtgcctcacctctgccctgagagcgctgctcagggacaagacaagctccctctctcctcctccttcctcctcctctccctctccccgactcccacgccgtgggctgggcctgggttgggagctgaagaaagaagtcggctctctgccttcctggccaggaggaccctggggaggctccacctgagcctgtggaggggagtcctgcagcgctctcaggtctggggcacccaccctgccctcaggaaggccaccccttctgtccctctggccactccctggctggtccctccctctggcctctctcaggaacaacagtaaacagtggggagctggtggccctctcaagctgagcaggaggctttgcaaccagtccctggggaggcccttgtgccgctcagcatctgaaggcgtcttgggggagaacttggaatcctgagtgacctgggagtggcctgcgcgcccggcaaggcgcctcatgttccttgtgaggtgagggccttctgctggggctgtgaccgcactcctggcccagctgtcagggcagggctccagagtccaggggccgggccctgtgacatttgcctggttgtgcctcccagcaggctaggctgtgtggagagaaaccgaccccagccccgctgtcaatggagctctttgagtccgagcacaaaaccccagtgagtcagggcctgaggagggcagggggaggaagccagccatgtggtcacaccactcggatgccagagcctcccagaggctggacaggcggccgctgtgcgggcgcacggactcctggggatgaaccatttgttgcatttactcattggagcagagtgggggcaggagcgccctctggtggccgcctcggctgtcccagcccaggtcaggcttcagagctgcattcactcagctaaaagaaagtcagccaggccctgcttccttaccggggtgttgcaatcagccttgcatccttgagcctgcgccttggggtcgcagcccctcaaagggcttcttgcagccrcagcagtgctcacactgggaggagttctagttagagcagttaatgccagctattcttgtccctgggatgtggcaccccagacagccctgcctgtgttccagcatctcctcttgggcttccctaccctgtgccacgttcctggtggcaggaatggctgtttataaggagcctgagagagctatggcccctcttgcggcctctgcagctgccccaagggtcgacagccacccccatgcagagggaacagagatgcgacagagcctcgtgggccagccagaggctgctccctgctcccagcatgggcagaggccgctcaccccaggagggctgcagcagggttgagacagaggaagacgagaggaggactccaggcgaggctgcgtctccctggctaaaggccccacctgtgacaccctcacgggttgatgatgggacatattactacacagccgtgcctgccttagcaatgcaaatacgttttgagaaatttaacttgtcattgtgcggtcacagagtatacttagggaaatcaaacagcaattccagggaagagaaggaaaaaaatatcaagcggcacagcctcctacacacccaggccatgcgctacagcttgttgctcctagaccacaaacctgtacatcacgttactgtcctgagtaccgtatgcagttgtaacacagtggtattcacatatctaagcacacataagcatagaaaaagtacagtagaaatacagtgttagaatcgtaggggaccaccattggctgtgcagtcattccatggggcatgactgtactgtaatgcacttcagacatcacctcagccatcttcgctcagtccgtgagggctgtgcctttctgcaccatcttactgacgggaatgcatgggctttaggaggtgaagtgtgtcacccaaaagacacccttcatggcagagccagcatctacatcccattgccagaggacagaggggaggagcagaggagtaactggacagagtggggttcacatcctgcttcccgggagacccccatgtgttacgtgaccttgggaaagttggttcaccttatcgtcctcatctgtgtagtggggagagccaaacgatgcctggtgcagcttggatgagatgaggggtgtggggctcccggcatggtgccggacgcggcagtgctcgctcagctagcgattcrggctcgggtgaacagacgctggccgactgggctctccgcccctcacctctgcggtgctgcctgctccaggtgccgccatgccgccattgccaagtacttcggggatgcgctgcctgcctgcgccaaaggctgcgaccactgccagaaccccacggccgtgcggaggcggctggaggccttggagcgcagcagcagctggagcaagacctgcatcgggccctcccaggggaacggctttgaccccgagctgtaygagggaggccgcaagggctacggggrcttcagcaggtaaggggccgagaagccagggctccaacccgctggaattgcctggcattcccttggcgccagggccagaccagaggtggcacgatgccrcaatccccccttgagctggtaggacatcagggacattgccgttctagcagcagcacacrtggggagggcagagcccaggccagggccactcacgcctggcctgtccctaggtatgaygaaggttctggaggcagcggggatgaaggcagagatgaggcccacaagcgggagtggaacctcttctatcagaagcagatgcagctgcgcaaggtgaggggaggcactcagtggcctgtgtggggcccctggtggccccctgctcrcacctctcagccccttctctggtgctggatgggactgtcctgcrgcagggcaggacgcctcatgggtccttcrtgttgtcctccagggcaaagaccccaagatagaagaatttgtacccccaggtcagtacagaaatgttcctggaggcttgtgggctcttcccggggcatggagggaggattctcatccgggctgtgggggacctcagagcgcagaaggtggagcgaaaggaccaaggaccacccccccccccccacagatgagaactgtcccctgaaagaggcttctagcaggaggatccccaggctgactgtgaaggtaagagacgggcagctcctcagccacccsccggggccctcycccagccgcgaggccatgcgaccagtctcactgtcctgtgccaggcacgggagcactgcctgcggcttctggaggaggcgctgagcagcaaccgccagtcaacacgtaccgctgatgagtgagttycacgatcactgggctgaggagcactccaagctctcgttcccttggagactgcaggaccctgtcaaccctggcctgtttgggccacctctccccagattgtacctctcctactccaggggactgcccctacaaccccaccagggccaggcatggctacaacttaggtgctaccagcagctgctgagggacagtaagccacagggtgctcagagagccctaatcagaatccctgtgcccaaggcctaccccaccaggcctggagtcccgcaagagctcagcagggagaagcccaggcccacctgataccttgtgcctgttaccttgcacccacagagctgacctccgggccaaggccgtggagctggaacatgagacattccggaacgccaaggtggccaacctctacaaggccagcgtgctgaagaaggtgggcctggtgcaggcggacccagggtcgttgcaggggcccctccatactctgasgcagaagctgtctgccagctctctgggctcaggcagcccagaactcaccctccccagcccaccccagagacagtttatgggggtagagctccattctccactggctggacatgtttctagccaaccctgtgaggatgggaggcctaaaacttgcccagtggtcagttgcctgtggccactggccacagaaacccacttgtagtgcctagtagaaaaggagggctaggtggggcatgtcaggaggagctggcgggtgccacagcctccctgcctatycctgcccaggtggccgatatccacagagcctccaaggatgggcagccctatgacatgggaggcagtgccaagagctgcartgcccaagctgagcccccggagcccaatgagtatgacattccaccagcctcccatgtgtactcggtgagctgtggcccagtggcctccagacctgtgaccaggaaaggcttcacttcccctctgccctcaggggtgcacctcttgccaaggcctggctccccaccagggtcctgcctgcctcttccctcycayactcctgagagccccgtcccaatgtgagtkactgctccagccagcggtgccctcaagggggcctagtgggctgaacctcctctcctcctgctcacatttacagctcaaacccaagcgggtgggagctggtttccccaaaggctcctgcccgttccagacggccacggaactgatggagacractcggatcagggagcaagccccccagcccgagcsgggaggcgagcaygagcccccgagccggccctgtggcctcctggatgaggatgggagtgagcccctccctgggcccagaggggaggtccctggaggcagcgctcactatggggggccctcccctgagaagaaggcaaaaagttcctctgggggcagytcccttgccaagggccgggctagcaagaaacagcagctcctagccacagcggcccacaaggattctcagagcatcgcccgcttcttctgccgaagggtggaaagcccagctcygctggcatcagccccagaggcagaaggtgcctgcccctcctgtgagggggttcagggacccccgatggccccagagaagtacacaggggaggaagatggagccgggggacattygcctgcccctccccagactgaggagtgcctcagggagaggccaaggtaagggtacaggtagtcatagaatcttctggaacctacacggcagcatcccctttgctcactgggcgtctgaagctcagagctcacccctgagatgggctctcctaggcctcctgggatgagggagccaccaggacccagtgctgtgatgcctgctcttccctctaccagcacctgcccgcccagagaccagggcacccctgaagtccagcccacccctgcaaaggacacatggaagggcaagcggcctcgatcccagcaggtgccggcagggatgagtctgttggggaggagagaagggctgtgggcgaggccaggagctgttgtgccctgctcaaggggtcagggaaaatcagctttctttccacacctggcagcagatgggctgggctggagagaggcagctggtgcggggacccagtcttctggaggaggggagcaggccagtggaagggagctcaggagtgaccctctgctgtggcccttctcaggagaacccagagagccagcctcagaagaggccacgcccctcagccaagccctccgtcgtagctgaggtcaagggcagcgtctcggccagcgaacagggcaccttgaatcccacggctcaagaccccttccagctctccgctcctggcgtctccttgaaggaggctgcaaatgttgtggtcaagtgcctcacccctttctacaaggagggcaagtttgcttccaaggtagggggagtgagtgggctctgccttctcccatgcctggggtatgtgggtgtagtgggggtgggaggcagggagtttgagccccagaacacagtgggcctagggccagccccacgcccgtcctccctggggcctgccttgccgttgggtcatggccgtgggttgctctgggggtcagggcagggtcctgctctcttttttttttttttttatctctgtcgcccaggctggagtgcagtggtgcratttcagctcactgcaacctccgcctcccgggttcacgccattctcctgcctcagcctcccgagtagctgggactacaggcacccgccaccacgcctggctaatttttggtatttttagtagagtcagggtttcaccgtgttagccaggatggtctcgatctcctgacctcatgatccgcccgcctcggcctcccaaagtgctgggattacaggcgtgagccactgcgcccggccaccaagggtcctgctctctgcttctcttctccctctcccttccaggagttgtttaaaggctttgcccgccacctctcacacttgctgactcagaagacctctcctggaaggagcggtgagygctggcattgccagggccaggaggcacttgggagggtggtctacagggaggaggctaacgctcacctcctcatgcccccaccctgaatctgtagtgaaagaagaggcccagaacctcatcaggcacttcttccatggccgggcccggtgcgagagcgaagctgactggcatggcctgtgtggcccccagagatgaccaactgctggctgggcagggcccgcgtcctcccccagattctagcatgggtcatcctgggcctcacctgctgatgccagggccatcgtcttttctcagtccttctcctttccaaccatacttggctttggggatgaccccagacaccccctgaatccaggtcagaggtcagcccacctttctttctrcttgcaaagcctatagacccttctcagagcggtcctcatggctgggttttctgggacacatgtcgaggacagaaggtggagggtggtggagctgctgctggaagaaggggaaggaagagtggcccctccccgagttytaagtcaggatgaggcccacctgtccaaggtatcggaacctacccaggggaccctcagatcctccacccactcccccatccattacgatgccagcttccagccttgcccaggtcagagctgtggcagaggagaggcagccaggccctgttcctgctcagctcctgctcaggaaggccaggcctgacagatgtttgggagaggaataaagttgtgttgttgtggggcatgcaggcgtgcacmcagcccttttctccagggagttttatttcctcagcagctgtttctcccatgcctgggcttgtgctaatgtggggcctgggcggagcctggggtcgggtgggcatctccctcagactgggcaacctcaggtgccccagccgagttcctgcagcccgctttggccccaggccgtcctggagagggtctggctgttttctttgcctgctggtgacgtgatagcagcccctgcctcatggcctgcatgtgggccggctgggctgtgctgaggcaggttctagaacagtgatctgatagcatccaaggcagaccatgtgggtgagacttgggccgggggaggcctcatcctcttctctccccggcctgcactcctctcagttgatgctgggccactcagtgcaagaggcactgctgtctatcaggaagacagtggtgtatagcagctcctgggcctgcccagagaaaggcctgttacaagagggctccccagccagcccctcgcctctgccccggcccacagcactccggagcagtgggcatcggcctgggcctgggctcccactgcacgccatgctggggcaaggccctcacatccaccttcgcaaggtggccagaggcctggccactcacctgtggcagctcaaaccagatggtctggggrttgtcagctgagccatagttgacttccaggccagggggccccttctcctccagagggcttagcaggtggagccgctgcaggctcttcagggcaatgcggcagtacaggctctgggggcagcagagagcagggctggtctcctctccggggaggggtcattgtgggtgatggaacagcccaagggtccctaggccagtgctgaggcaagagctgtgcccacctgggagctggggtccatgaggatgagatgctggcggttgagccccaggagagtgggtccggacagggcctgcatgctcactcgcagcaccccatagacggtgtagccgaagaggggcagctggctcatggcctctgcgggtggagagggtgcaggcaggaaatctgactgctggggccctggaacctgctctgcttggtcccccaggtcagctgagagggacagggcaggcgcagacccctcctcgcccctctacctgcattccttccctcttggcctccagcccccacccagcggtcccctagtcccagacccaccaatgaagctgatctgtgcttcctgggggctgtgtccttccagccgtctcagctcctgacccatcaggttcttgatggaggccgtgttcacctgccgttgcagctgctttggcacgtaagctagcaggtcctgcctaggatgtgtgaccagggtcagtttggcccctgaccacctggtacagggctgggcatacagcacgtgccaaataaccagtgcctattgtgggcaagactagacatccatacacatgaatgaggtgagggtcctgcaccagaggagctcggggtggggtggagaggacagatgtycacaggccccgctgctcctggccagtccatttagggccaggaagggtaccagtcaaatggccttgaccttagagaaggggaggggcttaggggcgggaggtgcctccactcaccctgagggggtattcctgttggccttgctgaggtgctgcagggcggccagcctggcgagctgcgcgtctgccttggcgctgactggcagcttcccctgaaggtagtcccacagcacctgtgcggggagcacggtgaggagggcagcggtggtccaaagccccccatcagttggtggctctagaggctcaagcctccttttgccactgtcaccccccagccaccacagacccacacccttgtggggagaggggcttggaggtcgcccaggcaggaagccgcgccctcaaactgcagcagcagctcggaggcaggcaggctgacctggctgtagtgggtgctgatgtaggtggagttatcgaagtgcagtggggtctcccagtggagccgccggctgtgcaggctcacgtcctggtccactaccacgctgttgaggtattcggcgggctgcaggggccgcaccagctggcctgcatggggagcctaggtccactgctgctcagaccacacacaccctgccctgccaccccagcagaaaccaaaccacctcacccctgggcaggggagtggccccaccgtgaggctccgtccccaagcttactcttctctttgatgaggaagagggcgaattcctgcacttcctgaggctccgtgatacccatttgccggcacagctcctcctgcacttctgctgctacctgggcatgtggacagactgtgatgagggggagggaggctgggggacccagaactgatgcccaaggcctcctcccttggtggcccccaagctcactgtgaaagtctggatattygtcctataatccacaccccccggcaggtgaataagaagcaggcgaatcgcttgtcctttctgccaaggcaggttgcagggtcagtcggccagtggtctcctgtaggagacactccccaccccagggtgtcccacaatgcccatccgccacccccagtaccaggaaagccttcatttcacccggtgggggcatccgccggcgccccccatatttgactgtgcgctggaggtgctcctggctgctccgggccagctctgcagagaagccagcctggggttatgagatggccatgtctccccaagcccaccaagttcccagtcctagaaacccctgcctctcctccatctccccttcccacgggcaccttggctggggcctgaatcctgcagaaacttggtcaggtagggcatcagcctggtcgacggggggaagaagcctgtgagaaggctgaggaagctccagcctcgagtgcagtgttccctgcagggcagagcgctcgggcttcargctggccaggccacagtgcccagctgcccccagaagccaccccaccccaccggtccccactcacggccgggggtgtccygtgacctgcttgataacctggcagtaaatctcatccctcagcttctcctgctggcacagctgtggggacaggaagggcaggtggggtgagggatggcagcggtgagcctggggtctgaagccctggagaaaccctgctaggccatgggctggggctggctcaagatgtctctctcagcttaagacatcactgcactggctactcagttactttcttcgctgctcccgtctccctctgtcacacaggctggaatgcaatggcatgatctcagctcactgcaatctgcttcccaggttcaagcaattctcctgcctcagcctcccaagtattaataggcgcgtgccaccacgcccagctaacttttgtatttttagcagagatggggtttcactacgttggccaggtttaatctcgaactcctgacctcaggtgatccacccgccttggcctcccaaagtgctgggattacagatgtgggcctccgtgcccggccttttcatttattttttatttttttgagacagtcttgccctgtcacccaggctggagtgcagtggtgccatcttggctcactgcaacctccaccctcctgggttctagcgattctcctgcctcaaccttccgagtactacaggtgtgctccaccacgcccagctaatttttgtgtttttagtagagacggggtttcaccatgttggccgggctggtctgcaactcctacctcaggtgatccacctgcctcggcctcccaaagtgctggggttacaggcgggagccgccgcgcccggcccctgcttctctgatctcttactcatctctgctggctccaccttaactccctgacctctgagcggtgctgtgcccttgaacctctctctgtctgcccttctccccgtgtcctcagctggtcccatttgatgactcctggtgcctgcctccagccttctcccttgaaccccagactcctccactgggaagtctgggatttcagacctcacktgtccaaaacagatttcctccaccagccaagacctgctccttgaagacagtagttgtcctccttcccgtagcccacatgcaattggtcagcacactctgctggctcaatcttctgcttctcccttgctgccagcaccatccctcacctgggaccactgcaataacttccttttgcttttaaacttagacacccagaatctcaaacaacagccgagtgaccctgtgaaatgtaagccgagtctctctccagaatcctctggtggtttcccatctctccaaaaatcagaggccaatgatggctacaaggcctgtggtggcctggacccaccatccgctccccatcctcatcctccgttctccctgcagctcactaggctcagccacgctggtcccggtgcgtgatggtgccgaggcttccccccacatctgaactgttgcctgcccttctctgtcaccccgtgctcactccttccctccctgtaggaaggcttctgccacaaagccttctccactgcagcagccccttccctgcattcttactctccagtgacctctcactcccagacacataagttatctcattgtaagcactgcagagacttagcctgttggcttcacagccacaccccsctgcacgcaatgggtgctcagtaaatactttggaatgatttgaaggacagtgaccaagagaaggggatctccttcaggcccagacaggaggacaggcacaggcgctgggggtcgcacagcccaggcttaccttcagcagttcatagagcagatccatctcatccttgccccggggcttggactggtcacccataaaccgcatcagggctgcaggcacgataagaaacagggcacatagctggggctgtgctggggctggccccggctcatgctgttgctgtgcagggccttcacctgccatctgatgcctcactctcaaaatgcatagatgccagccagggcagctggttgcagctcgactcatggggaaactgaggctcctgggtatccaaggccccacacagcacatagcatcctctggacccatggactgccttccaaccccagactccacacaacccacaacccttgagtgggagtagaagcgggtgagggccctggggtccaggaaccaccagtgagcttcccggagttggcagactgggacagagccaggcagagctcaaggagataaggggaccagacacccaggttcatggcactgcagacatggggacccaggatgcctgtggccactcacccaggaagctggctacagccagcttgctcacatcatcactgaggctgaggagcgactcctggatgggagcctgtggccaaagagaggaggccatgggtctggggggccgtgggggtcagagggcagatctacgggccagacccctccctgcctctctcccaccttggtgtactgcaccaggctgtccgtgtcctttcctgcggcacctccatcagtctggcccagcctgtggggggcagagggagacagcccagcttgtttggccctcctgccctcatcccagccagccaggcagggagagtgctaagagcacagcccagtggctctgagcagggtgctctctctcaggaagactgaggacagacaggcacaggggttggcccagtgcactcacaaggcctgggacctccggaagtaacgccgggcgaattcctgcatggtgtagctgtgggagtcgggcagaaaggcataggccacagaggacaggctggtrgcctccgagtcgtcactgtgtgcctggctccaagggtgggcagggcgctgggakcacaagaaacctggtgccacctgagtgtccagtgccctgtcccaggggtcctgccccagccccatccctccccagccagacaccaaaggagcaagaccagaagccaggaaagtgaagagctgtttattaagcatctgctggggcagccttgaact

SEQ ID NO: 94376 - DNA, 59292 bp, Homo sapiens
  misc_feature (1)...(59292): n = A,T,C or G
gctcctgctcaccttcaaactatttaagagaaggcaacgagttcattaggagctcaaggatatccttaatgagcacttccacagacagagtgttcagcatggaggagccgtgacatctccccatttctttccatcccaggggcactgacagggagagtctggggctggccagctctctgcagcagaccacttccagaatttggcagggcaaaagatgcatacatatgtacagaggaacagacgctagactctcagtagaggggccagactgggtcagcttgggagggtccccaagcagggtcagagagtgagatcccagcagacagctactaaaggcattgcctctgtcgagagagttgtgtgagaaagatgccagagatctcaatttctctagagaacctgaaaatcatcctagaagagaaaaacccaacatttaaaacttgctacaaccagagagcactaatatcaattatttttaaaagacaaagttgcaatctgttgcccaggctggattgctgtctcctgggttcaagtgattcttctgactcagcctcctgagtagctgggattacaggtgcatgccacctcacctggctaattttcatatttttagtagagataggatttcaccatgttggccaggctggtctcgaactcctgacctcaagtgatctgcccatctcggcctcccaaagtgctgggattacaggcgtgagccaccgtgcctggcagagagcaccaatatcagactacaacttaaccaatcaaggaagatattttttccctcacaatctcaaaggggcccagagcagcatctacaggtagcgagcggatcaagaaaatgggggaagctaaagttgttttccttctcacctccaccctcacagaagttctccaggcctgaggctggctgtatcttggagggtgtggacaagcgagttttccgtgagttttagcttttcagcattacaatgtgctggccttgatgtcaactgcaagggagcagaaaagctttggaagctgccaaaattccatctaagggcaggaaggagcaaatggtcagaaaacatttgaaatgagtagggagaacaagctgctttttggttgcagcatactgagttcagcttgcttcctcaactggttatagtagtttatttctcccactctgagagagtgaaatgcaggcacaatttgcacatgcttttttcttctttttaaaaaaaaagtggtaaaatatacataacataaaattttcctttctaaccatttttaagtataccattcagtggcattgtgtacatttacaatcttgtgcaaccattactactattcgtctccagaattttttcgtcatcttaaacagaaactctctacccattaaacactaacttcttattcttccctcttctcagcttctggtaaccaccattctactttctgtctctgtgaatttgcctgttataggtacctcatatcattgggatcatataatatttgtccttttgtgtttggcttatttcccttatcgtaatgttttcaaggttcatccatgttgtagcatgtactagaatttcatttcttttaaaatatggctgtataatattccattgtatgtatatatcacattccatgtatcattcatctgttgatgggcatttgagttgtttctattttttggctattttgaataatcctattatgaacataagtatacaaatacctgtttgagtccctgctttcaattcttttgtgtatatacctaggaataggattgctagatcatatggcaattttttttgttttgagacagggtctcactctcttgcccagggtggagcgcagtgacacgatcacagctcactgcaacctcaaactcctgggctcaagggatccttctgcctcagcctcctgaatagttgggtgagactacaggtatgtgccaccacacccagctaattttttatttttttctgaagagatggggtcttactatgttgcccaggctggtcattgtactcttggcctcaagtgatcatcctgcttaagcttcccaaagcactgggattacaggaatgagctcacaataattctatgtttaactttttgtggaactaccaaattgtcttccacaggagccacaccatttcacattcccatcagcagtacgacagggttctaatttctacacatctccacacaaaaaccaacacttgtttttgtgttttgttttgttttttgatgatagcccttctagtaggtgtgaagtggtatgtcattgtggctttgatttgcatttccctaatgactaatcacagtaagtttccttccatgtgcttttaggccattagtatatttttggagtaatgtctactcagatcctttgcctatttctgaattgggttgtgtggagttttttgttgttgagttgtagggggtctttataatattgatgccttatcagatatatgacttgcaagtatttctcccatttgctgtgctgtcttttcactcttttgatagtgccctttgatgcataacagtttttaattttgataaagtccaatttagctatttttctcctgttgcctgtgcttttggtgtcatacccaagaagttttcttctaaaagttttatagttttagcttttacatataggtctccaatcaattttgagttaatttttatatatgatataatgtaaggctccaacttcattcatttgcacatggatatgcagttttcccagcatcatttgttgaaaagactgtcctttcctcctttccccattgaatggccttggcatccttgtcaaaaatcaatggaccatatatgtaagagtttatatcttggctctctattctattccattggtctacatgtttgtccttatgctgtgtattaggctgttcttgcactgctgtaaatacctgagactgggtaatttataaagaaaagcgatttaattggctcacagttctgcaggctgtacaggaagcatggtgttggcatctactcagcttctggggaggcctcagggagcttttactcatggtggaaggcaaagtgagagcaggcatctcacatggcgacaaccagatagggagagagagagagagagagtgggatggcggagttgccacacacttttagatgaccagagctcacttatcacaaaggggatggcccaggccattcatgagggatccgccccctatgaccaaaacacctaccactaggacccacctctaatattggggattatatttcaacatgagatttgggtggggacaaacatccaaactatatcatgctggtgtttttcatttgtttgttttttgtttttttttttaataaaagattgtagtgttctgccattatcctgtcattacataattctaaaattaaaaaagaaacatatatccttatcattgcctgtttctgtcaagctcaataaatgtccttaatggttcatagtattgtaaaattactgtgtcaaaaatgcttaaacatttgtcaaaggcctcttactcctcctttgcattcactgctagtaggcattgccctggactttactctgattgagtaaaagccaaagtccttttattgaaatggccaaggtcctgcatattctggccattcactgcccacccacctgactggctgcatttcccgattctcattcttgcttccttattgttcctccaacataccaatacagtactcctgcccataaccaccttgtctaaataacaaccttgacagagcaggtgcatcaccatcatggacaagcactgccattttaaagttccccttgatcaaaaaccacctaaatccaaacagcatcagcctaatggctaaggtcagcatgaccatacaccacaaatgacatctccgaccagaaacattccaaccctaagataaacccctccctgaccagagacatgcgagccccgagataacctcccctccgacagagacattccaacttggcaataaacttcttctccaaacagaaacattccacgcctgtgataagctctctcactctaaaatccttaaatactcttagtctgtaagagagtgctcctgaccgaaatcggccagaagcccctcttaggtttattcttccaaataacactgtctgactgttgagctgctattagtgtttctttcctctttctttaactcttacaaactccttgccccatctcccatagctcctggctcaacctcctgagtagctgggaccacagacatgtaccatcttgcctggctaattttctattttttgaagagttagggggcagttctcactttgttgcccaggctggtcttgaactcctgggcttaagaaatcctactgcctcggcctcccaaagtgctggggttacaggaatgagccaccacgcctgacccctatttcttcatggcatttgtcagtggctgacaccctacgtatttatctaatttttgtttgttctcccaacacgactggaatgtgagctttataagggcaatgactcagcaatgaagaatgaataggaaaaaatatagcgagttctttattcattcattcaaattactatttattgagaacttactgtagactagacacagaaaacactttcgacattaaacatatagaacttgttaaatagttatgttttgttcagtggttgtacaaatctaaaattaacaattaaaagtgtgtgtgtgttttttaaggggtgggtgggtaggaagtctcacagatggcgagtccagagcagaagccttgaaggaaaatcaaggtgtcaaaggcagagcacactgccccttagctattgctcagtgcaccagggtggagagctgctgccagcctattagatcctctctccagggaattcagaatgtggattgatccaagctagtcattccctactgatctttcaaacagaggtgaggcacgcccgtatggagagcagtttctttagcttgcacaaaccctgtgttcgtcaccagtgtccaggacaggctgcaggtgtggctggggactgtgatcttcttgtagggcctccttagggattgtgcaaccacaaaggcagaagcagctcttgcagagtgtgatgacgttcacaacctatatttgacttgtactatattctcatcactacaggagaagaggcccaatgggaaatgtgtgctgttctaaatatagcacctgcctcctatacctgctagatttaggttgaatctttcactgcctgtgaaggactttagcaggcctcagtgaccggaaagatctacccacgctttcaagcacaggaaggacggtattggaaggccttggggtccagcccagggcttaaagtcagttccattggaatgccattttcagagagttttcatcccagactctccaagggtggcaggctcttgtatcagccctgggacatgtgtcctctagcagtcaggtagttaggcaggcacctgtctatcaatttgttgtttttcttctcagttttccggtaagactaccccgagctcttcaatgttttctttgcttttgtttacattgagtgtatgacgcgggatgggcttcgtaggctggttgtgggttattacagcttcccaggaaggggagaaacccaattcttgccagcacgtggtgggcgcaggcgctcataaatacttaggaataaatgaatgtataagtgagtgcatgaatgggtgagtggacacgaagctttcaaggtgggtgcagggaggtgggggtgtgaagagccatcgaggctaccctgcggccctggcccccaggctatcccgcgacgcgcgtccacgccgaccagcggaaggtgcccagccagtgggggcggggcgagctagccgcgaggacgcgcccgcgggggggcggggctaagaggacgcgccgggagcagcggagcgacgaggacaggccgcggggaggggcggggccacggggggtgcgccgggcggaaggggcgggaagagggcgggcccggcgcgcggtagcgcgggcccctcagtgcacaatggctagagcaggcggcggagccccagccccacccagtgcggagcgcgccgcgagccccgccgcaagctgagcgcctccgcccgccaggcgcgccggcgccgggccatgtactcggggaaccgcagcggcggccacggctactgggacggcggcggggccgcgggcgctgaggggccggcgccggcggggacactgagccccgcgcccctcttcagccccggcacctacgagcgcctggcgctgctgctgggctccattgggctgctgggcgtcggcaacaacctgctggtgctcgtcctctactacaagttccagcggctccgcactcccactcacctcctcctggtcaacatcagcctcagcgacctgctggtgtccctcttcggggtcacctttaccttcgtgtcctgcctgaggaacggctgggtgtgggacaccgtgggctgcgtgtgggacgggtttagcggcagcctcttcggtgagttggactgggagaaggcagcctcccctctgcaaacttccactccccaccccgctgcccgctccgtgcgtccgccccccagcccgccccgcaccgcttcccgctcggccccgcgccccccgccctacaccgccccgctccccgctcgcctcctcaacgctgcccgaccccagccgcatggcgggtgccttcctcttcctccgtcccctcccgccccacgctgtccaggactccattcctgtggtctctcatctgccccccacgttgaccccaaaccccggcccgcctcctttcttatttgtttttacctcctaagatcactcaacaaggcacgaaaccacggctttttacactttgaggaaagagacgagggcctgtagagtcaagagattcaagaaaaaaagtgattaactcgtgaaagttggagggagtgatgagattagattcatgtactactatttgtttcctaaaatgagagtagaaaaccaaaataacaatgtgtaaaaaaaaattctcattagtacttgtaaacctttgaatgctttctagggaatgagacagtttcattcaggtcctcagaatgcaaattggcatgtgccctgtaagctgtttttactattttccgtcttatagatgggttccagcacaccagaatcttgggtragattacaaatggctcagccaataccatctcaggtgaacaaatactgtaattagctctgcaatcggtagatttcattaaagtagaacttcattgttgaagatgtatttcgacagtactcttattatggaagatttaagtttcactgagacatgatgttttgaaggatgatcaacaactcagcaaatcattgaaggaagcgtagaaaggaaattatttttttgtgtgcctcaggaatttcatttgtagggagatttgaaatagaaatgtgtatttctcaaggcttaaagttccttttttaaatcctgaaatccattgatactttattgctttaatcttggtaggtttgggagaacaaaaatctttgtagaattatcaaaaatattttcttattcagtaacctctatgctatgacaaacccaaatattatatttgtaatgattcattttttggcgttttgaaggaaataagaaaatagattttatttgattgcttcagaggttataatattttcctccccgcccctcataagctttaatctgataatttcatttgaacaaacatttgaaatttagggaggggactgcaagtgtatgtaggctgtggtatggacgactatgggattacactccttatattaattgtaaaayacctatcaggcagtttcttcggcaatgctaagaaggttattcaagcccaagcctaaagtatcatcagtagtgttctccagggtagtcaacaggtgtttgttcacagacatcaaagttcttttttccttgaagtgccttttctgtgctggaaaattctgttttcgtgcccgggagtttgaacacaagggtgtactgagttctttataagtgctagctgtcatccaccctcttcctcacctctttcctctgctgatcccaccctcctgtgtctcctrgtcacttctcccttcctgtttttcttcttcaccatccctcctagggtcccagcccagtgattttctaagttcacttagatttttgcctgagggctgccctatttttcagggcatttagtgctttcaaccatgactttctccctgtttttaatgtagaggtggaaaccctgagataagagattccgagacttaasccckggggggcaagttagtagtgaagttactatagagtttaaaaagtttttagcgaagatgatttctttgcctggagtaaattccggagtttgtgcttctagatccaggttaaggatgaagaaaaggagggcacttcctgagttatccctgagcaagaactacctaacagtggagtattgaaggggaggaagttaaaaatgagggaagtagcttcttgatgcagaggcttttggasaggcttgccctatctgttggaaagaccattggtctgatggcacaagagtggatcctgttccttatcctgcgactcatgcattgtgcgggctttctcaagtcacttaatctctccagctatcagttctctcatctctattattgggtaattcagcttaatgctctgtaaggccatcctacttgctttgcattttgatgacccctttgatatctgtaggttagaacgtgmctgatcttagcgcttattgattgtgtcttctgctcctactcctaccctgagccctgtctttctaagccaagaagcagcatgtactatggttacacctcttcagataccatcatagattcagtctccatcttcacaccctgctggaagaagcagaataagtaattcagacatacttatatttatacttgagtgggccaggcaactgctgcattctgtacttagttcctggcttcttagggaatgccaaaaatgagtggaatccttgatatttttgagacagaggctttgactagacaggactgttaggattgccattttagttaaactaaaggtgtgtgccctatgcaatttaatctaagttccaattgaatggcttgtttttccagtatccaggattattagtcatcttgggctagacaggtacagcttgtactgatttatatttcagtaggtttaacagtagtgaaaaccagagctcaaaactgtgcaatgatgaatattagaaagtttagcagtattgttgctttagcctaaagactttcaggtgagtatgctcttcagcaccttggcctttctacctctggccacacagggcatcacacagatgtcttcygcacatggaatgtaaccagcattatgctcaaagttaacaggagaaccttattattttttttttttttaaacttccccttcaaaaataagaacaaacagtgttagtcttggcagaggatgtttagatagaccttttgcttgggatgcagagattcagggttgcagagacagtggcgaaatgsaaacatcactgtattcaaatgttagaagtaggtattatttatgttaagatattttaatatgaaatcagaagttttccttttttacttacacttacacacttttttcctttattacttatatgcatgtgtacattcatataatatttttaatacattttcctcctcagggctattatgagcytaaatatttttaaatggccagttgttttactgaattaatccttttgtaataatctgactagtaattgagtagaaatagtctcatgttgctaccatgagatcctaagggtggttgtggcatggaaaggtcttatattcagctgttctggaatcacacatagactgtaatggccacagaaatattttgaatcatggcagtatgcacatagtttataatctgtttctataaacagtggagccatgcgttccttttagtctaagctcacagctgtgtatagatttattcacatgatagttttcttaaaagctaaagttagagaattgtattatgttatttcttctttatttttgtggaacattatgttcattctctattactatgttgcctgattcttgggagggctgttatatctctattgtccattytcaagaaattagaaaatatgtgagaaagcatttaagacatgctttagtagaggtttatgtccaaataagatgtcacactccaatggattgtcattgttgcatgaaattatttttctcttatattgtttacaatgtattctttcttgaattttcttctttcagagaagagttccagtcacaaatgcatatatgatgcattttgacatttactgctaagatgaaatgcagaaatgaaaccacacatccattttagtattctcagatgtgattagatgtacttgctcatgtttttatgctactgacttataagaaaaaaaatattttaaaagggtaaccgttaaacagctaggacctgcaacttcagtgcttctgggataactggaacatcagaaggacagattttattacagcataatcacacctcatttctttcatcagcagttgtcaccagacgctgttacttcctaaaatggcggacaatcttcccacagagtttgaygtggttataatagggacaggtttgcccgaatccatccttgcagctgcatgttcaagaagtggtcagagggttctgcatattgattcaagaagctactatggaggaaactgggctagtttcagcttttcaggattgctatcctggttgaaggagtatcagcaaaacaatgacattggggaagaaagtactgttgtatggcaggacctgatccatgaaacagaagaagccatcactcttcgcaagaaggatgaaactattcaacacacagaagctttttgctacgccagtcaggatatggaggacaacgttgaagagattggtgctctgcagaaaaatccttctttgggggtgtctaataccttcactgaagttctggattctgcattacctgaagaaagccagttatcntattttaatagcgacgaaatgcctgcaaaacacactcagaaaagtgatacagagatttcactagaagtaactgatgtagaggaatcagtggagaaggaaaagtattgtggagataaaacttgtatgcacacagtttcagataaagatggagataaagatgaaagcaaatctacagtagaagataaggycgatgaaccaattagaaataggattacttactctcaaatagttaaagaaggcaggaggtttaatattgatttggtgtcaaaactgctgtattctcaaggattgctaattgatcttttaatcaaatcagatgttagtcgttmtgtagaatttaaaaatgtcactaggattcttgcatttcgggaaggaaaggtagaacaagttccttgttccagagcagatgtctttaatagcaaggaactcaccatggttgaaaagaggatgctaatgaaatttctcacattttgtttagagtatgaacaacatcctgatgaataccaagctttcaggcagtgttcattttcagaatacttaaaaactaaaaaactaactcccaaccttcaacattttgtactgcactcaattgcaatgacatcagaatcatcttgcactacaatagatggtcttaacgcaactaaaaacttccttcagtgtctcggacggtttggcaacaccccctttttatttcccttgtatggccaaggagaaattccccagggtttctgtaggatgtgtgcagtttttggtggaatctattgtcttcgtcataaagtacaatgctttgtagtcgacaaagaatctggacgatgtaaagcaattatagatcactttggtcaaagaataaatgctaaatattttattgtggaagacagttacctttctgaggaaacatgctcaaatgtgcagtataagcagatctctagggcagtactcattacagatcagtctatactaaagacagatttagatcagcagacttccattctgatagttcctccagcagagccaggagcttgtgctgtacgggtcacagaattatgttcttcaaccatgacatgcatgaaggacacctatctggtacatttgacatgttcatcttctaaaacagcaagagaagacttagaatcagtggtgaagaaattattcactccgtatactgaaacagaaataaacgaggaagaacttacaaagccaagactcttgtgggctctttattttaatatgagagattcctcgggaatcagcagaagctcgtataatggcttgccttccaatgtttatgtctgctctgggcctgactgtggcctgggaaatgagcatgctgtcaagcaagctgaaacacttttccaggagatctttccaactgaagaattctgccctccacctccaaatccagaagacattatctttgatggtgatgataagcagccagaggctcctggaaccaataatgtagtaatggccaaactagaatcctctgaggaaagcaaaaacctagaaagcccagagaagcaccttcaaaattagaaaagagcaatctcgaaatgctgttttggacctccttcatggcatcagaattttctcatttaaaggacagtttcccatatgagtaattagaagtggttatatatgatgaatgctatgcagatgttgtctttaactctcagacattcagcattgaatatctttgttaacctatcaatgagtgatttattgattattgaacattttgtttagaatgggctatatgacccagaatcttaaaacagagttagctttattttagtattgggtatatatgtaagggttccatattagcaactcagcttaaaggtaatgtatttgctaatgatcttcagattttatctttgtctacagaacaattagtaatacccaagtaatattttaattacttttgcagctgttacagttgctgcggcctgttcgaatagtgaaacatacacaaatggtaaattatgtggatcttttgcatataatataaatgtatagacatggtggtaggaatagcaactaatacaaatgccaatatgataataaaatacatttgtctataatcgtttaaagattagctttgcatgatcctttatgcactgtgaaggtctgaagtttataatactcacttgacccttgtaactgatgaggcaatgatgccaccacagtrttctaatttacaaaaagaattggagttcaattagtggttgtaaagctcattttggggaggttgattgcaaaggaaatttgaaagataagatttattcttatttaatacttcagaaaatttctgcagagccctgccctggcacttaaaatagcttccaayaagtaacttagaccaaaaggaaaaatgaagtgccccaggagaagatacttcagaagggctgttctgaaattcctaaggaggaattcttaggaattcctaaggagaaacagagtgaggcctttttaacctgagattacagatacttataaaaccctctataaatagattacccaaggtttttcagtgagaatgaaacataccaccttgttggctctaccactttaattaatatcactataacataactgataggaatgaatcaaaggaggatttaccatgccctttcggttgtgtcccacttaacaaattgtraagtaacaattttctgtaatctctcttgcctcttagctgttatccagagtatagaaactttttttctcccagagccacccaacgtcataaaactggtagtactctaatggtgaaaacctgtggagctgtcagaagacatgaacttgcttttcctctagtccagtttccattcttcagtcagagtatgatgatccctgtgacagtttttgctctgaaatagtatttatcatgtgtttggtacctagtattatgctttctcatgacagtttctcaacaatcctgtgaggcaaattcgcatgtaccctctgtattagtgtgttctcatgctgttgataaagacacacctgagatggtaatttgtaaagaaaaaggtttaatggactcacagttccatgtggctggggaggcctcacaatcatggtggaaggtgaaaggcacgtcttacatggcggtggacaagagagaatgagaactaagtgaaaagggaaacccttttaaaaccatcagatatcgtgagacttatttactaccatgagaacagtatgggggaaacaactccatgattcagttatctcccaccaggttcctcccacaacacgtgggaattataggagctacaattcaagatgagatttgagtgggaacacagccaaaccatatcaccttcaaagaagaaataagagaattattagtaatttgctcagaatctggtatgtggaagagccaacatggggacccagccttttgtgattctaaaacctttgatctttctactaacattcactgttagagagtgtaggcgctgcaggagaaagagaaagtgcccacgaaaattagtctagcattgccgggggtaaaaagcacacactggtcctgcagcttattgaatcagagaaatgtgaagataagatgaactaaacaaacatattttagagcatggatctcgaagcagaatttggctaaattttaacaaaatgttcttcagtaacacatctcatgatctgaagatwgtgttacaaaaaatattatcaggccaaaatttgttcggaatacactaatttttgctcctctatatgtgaggaaaatgagactagacagatttaagtaattgacaacttacttaaagtagcaaagtcatggattgtattgacttttaaaaatatagtaaaagtcatatttaaactttatcctaaagtttaaatctaacagaacaactgaaatacttgaaatagacctataaaatagtaattaaaatgagaaatacataagatgataaataaaatgaaggtgaaggtattccagatctaccgaaaagattttcagtatcacagattattcataagaaattgagaaaaggaacaatcagaagttgcaaaagatggtatagccgaatataatggaaataggaaaaattagtcgaaaataaaggttgatttagaaatgaagaaaatgaatatatttcttaatacaaaataagtgggaaatgagaagttataccaataaaaagcatttamaaatttaggggatattgtaacccagtataattttctgacaggttggactttgaccctaatggacttactggtgaactttttcaaatgtttaaataatgtctatccatgtatcatgaaggacagtatgcttcaaattgtcttttgaggcagacatgttctcagtactaaaagacatttttagaaggattttattctcaacagatgcaaaatgcaaaataaaatattgrcaaacaatacagcaacaaataatttactatcactcaggattataaggctggtgttaagcagaacagccattaaatcagcatcaaaagaacaaatagtaaaatccaaagtattaattacagataacttttcaaaaattcatcattcacccttgatttaattatttctctggcaatkatttaatagacttctcggagtctgttaagtacttaaaccaagaactaccattattcctactgggaaaacataaacatttctcaagtggaaagtaaacagtgttggcactatttttatatatggttaaagagacctgtcattgcaataaaagccagcattcacaaaatgaggaagataaggaaagtagcataaatattttctattaacatggctttacaactgctaaaacttatagtataaaaatgtactaacaaagactaattcaagaagttgcaggatacacaatttttaaaaatctcatttctacatcttagcagtgacaaactgcaatttaaaaagtgtgtttggttattaatatatatgagacttttaaagaaasttatataactacatagagataaattaagaaagatgcctaaatagaagcaagtttaaagagctatatttttaaacatgaacaaactcccatgggagccatgccagtgtagtggaaaagtagtacatggggagatggggagtttttttgaaaaccagaattacagttctcatttcactacttaccagttgtatactcttgggaaagtcactcctagtatctatttcaccatctacagaagagaaatacttcacagaattattgtggggattaagttagataatgtgttttaaaatataaagctacatccaaagaaatgccaatatgtgacattagtatgaaatttactacagytccatttaacattccaactggttgctgtgtggaatatggcataattgtaataaattatttaggaaagcaagcaaagatgtaagtttttttaatttagggggaaaaaatgggagccttgctctccaaatccttaaaacatsctattaagcaacctttctgaatattctgtggtgccaagtagaaagtttaactgaaattaataagccaatggaaagaaagaaatattaataactgctggtggaaagactagctagatgtcagtgtggaaagattagatccactttacatgtgatattccaaatgaattaaaatgttaartataaaaagaaaaatactacaagtctcacaccaatagtggtataaaggaacttcatggcaattggcaaggtagatcaactaagagaaaaagttttaaatgtgtagtaaataggaaaaagacaaaacaagatggaatttaaaagaagctatttgcattacacatggatgcactcagtttttgtaaaactatatgcatatccataagggtttgtactcttaggcaaatttataaagcgatcgtgtataaatgatataaaaaatcaatttgaatggtattcaaatttcctaatattaaaaatgcaactttgacttagttcatgctattgtattagcaaaactgttttaattgcatgtgtccttawagcagcagcattgtgtattagtagccttttaagagaactgtgtagaagactataaaaagggctttataactgatcttttgacayactcactttgagtggcatatgcccaggaaaatatttaaaagaaagaaaagctatttgtacaaagttttctagcagttccactcagataactttaagggggaaaaaagcccaacgattggaaatggttaagtaaattttggtgtattgctagtgctatcacagaatgttatatagccattcaataatattgatatatgtcaaattgtatgcaaaaaagtgagattcaaaaatgttaataagaacataaattgtgtttactgatacatgtgaaaatttaggtctacattgaaaagaatcagaagataacatgtaattcagtttaacattaggggttctttatttttcttctgttaaatattgatgtatgcaataaaaaataaaagattaattggtaaagtggtttactgaactggtgagaaamttactgatttcttagaagtttctaaaattctattttaaattaaaatatacatttctaggtgttaaagtcaaaaaagatcatcttcagatatgtgtggcagaaagttttacaaatcttggtggggaggaattcttggtcaagatggacttcataatttattttttcttagttgatcaccattaargaatagtaatagaaatattagtaatacattctaggacatcagcatgaagacgtcatatactaattaaagtatgcccctaaatgcaaacatgtcacttgggaatcttaaaaaccgtggagatgaaagttggattcatagatgtgaccgaacctggtttgcagagagacctgtgcgaaggccagatcttgggggactgaggatgcgacagaccctttcttccagtcagcgtgagagatccaaatcaaggtgatttaatttaataagcatccattgaacacctactgtgggttatgaattggcattattctgggaaattagagatacaaaaataagtgctctgtacctgacaaacattctgttggaatgttttccttaaggtaaggtaccttttaccttaatgagcatttaaracattttttacccgtctcactccccactgtaactagcacttcctgtttcctggcaaaagaaaaaacaaaacagaagtctctgccttgtgcacggcatcccttttaaaaggtgccaaaactcactacacagttgaaaacaggtggcttaaaggttaaaagccgaatcgtttaacactctccgaagtctatttcggatgacattcagtgagttaagtttttcacattaatcagaaactttttcttttgcctggggaaggagccaagaggagctctaggggattgggtctagaagcccaggacatcaagggcttagggagaggaagtataaagaaattmgatyataaagtttcaataccaagaaattctgattaagattaattttatttgccttcatcttgatggatcaagtgaaagtcatgctcctgttgcrtaaaggtggctgcttcctctgaaaattttcagatttttattttagtatttttaccttcattataaagaggtatttgtagtgtagttcatttccttttaaccagcaaccaaatgtattcacatttcaacagcagggggcacagtacttccagctttctgtaaggcacgaacagtacaaaagctgagtgattcacctgaaagaatttggctataacaaaaatatatgacaacagttctgctccagcacttgtaggaatacttttctcttgacaactacattttcttatgtgatcctcaggacaactgtgtaaggtaagaaagggcaggtatttataccagtttctttgtagataaaacctggaggagttaagtgacttgcctggactctcctactttgtattgagacccattaatgagaaatgaaatgctactgtttcgctttgcttgcatctcaagagtgatttattacatgtaagaatatgtaacacataaagcactatttaaaaagtgtggcttctggaactttagattggcttttcaacaaatagcgaaataatcctataaattacagtttttataattataataaaatgggccaactccgattgaaagagaagggagttaagttcactcctgaaatcagaaaaacgatctctttattctgatatgtcgagcttaaaatctttatatataataccttcattggtccctgctgatgtcctrtgattcttggcatttgcttgttgctaaatatatatttaattctaatacactctggacaactatttaatattaaggcatacacatcagaggaatgactggattcagaggtgcagggttgacaaagtgtrgcaggaagatgaatacctgattataattcagtcagaatgagatacatatttaggcattttatagtttaatccttgaggatactagtacagtgtgttttatgccatttctttttattayacatcatataattaaagcccttgagttctctattgctgctcatttgagactcttacttgttccgtattcatctctgacataaaagtaaatattacccagtatggggaaactttattttttatcattactataagttaattttactatatttgtaagttaagtttacagttaaagcttgtgtaaccattgcagtattttaccagctwtaaaggaaaaatttgggggaatgtatggctgaggaggtgcttggagtcttgtttttaggcaattaataatacagttaatttcctaaaatgatttaagtgaagtattatggagaaatgagctgtacattgttctgttctcattttataaatacataacattggtaatgacccctgctgttgaaacrtaagtaccaaccagatactaaaagtaaaaagcaaaagatgagaattgcactggaaatagtttgtcaggagattgtaatctcctttcaaacaaagactatgtgtatggtacctctgcattccctggaattgcttacatttcacaggtacccccccgcaacgatttgctaattgaaagaccagctagcagtttccagtggctcttttcttccatgtcatcctcttgccttcacactgttctaggttccaacctgaggaacagaggaccactaggacccatctctggtaaaatatatcgcaatcatagtcctggcttcttgtattattagtacagatcattagttttagggtaagcctatatgagtcaataaagctacttaaaaatagtacacatttagatataagaggttccatctaaataattttgctaattttctcccattaaggcagtgatttttaaaccagagtgtttggccttttattggcaaagtctggagacattctggttttcacatctgggaatcagatgctactgtcattcagtgggtagagggctggggtgttgttcaacattctgcaatgcaggtcagctccctcataacaaagaattatccagccccaaatatcgataagcgccaagttgagaaaaactgcactagagcaagtgttgaatattcataaggagtctgctttcttcctcaggttttctgacccctatcagtgcttcttcaacagggtcattgttgataggaactgctgtctttgctgctcccatatagatcccccagttccccgctaccttccctcgccaatcttcacagtggcttccttctggtggtttattataacacagattccaaaacaaaagttttgaatatgagagaatatttttcatcctgccccagtttggtataggttwgaaatttgcaatttttggtatttttaaaataattttatccagaaataccgttcctctgcaaagcaattatattaatagaaatgagaggtaatctttctatgcatggcaactacctcaaaatcaatgtaaaaacattttagcatactgtttttggaaggggtgctattcacttgacagactattggcaaattaatcaaattacacatatataacaatagtatggcttcggagaagcctattcaagactaaataaaccatccataattgtacacacatttgcactcactggtggttcaccaagcaatgagataggcagcagcttggcattttatagatgggtgttaactatagaaaatacttaattgcaatggaatgagtcagtatgcttaatgcagataagaactttaactagacactgccaagtgaagcatagggttcattacaatgtaatatttattgagcatgaaccgtgtcccagtttctgtgctagactctgggatacagagatgaaattgtaactaacacttagcactaactggatgccaatggttgctatatttattttatgttatcctcataaaaacctagttgggtaggtattttattatccccatttgcagatgggtaaatagacaatgtgaagacaaagagcttgaccaagatcacacagctggtaagtggtagaagtgggcttcaaacccaggcagtttgattccataacccccaagcttggtgcacatgctatagtgagatgtgatgtggtgccttcagaggtgtccagtgaagtccaggaacactggtaactgcttctgtgccatgaactgttctgatttcttcacacgttttatctcaatttttaaagcagctctgtgaggtaggtattaatgtttccatatgtagatgagaaataaggctcagtaactctctgaaagtcagaatctgtaagtactggaacgctcaagccattgggcctgacattgatgcacaattaaccaccatattaatcaggctgtgatcatttctgcagtatataaacagagtagtyctgctagggaaatctaggaatgcttcaaaaaagaaaaggtgtttctgcttggcccttatggttgagaaggatttccatgggctgatatgaggaacaacaccccatgtaggaagaatagcagaaacaggcatggaggcattgacacagtctgyatggctggagcatggagtgcctgacctggcatcgggaggcaggacaggtgaaagagggtccacagtgtctggagcrtrgagtgcctgrcctggcgtggagaggcaggacaggtgaaagagggtccacagtgtctggagcatagagtgcctggcctggcgtggagaggcaggacaggtggaagagggtccacagtgtctggagcatagagtgcctggcctggcrtggggaggcaggacaggtggaagagggtccacagtgcctggagcatagagtgcctggcctggcatggagaggcaggacaggtggaagagggtccacagtgcctggagcatagagtgcctggcctggcgtggagaggcaggacaggtggaagagggtccagtgtctgtaaccttgaatagcttgctaagatttgggggcttttattcagcggatgaggtactgtggaaagtttttcttgataagacttatgtttcaaaggttagcctggtgacagtggagaggaggctgggaaaaagatgtggatactggaggcaaggagaaagaatgtgataaggcctggatagggcagagcaaagggaatgaaagaggcagagaacaatttgaagacagaaatacaggatttggaaaatgtctacattacaagttaggtagagagggaaagaaatcgagaatgtctaaaatttcagttttggtgtctgaatgtatgtaattcatttaactggaaacagggtttgaggaaaagcaaatggatttagttttggtcatacagggtgatcagtagatggctctggaaggtcttggagggctttgtatgccattctaaggaattctgactactttatcctagtggagaagcacctaatggtattaaataaggaaacagattgcatttgcttatctttgtgtccatatggaagatgaatcgaggagaggcaagaatggagaagggtgatcagacagaaagctattaaaacagtttggcaagagctggtgagagtctgaattagggcaatagtagtcaggacaacaaaggacagatttgagaactgttgagataaattagcctgacttagtgattgagtgaatgagagtactgcaaaaatggaagagaaatcagaagaaaattaatagctgtggacttggtaatgcaaacatggtgccctgcctgatttggcatagtaactcccacccctggattagtcctgagccagaaagagttttttttgtttgttttttttgttttttgttttttgtttttttaagatttctaggtatagactctttaaaaaaaacaaacttcctgggcttctgaaagctcagggatttgagtcagagcgtgccagtactttgattgccagggagtctgtccaaatacaaagaaactaagccagtgatgggaggagagagccaaagccctgatgacattgcttcaggcctctggatgatgcggcccatatatttctactggacactatgctcgaagccagtgccactttggacttaccagttacataagattacccacttacttgctccttaaagggaaaaaacatgcggtatagaaatagcacatgatgcagaagagagaagtgttatagaagccaagaggaatttcaacaagagcgtgggccaaagtgttaccattgcaaagaggctgggtgaaaccaatgttttagcaattgatttatcaattgttgaaattctagaacaatggttttaaactaaagagtgctaatgaattgaatgggcacctctttaaaatgtggatcaccaggcagcactcctgcattctgggccagtaggtacacagaggactattgtaatcgattgttgggtgggtggtgggttgtcatgcattgtgacataaataagagggaatcaaacaagtatcagatgatatggtagtgagatttaatttctcttctggtgagtattttggcaagttataagaaagcattaaaattttgcacaccttcttacctaacaattatattgtcaagaatttaacctaaggagataatcatgaatgcatataaatatatagctacactgattataatgtccatagctaacacttagtgtgtaacatatgccaagtactgtgataagagctttatgcatattaatgaactctatttttgtctcaactccatgaggtagttagatatatcagtactcyattttacatttagaaaattaaagcaccaggagattaatttgttcaaggtcacacaaaaagtggaggatatgaaacctaaaccagtgcccttgatcactatgtctcactctctctccccacagcactgttaggagagtgaaacattgaaagaaattcaaaagtccacagtttgaagcctgagagagcacatattccagaaatcaacataccaccaagcaaatcattcaggacctacaccctggaaacactctttaccctgcctctccccagaagttgatcagaactgatcccatagtacctcacatccctgcgaaaatcagttgatgccagaagggaaaacctttccagttggccatgcctgggctcacatctctttatgacccattatacttattgatctgttccaatcctgagcttccactggatcctcccttcatgagccgtacactcccctataacttcaacatctttgaacatttctctacctccttcctttaacttaaccctggctgcccccaagaaccctactttcccacctgtcccagctgtgttttccttaacaccaggtataccccagtaccaggtagtagaataggtgactcattaaatatcactgctgcttctgaggcattactccctcattctataaaaccctttgcttcatcaacactctcccaaggtgaggttgcaaaattgaactcacatttgtcacacagatgtgcagggaatataaaactttagctgtcacctcttgttcacagccttaactctcctttctggatcattcccatcagttgacaagtcgagtcaccatccccagttgtcccttgacttatgactgtctgtattctttcttcaaagagccagtcttctgattgtctactacttgcacctccatatcctcagtgaattttattttgtaatttacttaaaagcttttaaatacagaaaaatgcaaataataatacaataagggtccatgtatctactacccattgagcaaagactggtatttctatatttgtttttatctaaagaattaaaatattgcagataaaattcacacttatgtatttcctccattccattttacctcctttccccagaggtcaccaacagggatttaaggtgaatccaagcagtgcttccatccttttgttcacagtttatttacacatttttcccttttgatggaggtccatttcctgtttttcactataatataataaacaatgcttcagagtatatctttataacatttcttcctgcccaatatgcacagagtttctctagggtcatgctgtctaatatgataactactagtcacatgtgtctcttgagctcttgaaatgtagctagtttatactgagatgtaagtgtaaaatattaattatatttccaagacttcgtatgagaaaaatataaaatatctcaataattttatattgattaaaaattgaaataatattttgcatatattaatgtgttagttcaagctgctataacaaaataccctaaagtgggtggcttgtaaacacagaaatttatatttcacagttccagaggttggaagtctgagatcagggtaccagcaggttgggttctggtgagggccctcttccaggttagtgtgcttacttgtgttatcctcacatggcagaaagagaaccagagttagctctgtggcctcttacaacagcactaattccattcaccagggctctgccttcatggcctaatcaccttccaaagatgtcacctcataccatcactctgagggttagggtttcagcacatgcatttggggggccacaaacatccagtccataccagttgggtaaaataaaatatgttattaaagttaattgcatctgtttctttttaccttttaaaaatttaaaatgtttgtggctcacattatatttctactgaacaatgctgctctagggtttataattaaacctgaaattgctaggcatgtacatgctgggcaaattttcagattgattattttcaacttccctcagtccctcccctttatttaacacccccayccccaaccctgccccaccctgtattccccagtacttggtgaactttcctctgtctgggctcctctggcacttaacatctgtatgtctcatttggcatttcaaatacgcaattttgtattttactttgttctttcatattgcgttttcccctttacatcaaggaccatattttatgactttgcttctccagaactaaactcagggccctatacgttagagcaactcaaacatttaaagaagatttagacacaccggcctggtgactgtctgctgttaggctgtgatttgtcctggaacacttttatctgatttacttagaatatgccacaagtttcttgtacagccaggyttctgctttccataatgtgagagaattccctaagaagtaacatcagtctgtttcatgatgaaactgcccatgtctccccaacaagcttctcacttcgtgatgggtctggagtctagggaactggtgaggccagggtgaacctcaagggcatttagttagattttcaagagcttttcatatgacatcactttcagccattttatgatatgctgtgtcaggttctataaaatatggcattattatagtttattggactataagaagcagcagaattgcaaaagacaaggagataggtaaagagggataaaagctagaaatgagtaaagtacagaaatcagaactgcctgtataagctagaaaagatgccctttcctcagggctggctcagcctggcacccggacatcggtactgactctctcaactagggagccttgtgcatagtattacctttagtgtcccgtgcagtactgttttgtgaaatgttaacgcaaatgaatggttcagttcttatgttggggcaatttccaaattcctaatatgcagccactgagcagcagatggggacaaaggcaagcaagttttagagcccagtatgaaacaaccagaaggttttcctgaaarttctcaagttccaaaggatgaaggagtgttgatgtagaaagatccgtgaagaatgaagggtttcacacataaaaggcaccatagcactgaattgtaagtatgtactgtctccttgcctggagtgatccttaattatatctgaaatatatatatatatatataaactagcctgcccactggaggcttgaggcatatctctttattctctatttcttaaagatgtagaagaattcttagataagatgaaataagcaaaaataaataaatacaaaagtrggtgtgccaaaaaaaaaaaaagatacaatgagaaaagaagaaagccttaaacctggcatatayatgaaagtcttctcattgaacagaaccattccatagaacattaaggtccttaaatatattcccaattctgtgctgctgcctgcacaaagagacacagaacgatggcggtgttgctctgctgaaaacgatggaggtcagcacggaccagaaatgggctggctgcggaatccatcagagacaggagagagggccacccctctgcgctgcacctcttggtgtgggattgagactgaaggcttcagaggcatctggagtggtttcttgtgctcctgcaccagtgatgggaattgaggaaaacctgggaattgagcaaatagtgatagagattatattaaaggaaatctgattttaatcttgacccatcgttctgaaagtcaggatcatcagtggtaactttgaaacttacagatattcacgttctgtcctaagcctactggatcaagtattttcaagggcagagcctaggaatcagcattttaaaccatctcctcaggagtttcgtatgtagctatttcaaaagctggcatttggaaacagcattcttattaaaggaaagagacatgctgctctgatccagaaggtgttaaattgaacatcaaagagatgagttaaattcrtgttaaccccaatttgacagtgtggaagagaagcttgaaatagtagaatgtgaatgggtctgggaactagccttgttctaacacctactttgtggtcttggggaaaatatctcatatttctaaagtttccttctcccaccttcttttttttatttttatttatttttttttttagttcttcattacttgacattctcagatcaggatgactaagacttccaaggaaatgagatttttcttgcctgtccagattgttccacactggtcaccaatatgggttttgctttatactccaacgcctccacctcacaagtttgtttacaacttaaagcattttgcccaaacatagaactgcacaggctatatagcaattatgtttttccttagcacgttatatatgacaagcttcttctctcattcttctcatatggtcctgaggtatcacatcacattttctggttgattaattactcacacacaattacagtggagcgtgtgatattcattcttgagagaagagtcgcactcgccctctgtgtttccgtgctctccatttgcatcagcagcagggtaatagaaaatgacttaaatggaatcagtgttgttatcacccgctctaaaacctaaaccctgagctcccttgagagctttgtaaattataaatgatggaatgaagatttaattcagtgcctctgagattccctcatatttttcatttgctcttctgggatatcggatttttttcatttgctgtcaggttaataatctaggaaggaacacttagaaactagactcatcattgcaggtcacagagctattccacaatttattcatgtgttgaatgttttcatagaattaaaaagacctcaagcttcgccattgctgagaaacaacttgctttgtgtaatctttttggggaaaatccaaatagagctccacactagcagtcagaaggtctgggttctcattcaaatagaaccttcctagtcttgtgaccttaggctagtcacggatatcagccccttttctcacactctcatcaaatggggacgatgagactttcctgcctgacatgtctggaaagatctaattagaaaaatacattaaaaagtactttgaaaattataaaatatcatatgaaataaagttattataatgtattattttgattagagaataagagatgataaatccaacaggattgtcatttgactttataacactcataaaaatgaatattttatagattttttaatagccaaaaattatcatgtaaggactgtcaaatcatattttgagttgaaaaagtgatcctttaggtaaaaaacagcagggagttggccttgttttacattcttctgacctgtgtattgctagttccctgagggaaaaaaaaatttttcattgaaatgtcaactgtggctatttctaagcaacatttcacctgagtgtttggttaattacagggatgaccatgtttactccaggatttttccttgttatttggaaagaaacatggtcatgtgtatataacttttatcagcagcaaatacataataatcccttgtactattctcggtgccaaaatgatgtcaaaatacaaagacatacttaagyatgtcatacttaagtttacaatttaattggagaggtaagacataagtacacagaattgtaccaaaatatagtaagtaggaaatagcagccatgaagatagtctgtttgtgttgtggacggacagagtgaggtatgcactaaggaagttataaatggtgaaagagaaggttgactaggtagtgcaagaaatacacagagtttcttaatagccagcatgctatgcgaagggagctttgcaggtcattattccagaaagggctttgtgaaagtaataagatgattatcttagcacacgttccccgcatataaagcctaaggcaaagcatatatgctaatgctttattggggatcataatcccagggaatcaaaagtaagggaatagaggaagaggcagggaaaggaggaggccaaatcttagagagaggatgcaccaccgagttggccacgattggtcactgggtcttgcaggacatcttcagagagaccacctgatactaacgcagcttgaaacaacccatggcatgacaggagagtgcaagcaatctaatctctggcttcttcctgtctcttggccattggtccaactctgctccatgagatgttaatgtccgtttgcctctaggttggatcagccagcttcaggcagccactagggaagccagagcctccatgggtccagtgcagcaaggcactatctgcatgcaggtatgcaatggtggtgacagtggcagcagctgaagctttgtaactatagtcatagagccaccgctgctgggaagcaaggcaaatagggcacacagttgggagtaggagcttgtgagtggagtcacggagatctgggatggcacacgaatagagtccagtcaatgattaatctggtatgtggtgcccaggaggatgacaaaggctgtacaaacaaaagaaatttagtcatagatggctgacagcagtcatttacggaatatgaacctgcactagaatagtgggaatggtatgaggcacagaaatgaatttagaaatgtttcctaagraaggctttctgttggttttaaaagcaaatacgagataggggatagaggaatgggaaaactaagcaaaacaatgtgttcctaaagtggatcagagtctgatgcagttttcttgagcatactgtggtaggttatcataaaacctagattgctgtgttcacgaaataattttaagtgttggaaacaaagcgtatgcctcccattttatctgtggtaccacacttcacacttttattctatgagtgcagttgatttaggattagaatttagaattctcagttcctgttaagtgctttcatccaactgtttttttttttttttttttagactttggccccactgtgcttatgtttgttattcttctgaaccttaattaattccacagagaagttactttatattcaaacttttttcccactcagcccatagactctggtcatactggatatttcttgggtctcttagtgtaataatgatccttttttgcattgttaaccatcttgttcaatatcctttcctgacgagcagaggcataagtgtggaaaaagttctaatgaggtcctattccaagatagggctctccttttccttggttatggtttgtggagtttaagcaattactggggggaaacaaacgcctaaagctttgtcaaatcagaggcaagtcaaaaagyctaaggctaggatatctgtccaaaygggactatrggcagaaaagcctaaggctaggatatctgtccaaaygggactatrggcagaaaagcctaaggctaggatatctgtccaaatgggactatggrhagaaaagcctaaggctaggatatctgtccaaatgggactatgggcagaaaagcctaaggctaggatatctgtccraatgggactrtaggcagaaaagcctaaggctaggatatctgtccaaatgggactatrggcagaaaagaagccaagtttgaagccagaatggtcagagaacaaggggagctgatattaaaagaaccaaagataacagaggggaggtaagcctggcacgatttccaagctactgcacaggtgcccagcgtagcctaggaggagatgcttatggtgaaaaatgtccgtatgttttaacaactakggcaactatttgccccgtgtaccctattttttaaaaagtcactaaatttaatagaaaaaaaatgcaatgcatgtgaaataccagtgaaggatagcatgagtgagcacaatggaaacaacagtgcagcattttaaactgtgagcagctagccacagaccacagcatgtggcctgcctcattcaatcgttctcttctggtagttcactggccctctcttaaggggcctctcagttttaaatgcactgcaagcatttgggtagctatgacacacaatggtcagaaatacatttctatataagttgattacctgaaatcataatttttttttttaattttgagacggagtctcactctgttgcccaggctggagtgcattggcatgatctcggctgactgcaacctccacctcatggattccagcgattctcctgcttcagcctcccaagtagctgggactacaggtgcgcaccaccaagcctggctaatttttgtatttttagtagaaacagggtttcaccatgttggccaggctggtctcaaactcctgacctcaggtgatctgcctgccttggcctcccaaagtgctgggattacaggcatgagccaccacaccggacctgaaatcttaattttttaacccacagaaagggttttaattttgatgttgtgctgggtttcctttgaaactgrgtcattgtgcacgaaatatgaagactactgaacatgaaaatttaatagaatgcagtttccacatcctgatgtggaaaacatgtataataaaaaccaactaccactttggttgttctagcaaactgcttttattggtcaaatggaaatcactcattctaacagctgagagatattattcaaatgaaggtagtctttcattttctctaaaattcttcaatttaagaatattgagtttaaaaaaatgacttcttctgatatcaaagttagacatggttacagaacatacgtagcagacaatggattaaatatgctttctatagagactctacatcactaatataaaatttttgataattctcaaagaagaattagaaaacaagtatagcacagcatggactttggaagcagactgtgtgattcgagtcttggctcttttattttttagcttgtgaccttggcaaatgactaaaccattattgcctcagtttcttcatctgtaaaatgggaatcgtaattataattcctacatgtctcacagagttgttatgaagattaagtgagataacacaggcaaactgcttagaacagtccctgactcatagtaagtactctctmtaagtgttagtgggctgaaattactattgttaattaaataaaaaggaggaaggaaactttctcaacaaataagcaatataaacaagatttcaaagaagaatyggttacttgcttaaaagaacaaactttttcaagcatattaaatgtactggttttctttaatattgtttcatatgactagatattataggagcaacaggatggtatgcccgctgcacggtaacagccatgattgagtgggtgctgagcgatgagatggaggagaccctaaaattcatctccctgaggagatctgggttgggatttttaaggggaccatgaggagaaagaggatgggaattggggtcattgattggttgggttacggrggatgaaatcatcaggatgtggaaactgcattctttggtgagtcagcttctcgtgggatccttcaggcaagctgatgtcagtagtttcactggtacgtaggacctgaaagaatatctcaaatggaaaacttaacattatataatgttcaagctgttatccatagagcagttaaggggaactataattttgtcacagggtctacgtgattctgggacaagaggcaaacagctatgaggaagcaggtcagagagcaagctgacctcataatccatgctgaatgtaccacaggcttggtttattttacattccccttgtccttttttccttgattaattttataaagcttctagggatggtctcataaagaccactacttagtaaagtagtatctttattaagcaatcttcrtagagttttgtttccattactatctgtgaacaaaaatagttaaactgcatctttttaaatttctacaaattgatatatttttgagtgagcaaaattttcattaatttgagaaaaatgcatccacttagtttggaagattttactgtgtgctcattcacccagccaactctgaagaccacaagacaggtatttacagttgccccattttataggtagagaatytgaaacacagtccatccagatattgttcaaaatgatccagagaatctatgatgacataagttatcccctaatcatcttcacttccaaatttacttctctcccatttcttttctaagtcaatgcaacatcagctattaattataacaaaccagtaacccaagacttgctttgattcttcttcattcattcccacagccaacaaagattaacttccttaaatatggtggaccttcctcgtctctccttccctagtgccactgcatcagtttcattccttatcacagtaaccatatttctccactaggtttccctagaaccaggcttggctcacaatccattttcctcattgcagcccaagggaacttcccataaggaaaacctccaaaagcaaaatcaaaagaaaataaaattctctagaattgtattgtaatggaagtgaacaaaaacagcttaatggctcctcagagccctcgggacacattccaagctccacgcatggcatttaagggttttctaggagagtccttagtcttttcattctctgtttagaactccgtcctaccattttgaattatttgcaggcacctaaatggtgcaagctctgtcagatctccatgtatttacataagctgttttctcttcctggaataggataagaggattggctgtcacttcacttccccatcatttttttttttttttttttggccttgttaaagtgtgcttaatctttaagactcactcaggtggtacctgcttcccacagaaaataccctgagttgggtgttcctcctcccactataggcagagtttctccttctacctccttctctggattatgtgctccttgaaggcatgggtttcgtcatagtaaccttttcatacaacagataaggattgacaggtctcggtcatggccttttttgaagcacgctcttctgtttagtgtgaacttgcttaccccagtctagatacttgaactataaataagctattcaatgtggccatctagtggccaaagtgagaaaataactgtattattgggtagttgtatattgataaacacaccttgtattaatatttaagctccagagttgtattgatatttaacctccagagccctgtccactcccatgccttccacccactttctactacttaaagcaatttagctccaagatattcaactattcagtaataataataataccttacrcattaccactttactaaacawgtatattctcatttaatacagccacacacccacacgatgagacagcattttggtactattatctcagttttactggtgagcaaattgagattctgggatgttaattaattttcccatggtcacagagtaattatgtgaaaaaaaatgaaattgatctgaagtcagacgacattcattaggtaatatggagaaaactggaattgaatacaggacttttggcctcaaacatatgtctctattactgaatttatcacattgttttatagtagtttacttctctgtttataattcatctttttttcttattgtctagcacagtgcctgacacacagtatgtgtatgacatgtgtttgttgataaatattgcaaatgagtgtataatcattaagttataccggaaagaactatttgactcaaactgatgcacagagtagacatttaaatatatattttcacttctgtgcttttatacatactgtatccttggccttgaaatatcctcactcttgtcaacttgataaaattctcctgttcatcaattcaaatgttgctttcccttaaaaccttccccagtgtttccccaggcagagataagtacttcctccattgcattctccagctccccgacacagctttgtttaactcttatcacattcctgtaattgtttgtttacacatctgtcttctccagactgtgagatctttggcagcaattcaggcagaaggaacagcagtatcaaagctgccagctctgagtgaacatgccgggcagtttgcagcctgggcatggtgtgtatcccgttgcagcaagcttaggcaaagcctaatgatatgccaacgagatttgattttacagaccgctgtcttcaaaaccgctggggggtacataagccctttccaatggttccaattttgaaatgtttatattacacaattctttaaacttaagacaaaaaatgtagatgtcacagtttaaatatggttgtatacatagtttttcaaaattctattagggaaaacagtaagaaaaagatggactatccctgctgtggaccatggacagccatggaaggcagatcagctttgcgccatcccctgtagtgactgaccttcccacctcttggtcctggctccacaccccagagtccaaggcactcttgcaataattcaaggaggcttcagctagaaatgcccatttcattcctttctgttccttaacacctattccatcttttatracccaacttaagctttatctctgaatgaagccagtagtccactgggattttactttttctggtttgtttttgcaccataactttgacatatgatcacatatcatcttacattgttctgtaatgttgtgtgtgatataaaaatacartattgcagtcttcttgagggtaggaccacatgtctctggtttctccaaaagacctactcagcacagtgataggcacatacctgatccatctgcagctttgcagcgaaggcacagacatcactttaccactggtagaatttgtggagaggtagaagtcaccctttagtggcggcaggtggtattaagacaaaatcacaggatttggagtaagtcttgggttctcaaaactgtctccaccacctgttggtggagacatcaattccttaacccttggagccacagaccttctttccaaaagagtgcatatcatatgtggagtgatgatcatgggacctggtgcataaccggcacccagtttgcagcactcatcattcccattgcttttcagtgttcacggaaatggatgcaccatttgaagtagaatttggttgtcttcctcatatctgctcatgtaccatgyagtttttatttgcgttaataaggctcaacatcagttaaaggtctaaagtagttgtaagacagtcctttcattcttatcctcctggtggagtgttgtgggaatcaaataaaatacagcaattaattccaactcaagaccaaaatttgttagtaaataaagcattgatgggagaagggctgcatattttgcaaggaagatgtagattagatcatttcagttgggttaccctcgaagactaagtcagtctgactcatgctgccrctcagttatatgctcatgctatcagggaggacttgggaaatacaaggtttgctagatctgtactaacatgtcatggtacataacagctgaaatcaggcacctgaaactcattgtgcttgcyaagacacaggcttgatcaaaaacgatattagtaaatgttaaagtctctttgaccaaaataaccagaaggaaagtgttactaacctcttgcaccctgacttatcacaaggctgggatttttcatacttcagctctgagtgcaatgggtcttttcctgacagcctgccaatagcagctgcgtccctttctgtgtccttcccaccatgcctcacattatcctctatccctgcactctctattcttcatagcactgcactgatttgcttgtttgatttgtttttttattgtctctcttacccactggaccttaaggccatgagggttggtttcactcacctctttatatttattttctagcacagtgactgaaacatcacaagcaataagtaatgactaaatgaatgaatgaatatatgaacatgatatgctcataccagcttattttaccagcttattgctttcaccataagaactcatttattcctctctaaggtacattgaaatttactaatttacaacagtgcaattatttgtactgagttttcttgcctatgaaagactaaatcgtattcaatgtaaatcaactaaaagttgagtgccaaactatgttttaacacataaaggcagttataaaagtaaataccattatacttaataagaaagtttgtaaactacgtaaaaccaacagtatttcattagcgtcaacttatgtcattttctttaggtttttagatttttttttctaggaatctaatcaggtaaagaaaggataatatcactttttagataaaaatttaataaggtaaaaatagacttctgaatatgaaagtcatctaccttgatactttcattgtcccaataatcactactgtgatttgaattaaatccattatttgctatatttgctattatatcattactttctttctttttctttccttttcccttccttcctttcttccttccttccctcctttctctttctttcttccttccttccttccctcctttctcttcctctttctttctcttccttccttccttccctcctttctctctttcttcctttttctttctttctttcttctttcttctttcttycttttyctttttcttccttccttccctcctttctctctttcttcctttctttctttcttttctttctttctttcttccttccttccttccttcttgctctctgtctgtctgtctgtctgtcttttgatggagtcttgctccatcgcccaggctggagtgcagtggcacaatctcagctcactgcaacctctgtctccgaggttcaagcagttctcctgtctcagcctccgagtagctgggattacagatgcatgccaccatgcctgtctaatttttgtatttttagtagagacaggttttcaccacgttggccaggctggtcttgaactcctgacctcaggtggtctgcccacctcagcctcccaaagtgttgagattataggtgtgagccaccacgcccagccttataccattattctctgaagtattttcttccacttgattccaaaacccaatcttcttccggtcacttgagtatttagtaaatttcgcttattaattcaaagaacatttattggatgccatgtgtgtgagacactgggaataatattgctccccaccctccaactcccacagaagaacaaacctgtcatggtataaatgaatatkaactatgttataccaattgctttctgagtccagcacctctgtatttcattcttattaattgcagaatygtgaaatgttaaaatatgaagggattttcaattttatgaaaacaaaaagagattgtttgatttgctgaaagttacagagctatttcgtggggagctgggacttgcctccaggcctcttaacccgtttgccacccacacccttttctcccttacttctcaggagaccagtcttattttcattcttcatttgaactgcttttctttcagtctctctgcgtccactcattcaacaaatatttatgctccaggaagctcacgattttattgtcttccccacatctgttcatacaccttgtggtttttacttcagttcatgtaatcactcgctattccttaggcaggttagaaacctccaagttattttatttattttatttatttatttatttatttatttatttatttatttatttatttattttgaatcagagtctcactcttgttgcccaggctggagtgcaatggcacgaactcggctcactgcaacctccacctccctggttcatacaattttcctgcctcagcctcccaagtagccaggattacaggcttctgccaccgcgcccagctaatattttgtatttttagtagagacagggtttcgccatgttggccaggctggtcttaaacccctgacctcaggtgatccacccgcctcggcctctcaaagtgctgagattacaggtataagccaccrtgcccagccaaaaacctcaaagttacttttaactcctctcgcccctcacgcctcacattcgataagcagatagattctgttgataccagttgctaaatgtttctggaatccagactttgttgttcatgccttttaatgtcatcctagctgaggtcccatcatgtctygcctgctgttgcaatagccttcaagttggtttccatggcctccaatcgtgttttacattctctactactgccagaatgagcattcactactgaagaaaaaggaggaggaggaaaaggggaatctaatgatgtaaaaggacaagagagtaacagattcataatttactatttcatagaggaaaaggttaaaaaataaaaaaaattaaaataacacaaacgttagctagaagttaaaagcctttgtcaatgtggctctctctaaatttctctttccatctcctgtgagccctgacatctttgaatcatcgtttatagaccccttggtgtccttttacgtctccatgctctggtacatatttcttcactcttcctggaatgtgtttctgccttgtgtgcaaatgcttccctttctgtgtctccaatccattgtgtggcagtggkagcattcacacattgcatggtcattgtcagtgtttacacacgtacattcccttcagacatctagagttctgtctcttagtcaccatgggccatccactgcacagtgcctggcacatagtaggtgcttgttaagtgagtaccttactctctgaaggtgacagagaaatatacaaacagtatcattaaagcggacttgttgcaaaatagcggtacacgtgaagcccatgcaagcccagaagaccccctgacccctgtcagcaatccttgtgtgtgaacagtttgtatgctgacatctgctggtagtacgcaggttacrgcagtcctctgcatcattytactgctacttcrttcagcttgagcttttgcaaccccctttgactttacctctaatagctgagtcagagacagccaagagaaggtaaactaaaagagacacttgctctagtgactctcccttactcgttctggaatttctcttcaggagaaagtttaatacaataggggcatctttggggtggggctgatttagggcttttaatttttgtctaatctttttttaatctgcatggcattttccattttattttattttwttttwttttttttttttgagataaggtctggctctgttgcccaggctggtgtgcagtggcgcaatctcagctcactgcaacctcgacctctctgggctcaagcaaccctcctgcctcagcctcctgagtagctggraccacaggcgtatggcaccacatctggctaatttttgtatcttttgtaaagacagggcttgccatgttgtccaggctggtcttgaactcctaggctcaagcaatcctcccacctcagcctcccaaagtgttaggattacaggcgtgagccactgactgcccttctgtggttccttttatggataactattttcagtataatttccttgggactatagacactattactcttggctttgagagcactctatcgatctcagatactctgtaaggtatttccagtggagaatgtatcacgtctcttatgccyggtttccccctgcaccatgctatacttttccactttctcttcttgcagggattgtttccattgccaccctaaccgtgctggcctatgaacgttacattcgcgtggtccatgccagagtgatcaatttttcctgggcctggagggccattacctacatctggctctactcactggygtgggcaggagcacctctcctgggatggaacaggtacatcctggacrtacacggactaggctgcactgtggactggaaatccaaggatgccaacgattcctcctttgtgcttttcttatttcttggctgcctggtggtgcccctgggtgtcatagcccattgctatggccatattctatattccattcgaatggtgagttgaagactacagatgcccccctcccaaaccacatccagggtagaaaattttgtctggaaaataatgaaagtcttcctatgtcatcagtagttgcccagaggtagagcagttctaggggacttcccatctggttgaattttatgctatgagtcactctctggaaagatcaatgcggaatagcatttactctctctacatccctctctcaaccaaaagaaggaaagaaaaatcttctgactgacaaaatcagcaaccaaaaaaccctacattatccaacactcttaaaatttaagaatttaaaagagggaactccacacttcccataactttgtttattcagaggtcatatgaatttgactagagaacagcacagatgttttgtttggcgatcacaccagagtcataaagggtaagaactgaccacaaacaatttcacgttgggtgccaacaagaactttccagtttgaactcaaacccagtgtggaacaggctccacttcccagtctctagctttggccatggatgtttccttcctcattcactgattcttccaactctattctctgcttctgtctctagtctcttgctcactccgtcaaacccttctaactttcacctttttaaaaaatcggacttagctacatgcatcactttaaatcatttgtttctacattctttacatatgccaactttgttaaagacaaaatccctagatcagttcaatcatctattttctctatgcctgtagtcaaactgcaaggaggagctggaaaaaaaaaaacaaaacacatctgtctacacttagatgtcctctcagccttgttctaccaacctttctatccctgtatgtgtggtctactgtctccacactgtgactattacacagactcatttctcattttaatttctcaccctactgtctcctctcattcttatcaagtaagtctgcttctgatttatcggaccaaacaaagccattatcaagggttcctttgactccttacytctctttacacaaaccactgattcttaggactctctcttcagttacagggcgacaggagaggtctcccaggaccaactcgattctgtattctgattgctcccccacccccttccatgccccagagacacttcttaataattttctctttcccttgtatcttcacactctcccttaccactggccctttccctttagcatattaccaggctattttgtttttaatcacaatctactctcagctccctctagctatcactttatttttctccwttttgtcactgctaactcaaagaaccattggtgactcttggtgccacaatgtcactcactaagcattcatttacctgatatttattgagcatatcaaatatgccaatttcttgctgttatagactgaatgtttgtgtccctctcagattcctacgtggaatctctaaccaccgatgtgacagtatttggggatggggccttgggaggtaattagggtcagaggaggtcatgaggatggggctctggtctgatgggattaggggattagtgtccttgtaagaagagacaccagaaagcttgctctttctctctctctctctatctctatctctctctctctgtctctctttctgtcttcccacgagtgcataaataagagaacatggaagcacacagtgagataacagtcaagagaggaggcctcagaatgatacctaccttgccagctactctacctgggacttcccagcctccagaactgtgagaaatacatttctgttgtagttcagggagttggtagtttagtaagtttatctagcattcattcctcaacttaaggcaaacttgtgactccttcctctaccgcactgccactaatacagccctcatttcaggtcattgatgagctcccagatatgtgatcccatggacacatttttattcctttctagcatcctcagcgtttgagactattgccaacttctactttcttgtggtggtctcctgccatcgattctagggcgcctttctctgctgtctttgttgctgactctctggcgccatcttcttatctcttccaagggcttctcttctttgggcctccccagcatcctatgtttagctcttgtcccatgctacacactggccttgggtggtctttcatactgccaggatttctccttctgacacaagcttgataacatctccatttccagttcaggtctttcttccagcctctaacagatcctcgtagtcaattgcctcttgaacacctccacttggatggtccacagactcatcaaatttaacaaatataaagattaatttgtcatattttccctaaaatcttctgctcgtctatttgctttctcattgaatagtcatcattcctagataccaagaccagaaattagggagtaatctttgactatgtgtcatccatgtctcccccaacacacaactattgatcagttcttatccatgccacttacatgtttttttgtttcgttttgtttctgtttgtttgtttgttttgttttgttttgttttttgagacgaagttttactcttattgcccaggctggagtgcaatggcagaatctcggctcactgcaacctccgcctcacaggttcaagcaattctcctgcctcagcctcctgagtagctgggattacaggtgcccaccaccatgcctggctaatttttaaaatatttttagtagagatggggtttcaccatgttggccaggctggtttcgaactcctgacctcatgatctgcccgccttggcctcccaaagtgctaggattacaggtgtgagccactgctcctagccctatattttttggtatatccattttttcctctcccactgccacagactcagttaaaaaaaaaaaacttagttctcctttttaaaatttttgctttcctctattccattctttacacactgccatcagagtagttgttctcaagtattaccttcagaagttccactgtctttgtgactcaaaataaagcccctgggtgtggccggcaggtcctgtatggcatctcctgtctacctgtccagcctcatttcttgacactcctgtcttcttgccacctcatgatgcggccaatggtaatatttcttgttttcagaaactgactttttattttgcctcttgtcttagcacactttctttctctggaacattctgtctctcctccttacttgactaattcctccttccctcacaaggctaacagcacgattttcttgctctaacccaccctcagaaccagyttcccatcctgtgtactaccatatcctccctgkttacctccctcatggcttctacccgctcagtgtgcatcatcctcaccaaatagtgaattcctcaagagcagagactgggtcttatgtattttctcacctgtgactggaacagtgtctgcatgtagtaggtaatcagtgactatttttggaatgagttacaagcagagggcatagaaaggggaagacaggagaaggggtgaaagtgtgaagagatttgactttagctgctatctaaacagagagctcactgcaagtaatttgcctccgtttccttattcagagagaggtgactcataacaacgatggagacatagctacacacttgagaatgaagattcacagtgaaattctttgaaaatctacagatgtcttggattaaggagcactaggcaccagccatttatacagccagagaacaatctgatagagaattctgaagaatttgtyttagctggttcattctttaggacaaatttgtgcctgtgccaatcatttcaaaattgcttcatccatagcaattttgaaaactatcctcaaatgattgaataaagagggtaagacatgaaatcgagttttttatttggaaaatatttaatgagcagaatgaaggaatagaaagtaatgaaagaaagaggcctgaaaaagataaataaaaaataatcatgaaaacttcacatatataaacccaaataatctaaaacattagtcaatatcttctccttatcccaaagaggaactggggatgtatagacaaacatttatttaaattaatttccccagcatgcatgtaattccaagatggataaatgagtgttctcctttgataaatggcgagaggggataaagactgacctgcccagaaaatggtacagataaaacgattggacctaaatactggaggtttgggaggcagataactgagatktggttatgttgcttgttaattgaaactctgaagagtcaataatgattccagatatcctatagtatcataaatgtacatatacatacaagtgtgttagtctcatatctagttcaaatataaataagtatttaacctcaaaaacaaccccacaaagtcatacgtgtggaaatggaactcaagttctgttaattctcataggtttttttgctttacctcctttcttgtttactcttagaggaggttgttgacttgctcaatatcacactgcgagcaaaagtggttaatctgggatataaacttagatcttctaattccaaatctagaccttttatcaaaaccccacagccttcctataaactagggaagctcccccaaaatgatgttttgaaaatagaaaaatattctatcccattaaataaaacagtttcttttaaaatagaattgcacacacagaatagtagtattcggttggtgcaaaagtaattgcggtttttgccgttaaaggtaaacctttaaaggtaaccttttttaaaggtaaattatttacctttctgcacaccaaaaatatgttcctaaataaaaatagttatctctgaacattgtaataagttatatgaattttactacaaaaatacaaatactttatatattgattttttaaagtaattggcatagtggtaaaggaatattatttacctttaaataaggtgaccttcaaaggtttacctttaatggcaaaaaccacaattacttttgcaccaaactaataccagaaatttaatacccacttttccctgcacatagtctctctaccctaaaaaaatcaatgatttaaatttttcctatttctctctattctttgctaatctgaatacatgattttgataagaatrtaatttcttaaatataattttggatatcagtaatttgagaattttaattaaaatatatttctaaataatctaagcacatgttctaaatgatttctttggaaattctttctcttaatttttatgataatgctagaaccaaaaggtacacttagagttcattgaaatgcagtaaatttccaggcataaagtaatcaatactaagtattaactatatgctaactacttaaaaaatcaatatatagagtatttgtatttttgtagtataattcatataacttattacaatgtttagagagaactattttgatttaggaacacatttttggtgtgcagaaatattctttgcctgtgtattattatgacacatatataataataggagaaacagcaaaaagaaacatattcaagaaactcaaagaactttcaggctgtacatcattactcctccatccctttaatgggaacagactgcgagtagacaggctggttttagaggaaggagttgttttaccaagtgctgttctctgcaagtgatcccctaatgaagccaatcacaaacaaatttctcctgaaattctactttacagtcattagcagtgaattgaaaagctggttttcagtaagaattcacttgggaattaagtgctcatcaaggccagctgcaggcttaatcatgcagaacacctgacatgacatgggtgtgcagtctgatttgagaactggaggactaacactctatagagtttccaggatcacrgggaaattctttgcattttatcgtgactctctcaggctgtcttttagagacttgaagatctaggcaaaataatgttattcttattaagtaaataagagaacgtcaaaaaaaacactgaaggatgtaggaggctctgtagctcaaccaccctatgttgtaagtggggagactgaggcccggcaaggttaaagctggactcagctatgagtcttggatcagaagtcagcctgccaaggtgccattcagttctctttccatttaggtggggccaagaatggtgtctgaatatctgttataaaaacaacaaaagaracccttcttttgttttttaagccctttcctttctttctcctttctgcagcttcgttgtgtggaagatcttcagacaattcaagtgatcaagattttaaaatatgaaaagaaactggccaaaatgtgctttttaatgatattcaccttcctggtctgttggatgccttatatcgtgatctgcttcttggtggttaatggtcatggtcacctggtcactccaacaatatctattgtttcgtacctctttgctaaatcgaacactgtatacaatccagtgatttatgtcttcatgatcagaaaggtaagctttgcaattaactgattgttttcaccctgggcatagagttggaaatgacagtgtaatacttttacagaggtgattcagagtcgcttcaattaaaaaaaaaacaagaattttttaggaattaaagggatctggaagaaatgtagaatatttccaaagaaaatcataacaattctaagaactacccatagggattcacacttgttaggtagaatkctagtaaaactaatatttaattcatcagaaaatagtttatgcctagtaataacagctacaatgttaataatacatttaaaattcctactgtaccaagcaagttacaagcaagtcacaaacaagttacaagccagtttacaaaactccacaaaataggcactaatattattccttgttttatttatgggttatgaataagttcagagaagttaaataacttgcccaatccaggaagtattggtgccaggatttgaacctagtttgctcaaatccccaaatccagtgcttataactcctcacttggggttatagatacttgtagcaattggcctgggttgttattcacatgccacagcaaatgtctagcctaaattaatttggttcaagaaacttcctgggcctggtgtggtggctcaagccagtaaacccagcacttgggcatgctgaggcagaaggattgcttgagctaagagttcaagaccaacctgggcaacataatgagatgccccgctctctcaaaaaaaaaaaagaaaaaattagctgggcatggtggcatgtgccttagtcgcagctactcaggggcctgagatgaaaggatctcttgagcccaggaggtcaaggctgcagtgacccactatcgcaccagtgcattccagcctgggcgacagagcgagaccctgtctcaaaaagaagaggaacttccttatcatctgtttctgtagttgaaaggttttgacttgatggctatgagtcatggctaggagagcccacaaaatgattattataaagctgagcctctacgtttcagagaatttaaaagttaaagataatgcttaattactccattggaattttaaagataacaggtcataataataacaggcaataataatcactgtgacttctaatgctcaagaatgtggaagaagagggcacttttgtaataaccttattatgttcagtgctaaatctctctgcctcttattttgcctttccttctctttgagtattattggcttacactctccataaactcactttcacctgccttaatctcctctcactgacagtgtttctttccctgttttgttgccttcaattggtctatttcctttaacccagagattttaaacttggagtccataggacctaaacattccttgagttggcctcagaagagccactgaaaccctggaaattgtttataacaattttttagtatgcacacatatgaatttttctagtgagatggtttataactttaattttctatcagaggttaagatattttagggaccaccctctcaacagacaaaattaaaatacattaactaacaattatttgttgcactctttctctcagccaatgggctataaattagtgcttctagaactttaatgtgcatacaccacacctggaaatcttgtaataaatgaatattctccttcagtatgtatggttgcccaatattctgcatgtctaacaagctcccacatggtcctgatgtttctggttcctaagggcatactttaaacaggaagtctaaaagatacaaacaaaaacaaataaataaaaacaacggtccttgtcctcaaagagcttaccatttatatggaaaaacgttttttggcatacatactctatttaacctttacagtaatgtatctttaacacttaaccaaacaatggtttagtgaataaagtctcaaacaaatatttttattttttaaatttttgaatcagatagaaaaaataaatatttttaaatgtgagtataaactgaatgctaacttgcataagattggagctcaagacattatcaggcagtgtttgctgtaaaacaaaacaaaacaaaaaacaaacaaaaaagacagaaatcaatgtagctatttattatatttttaattggtatttcctaatctgagaaagtccayatattcaacatttatttcgctctaaataatgggataacaattacattaacttttgatttatgttttactggtcatgatggaccgactactataacaagcaaccccaacatttcagtgaattaatacagagtttattgctcatttcaggtcacagttcagtctaataatgtattgggtggaggagatgggatctgtcctatgcagtcatttaggaatctaggttccttccattgtgtgatattatgatctttaggcgttggccycccaggttcttgtagagaggaacagcagagaggagaagcggaaaggaggccaagaaatattattsgatgttgtacccaggacacggagaagaacaatgtttgttgatgacattagtgctgtctgctatagtatttttttccccaactgattagtaatttcgatagaaaaaaaaaattcttcacctaattaaagagacattagcaagtacaccaggctgtaaactctgccaggaagagccttatctgtttttgatgcttatagtaaaaagtctctaattatagcacagtggctgtcacctagtagatgcccactgaatatttgtggactracttaatgttcaaaatctcttaatagttgtacctgccctcatagaaagtgtgtgcagattgaagcttggaggattacaaggtattgaaatggtcctacatattccggttaataagawttagaatgaataaaagacataaagctctggggtgatttaggtagatctgagcatgaccacataaccccacatccacacctgctaacaaacaaaaaacaacttaaattcagctcaactgatttcctcgaatgttaatccagattagtgcccaacttttacttaatattccactttattttttctctgcccagtttcgaagatcccttttgcagcttctgtgcctccgactgctgaggtgccagaggcctgctaaagacctaccagcagctggaagtgaaatgcagatcagacccattgtgatgtcacagaaagatggggacaggccaaagaaaaaagtgactttcaactcttcttccatcatttttatcatcaccagtgrtgaatcactgtcagttgacgacagcgacaaaaccaatgggtccaaagttgatgtaatccaagttcgtcctttgtaggaatgaagaatggcaacgaaagatggggccttaaattggatgccacttttggactttcatcataagaagtgtctggaatacccgttctatgtaatatcaacagaaccttgtggtccagcaggaaatccgaattgcccatatgctcttgggcctcaggaagaggttgaacaaaaacaaattmttttaattcaacgggtgctttacataatgaaaaaaccacttgtggcacacgatgggcatctaacatcatcatcttctaatgtgttggagattttcatttcaaatatattttttaaattactctattttccaaaacacgtaatgcatttttctcgaaaataccttactgtaaaaataactgtcgcgtacacatgtgtgaagtagctagaacatactgaattttttttgtactgttggactctattcagtgtcatgtcctatatctgatcaagttatcaaggagataattctagaatgaaaaagaaaatcctcttgttggaaacaaaagacgttttatatgtgcagtatgacaaagaggagtttcagaracaactttgaatccttgtcagcctggagaccagcaccagaggaatctacaaggcaaactcccatatatttgcttcccccaaattgctgcccctacagactcaaagctctttttctttgttttgttgtttctctaaaaatttactgttctttgtcgatgctatataagccagggagttctaagacgccagctctttgagatttgctcattcccctgtatttcccacatatatattacatatacccgctaataaatttatgtttgtttttctcttgtcaatctgtcttttgttataggggccccagccaaggaacctaaagtgggtagaaggaaaaattattttttctttccctacaaactgaacatggattattagaactcaaggttttcattgacaatatagaaaagaaacactgaatcattttattttattgcccaatttttatttcttatatgactctagtgtttcatcttcataattaatcatgtttgaaggatttctgagtgactcagcagcctgttaaagaaggatgaaccaaagaaaacatttcactaaatgtgcttttaaaaatcaagtgtattgctggttctgctgcagtatgtagtcgaagaataaattagtaaattgcttctgagggtctgaaattgaataaagtaatggctttgtatttctataaaagttgtctccccttgtttcctttccattctggcacatgtagacatttaatttatgaataaaaccctttcctgtccttcacttagtatgatattaatagcctttttcttatctttagagggtaactctgggctggcagcggtggctcacaactctaatccctgtactttgggaggctgaggtgggcagatcacatgaggccaggagtttgagactggcctgggcagcatggcaagacccggtctctactgaaaaataccatggtagccccagctatttgggaggctgaagtgggaggattgcttgagcccaggaggcagaggttgcagtgaacccagatctcaccactgcactccagcctggtcaacagagtgagacctgatctctaaatacataaataaatagagatagatagatagatatagatagatagatagatagatagatagatagatagatagatagatgatagatagatagatagatgatagatagatagacgataaacagatagatgataatacttatatttgaaggtgggaaaataaaatgagttcattttgtaagtctctggaactcccctgaattccttatttccatttctggttttatctagtaagtctgagccctgtggttaggtaagttccattcacgtaatgaaaagtgcagttaacatgctagttaagttgtgatttttagtcctaggtgttgagtcaatgctgttgcgagtcctattgtgtcttttaaagaaaaggcatgattactgtcttccctgaggcatctagggccttactttcagagaagtgaaggatcttagtcattgcacttttatagttagaatgactcaacctgagtgtgtgtaatgtagggaagctgcatgtttcatcttttaaaatgcaccccccaaccagtaattgcaattaacatacagagatactctacattcagtttaattataagcagaacactatcttccactagtgaatcaaatatggcaatggaaacatttttttcatgcttaattttggtcacagagaaatcatgcatttgctaccacaaaacctttctatcacctgctaatgagattggaaatttgttctagggagtccacggcctttgcggggaaacatgttgtattccggaagtgagctatccagttccatggtcttctcaagcggaggaaagatcgtggtgacatgtagtgtataagtaggtaggtactgctgatggctatcagtgatcccaagaaaaagagtcctttgtttatcacctgtaagacagcaagaactctcatttcatttgtccagagattaaaatctgaaaatagacttcattttttaacaacaaaggggtaaacaatgtcctctttgttctttaacctgaaacaacaatttacttgcatgaccaccagatcaggaactgataagatcaagataaagtcaaggattgggagcctcccttctccctctctcccaggaaactcatgaatccaggtcttctgtatgaaaaaaatttagcagtcagcttttgtccagccattaaaaaacctttgcagtttagaaaaagagctgtgaattcttagaagagtactgctgtgctggggccacacatcattcattccttctcagaagcttcccaaaagtctccaggagaagagtggtggcctggtggcctctgtgactaagactcatgtggagactaaacaccagctgtaaacagtggcctgaggctcattccagcctgagtcaggtgctttcccatggcatcctggcctatttcttttcttttttttttttttgacagagaaatctacttgaatactcacatgtaaaagttacacatcacaagagattggacagtagcttagcataactaacatagctatagtgaaaatcatttttataaaaaataatctagatgtggtcatcagaatttttggtctgcttaagttaatgtttgaagattgacttttatccctccttgaaggatttgcctggcctatttctatccccgcacttactgtcctgcattctaactgcctgctggtatcttttccccttttagactttcagctccttaagggtgggggccctgttttattcatcttgcacagataaaccttgatttcttccaatccattctccatatagacatctttctaaaatccatacctgagtctgctggcctccctgggctccctgtttctctcaagataatactccaggtgtttaaagccccgcctccaccctctgaccattctcacacactgtgctgccttccagctccactgaaatatgtttctcatgtgtcttccgccttcccctgtcctggcccctcctgttctcctcgggggcagtttatctctctccagtgccactgtctgtatcccctactagcctctgagctttgtgaaaggtgtgaactggtcatgttcatcaccatgccagctcagtgctattatgtaccaaataaaactgtctgttgaataaatgacgttgtaaaatccccaaagtggaagactagggaatcagaattccttccatttaatggcttctctaggccaactgcccaaaatggatgtattatagcattccattggaatagatcttttaaaagtgattcagttctgtctaattttacaaattaaactcataagaatattgcatgaagcaaaaatcaagaacagtacatcttgctaaaataaagtaaaaagttgagaaatattagcatcagtttctatcttgagattcttcccttcaaaagctctctttgccacctccttgtaatgtttttcagtaagcactgttccctctctgtactcaggacagtttctgtttggaaggcaaacagttggtgtctgtcccattatttctgtatttgttggaaacaaacataatcataatactatgacatttcaaaacaccacattaaaaaataaataaaatgtaactgttccaacctttttttgccaatgccaacgctgcacagcctcatggtatcttattctggaaaaagtgacctgcagggaagtttaaaaagtattcttgtgtattctttaacagctaaacagaaaatcaaaatgaggaaaagtcttcagtccagaccttaccattgtatagagagggataaaggtcgatggcataatcgcatgaagaaatctctccatgttcttctgaaaaatgaaccagcttgagttgacatgtgctcgcatctgcaataatgacagtcttaaagaacgcttttgaacaaatacagctatttctcactgcgacttagtattattcttcattcccactcatcgcaatgccaaacacaaagtagtcaaataattttttgtttccataatgtcattcccaatccattttggtaaatgtcggtcatataggacgttgcctcgaaaatgtacagcaattacacgaaacctgctagggaagtttattttgctcagggttcaatagaggaagtcaatttcagcagagggtttgtttaaccagaactgcaggcaatctgtgagctcaaagatttgtctaattttctgttgcttcctggttgttttgtaatattgcttacggcaaaaagagattgtttaaagctatgtttgtctggacctactctttcttttaggacagatactgtgtcgtagccatcccgtttttaaaggagaagacaagatacatcaataaagcctacaatatcttgtaggttatcctctaccacatctgatgcaattttgctcaagctgaagtccagtttctttctgtcttcaggagagatggcaaatagctggtcactctgctttaaatttatcttgtaaatcctttcattttattattttaaaactataatcacaatcacttaccatgagctttacatgtgactggttcaaaatggaattaatatgtttttttttcaaagtactaatcttcctgaacatgaatttctttttggtattatgcatttttttttagtgcataagtttccaaaggataatcaatgctactctaaatatgcaagttataatgttatgagtgaaaaggccattcaacatttcttagattttctaaatatgttgacacatctgaaagttgtattttcattaaagtaacatattgctaaatgtctaagataaaagcatgtgaattatcagaggttttgttacctcctaaacgtccttaaagtgtagatagagataatgtgtattggtcattgccactggccagagtcacaatccacccaagtctaaggaatgctatgtgtgtgtgtgttttcttatctgtaggtattcttatatagcatgcatgagatgggggctgaagcaaagaaaaagaaaagaacacttgttagaatatcagtgaaccatctcatggaataaagccaaaccttctcactcacctctatgtaattgtacatggataggtctgaaatcgcgtgatcatctgggattctcaatcttgagaacacaggaagacacaaacctgtaagttaaataatacatctttccaaaaccttctataaaaatgtgctgaactctacacaggtcaaattaaatggtacgttcactaccaatgctctcgctaatttttttaaactataaataaccattctgtataaccaacaatctatgactattgacaatacacagagcatttcctgttgtgattaaataaaaattacaacaaaattaatctatattattgctttatctttgttctctagtgccccaaaccagcgttgacagtgtgttcttatgcataaaccctctatcaacctccaacgtcatgtgtaaaccagtcacgcgagcacaaggaaaggaggaaacaaaatatctctggctcctgagcatctgagagagatgactgggaaataaccaaaaaaaaaaaaaaaaaaaagaaaaaaaagatgagaaaatttgtcctggaattctatgatctcttcagacccaggcaccagtattcttggactttctaaaacaccacagcaaacatatactatgaacttactttacggtaggctttttttttctttttaaaactttatagaaattattcagtgttcacaactctgaagttgagagtatcatccccactttatagatgaaaaagaacggaggctttagaaagatgaagtgatttgctcaagatcacacagttaataagttggcaagtcaggacttgaaactgggtgtaagtttaaggccagttctctagtctatcctttacctgaaacaagtgtaaaatcagaggtggcctttgaaagcacgtgatgctgggaagtaggaaaaggttatccagttcttaggctgttgtttgtgccttcttttatatatgtaatatacaaaccctccatccacctccatggtcatgtgcaaaccaatcacatcaggactaggaaggaagggcgggaacaaaatgcctctggctcctcagtatttgacagagataactgaaaaataatgaaaaaaaaaaaaggaatttatgccgggcatggtggctcacgcctataatcccagcactttgggaggcagaggtgggtggatcacttgaggtcaggagttcgagaccagcctggccaacatgacgaaaccccgtctctactaaaaatacaaaaattagctgggtgtggtggtgtatgcctgtaatcccagctactctggaggctgaggcaggagaggaggcggaggttgcagtgagccaagactgaggccactgaacttcagcctgggcgatggagtgactccatctcaaaaaaaaaagtattagatgcaatctttgatagggcaaaaaacactggagcttctaagtgtttctgaggatgtgttgtagggtgactatccccaaccctcggtccatggcctgttaggaactgggccgcacagcaggatgtgagtggcagttgagatggcattaccgcccaagctccgcctcctgtcagatcagcagtggcattagtttctcataggagcgtgaaccctattgtgaactgcacaggcgagacatctagct

SEQ ID NO: 94377 - DNA, 54922 bp, Homo sapiens
tattttaccacaataaataaaatatagactggaaaaaaaataaataaaaataaaaataaaaatacaaacattagctgggcctggtggcgggcacctgtaatcccagctactcaggaggctgaggcaggaaaatcactttaacctgccgggtggaggtccagtgagccgagatcgcaccacttcactccagcctgggtgaaagggtgaaactccatctcaaaaaaaaaaaaaaaatgggtgagggatttcgatcgaagctgtggaatctgctccagatctcaggttgctactatagcatcttgggtagatcactcttctccagtaagccctgggctttctcaaaccttttctgtacaggaagcctgtcccttctgccatcctggtcaactctgcctaccaaattcctgcccatctttgaaagcgaaaccctaacctaggctcccctcctttgggaaacttcccaaggcctccctccatgctacatgatcatcttttttttttttttttttaagacggagtctcgctctgtcgcccaggctggagtgcagtggcgcgatctcggctcactgcaacctcagcctcccgggttcacaccattcttctgcctcagcctcccgagtagctgggactacaggtgcccgccaccacgcccggctaattcttggtatttttaatacagatggggtttcaccatattagccaggatggtctcgatctcctgacctcgtgatccacccacctcagcctcccaaagtgctgggattacaggtgtgagccactgcgctcggccgatcatctctttttacagactagacatccttaatcacaagtatcttttttttttttttttttttttttaagacagagtctcgctcttgtcgcccaggctggagtgcagtggtgcaatcttggctcactgcaacctccgtcttccaggttcaagctattctcttgcctcagcctcctgaatagctgggatttcaggtgcatgccaccacacccagctaatttttgtatttttagcagagatggggtttcaccatgttggccaggctggtctctcaatcctaacctttggtgatccacccgcctcggcccccaaagtgctgggattacaggcgtgggccaccgcacccagccaatcacaagtatctttataggacatctttattttttacagaaaataaagtactagcagagtacttggccttcagtcgttatttctttagcccattagtaatgaataaagaggtttcgctagcaagaatgaaagaaaggactaagagaagctctactattttctgaaaggtgataaaacatacaatcagataaatttccttttaaaaagactttcaaataaatctttagaacctgcaaaccctcccacaaagaaaatgtaaacactgaaaggtaggaggcaattttactttatatttctagtatcaccacagcttttcattcaaacaaacattgccatgaagttagggaaattcctgctgcattcacttgttactttttttttttttttcagtaatcaagttgaagaaacacttccactacttaaaaaggtacctgcaaattactttcacatttgttcagctatcctaatgggattttcacttagtaaatctgctactcaggtatctgctatacatatggattcaaaagtggatgatcacttaatacgagggactgaaaaaagcaggttggaaccagcgactcagttatttcaaaacaccaagaaaataagattagaagacacaaatcaagaaaactttacaaggattgaagggactggcacaggatctctttctgggaaagccttgggttcagtggtatatgtcaaagaaagtgatggactagaaatgacagatgtggaatgaagcaatttgtacgtattaccaaagaaaccaaaaactgcctttgactaaggggggtgttgaaagagaacttaaccttattaggaaaccctgacaaaatgatggaagactattgccttattttgcactatttgtgaatcatcttacactgcatttttttatgatgcttattcaaaaggcagttgctttagggtgaaaaagccttccaagattcaaagcagatttctctggtattatattatatccttcttaaaaaccagagtttttaagtaacagtatttgaatggcatcaaaacattttcattttaatgtatttctttaacaagtggttaaaaaaagtgtccaagcagccgggcgcagtggctcacacctgtaatcccagcactttgggaggccaaggcgggtcaatcacctgaggtcaggagttcgcaaccagcctggccaatatggtgagaccccatctctactaaaaatgcaaaaagttagccaggcatggtggtgggcacctgtgatcccagctacctgggaggctgaggaaggagaatcgcttgaaccctggaggcggaggctgcattgagctgaggtcatgccattgtactccagcctgggcaacaagagcaaaactccgtctcaaaaaaaaaaaaaaaaaaaaaagtccaagcaatgtgacatccgtatttcacaatatttctggtgtatcagttttgtatgttacatttccattttgggattctgctttatgatactttactttcttacattttgcatttttgttctgtaaaagatcactgccaataaactgcaaaagaccaataaattgcatatcttcagaaggatttcacattttaaatcgtgcctttaaaactgctttttccccccacatagaatccattttagagttagaaaagtgttctttccaagtgttaatagtttgtcttgcagatggtaccattttatgtcaccaatatttaatatgagaaaaaacaacctgtttaaaaaccttgttttgtatatcagttatgaaaatatctggtagttggaaatctctttaatattcattttaaaagaggaaagggcatcttttccggggggaagctatattttattaatcagaaaaatactaaacaaatgtgtttgtagggaatattgagagtgaaaaacaattgttgaatgggacataagccaaaaagacaatgctttttattatttacagaacgtaattctttagaagagaaaaaaaatacataaatcattcatttgttcacctagcctggcactgtgcttggtgctggagatacagtagtgaataaaatagccagtgccttgtagagttttgtgcctgtctactaggaaagacaggagattatacagtaattatataagatgcaaattgtgatatgccatgaagaaacgtatagcattcagagggacataacacaacacaagacataccacataaaactgattttttttaagatggtctcactctgttgcccaggctggagtgcagtggagcgatcatagctcagtgcagtgtcgaattcctgttcttaagcgatcttcctgcctcagcctcctagtagctaggattacaggcatgtgccaccatacccagcatgtttttgtatttttttagagacagagtcttacaatgttacccagactggtctcaaactcctggcctcaggtgatcctcccactgggccataaacttgattttaacgtgggaaatgggaaagcgtatctcaggacatttttgaaagcaagttgattaagaaagtaaagaaacagaatggctactccatagagcagcctctgaggacatttatagcttttgcagtgacatggttgtctaagtgaatgatggtgatggtcataaaagtggagagaaggggatagagtccaggtgaagtctgacaggatgtagtcatggtttggaagcggaaagtgaggaagaagaaagggcttctggcaaaaaaggctttagcctttatgcatgcaggatccctggggggaaagagtgagttcaggagcatggcttttagacttaccaggtttacaaggcagttgtatctatggaactaaaaaatataaattttgaagttgtatacagaaatggtacttagagccatagaatgaatgaaattgcttaaggaaaatgtagtgtgagataaagatctgaggaactccaacatttagggctgactagatcagggtagctggcaaaggggactgcggagttggcagtgaggctggaggaaaacctggcaaaagggactgaggagttgacagggtaatgtcaaagttgtccacaggaatctccaggttgaggtagtcaaatgaacacttagatgaatactgaaaagtccagtggatctagcaatatgaatgtcacccgtgaccttagcaaaagcacttttgctggaataatggggaaaagccattttggagtacgttgaaacaatgaatgggaagtgagaaagtagatactggatgtatagcagtttttccaagaagcttggctcagaagggtagcagacaggatgacaagtggaaagagaaatgaggtcactggaggattgttaaagagtacagcatgtttgagtgtcacttgaaaggttccagtggagaagctgaagaagtaggtaaaggtaagaataaccaagggacagaagtcctggagcagggaggagggaatgggattctttaaaacctcttcatcaagaaactaggaaaaaaaaccaaagttgtaccatctcagatttcagagaaagggaatttagaaggaagtaatataagcaaagagcaacaatattctgtgactgtttttaataataactaggaaaattcctagtgcagttaactctgaacaaaattcattcccacctgcataatacaagatagacttactcagagtgaccttggtaaaaggtgtgataataaagaaaggaggtgtcattatgtcttcattgtagctttatatgaagccctggtcatttaccgtatcagcatcagcaaactgaacactgaatgattcttactccaagaggcaagtcttagtggtttctattttaactgaaggagagattaatttctgtgcaaggttgaaaaaggtgaccacaaattctttgggcttctttcatcaagaggtgaagtccattaccccacgccttaactctgggctggctttgttgttgttttggccaatagaatatggctgaggcgctgcttccaagattaggcctgaattgagatgccctagcagccaggcagcacctgccagagcatgaataaggctatcttggaccgcccagcgtagccaacctgtgctgaatgaagccacatgaatatgcccaggagaaactagcagaagaatcacccaccttgcccacgttagagatataaaccactatttgaggcagtttgttatgcagcaaaacttagccgaaactattaccttgctaccttgactgctggtgtaatttcccatctcatggagtcacagagttttcttgccaactgcagtgagttggcaaatgggaatgatcagtagcctcagtgtgttttctgatccactccatcctgtattatcatctgcgaataccgtttttcctttaaatgcaatgtgtctttcaaagctgacttgaatttctcacctttcgagttacctgccatttggactcacttatttggaggagatatgtaaagacccagcgtaatacctgtatgctcaataaaaagtatttgctggtactccttcctgcccgtcgtgtgacctgactgctctgggcttctgggggctccccctaaactcgctccacgaaatgacccctccaacctggcacgcccgctctcctaccttcgcccagggctggccgttatctctgtgctgtcacgcggggaagtcccatctgaactggggccttatgaccttcggtacttttattcgaacgtagcctgcgtccctgcctcgaatctggttcccgccctgaaggacccttacttagcactcctgcgggctgccgggaccccacggctccgcaggcggagagactaggcgcgatccctgcgcgcccctccttctcttgcgcttcagggggccggccctcagggggcggggcagcatcgcgcgcaaggcctgccggttgctcggggtcgtatgacgcacttttccagctcgagccctcacgaggccgtgggtacgaccggaagccgcaggtgggtgaagcggaaacgtttcaaaccgggatgttgcgggccgtagcgcgtgggcggccgtggggtcttgggcgctcgcggtgtttctggcggtgggtcaggacttgcgggtcgcctccgccggtgttgaagcctcttgtgtgcacactttctcctcagcacttgggacgacctaatttcactgttaggaacggttgatcccgaacacaggagggagggtaaatatcgtaaaacatgttggacgctagctgtgtgcacgccccctgggagccaaaagggcgaagtaaaacatgcacacgaccgtaatgagattctgagtaagttgtatatcattagagaggggacaaaataatagggtcttggcgaggtcttatgaagaagctgcgcctgcctagaaagatagatgggattgtgctgttttcgctttcagttcagtgatggggagccgtgtttggcagtgcagaggtagcgaagtgtcccaagaacatggaaggtaaggaagtcttccgaggaaaaacttcaaaaaattagtcattaaagggtgagagtagaaagattcaaagtgattttgaaggaacaaaatttaaccagaacttcaaaggcttgacactatcccaacgactgtgaaatatcctgaaataccgtgcattactcagtcggggtctgatccgctactggagcatagaataaaaaaagaggggcacacctgtgccagatgaatccacgccttctctaggggagagagggtatcccggcttaagagcaggggctctcctgagttaaggaagtgtcttccccagagcccattccgtcagacgttcatatcatgtaactcagtccttttctgattatgtattcaccaagcaaacttaagagttggcttgtcaccagacctacagtgaataattgcacaggctcatctgaatatctgatagatggtctatagttctctttgtaaatcaataagctggcagtcagggatttttggacatccctttgttttcactttttctcactctgtgtgattttttcttatctttcggggttcaattgaaatgtcacatcctcactgaggtctgtttattggtttacgtgttcaggtgcttagaacagcttcttgcatcttttctcacatgatgcctttttaatgaggcttagcctaacaaccctatttaaaattgcaatgtaagttttctcacatacacagttacaatcctccctttatcagctctacatttttttttaatagactgaatctcgctctgttgcccagcccatctcggcccactgaaacctccacctcccgggttcaagcgattctcctgcctcagcctcccgagtagctgagattacaggcgccygccaccacgcccaggtaatttttgtatttttggtagagacggggtttcaccatgttggccaggctggtctcaaactcctgacctcaggtgatctgtccaccttggcctcccaaagtgctgggattacaggtgtgaaccacctcgcccggccatctactttttttaatagccctccttatcacctttattcatttgactcactgatgattcccaagtgctaagaacaatgtctgtcatgtaattgatgaaaactttgttgaattaatacctttgttgtgttttattcacactgtatatacaatacctggatgaagagagatattttkagcactattaaaatacatgcattggctcaatacatgaattggatcaattctggaaccctaacaagatcacatttttgaccaaagtcaatatcttggactatagttaatttatcaaggtaaatgccactttgatgtgtcttggttaggaatctttgttcacttgagggaatacatggtatatgataggaacagtaagcacagaatagagatgggaaagggagaaccctgtcataacagttaacatttcatatttgccaaacatgaatggcttatgcatattaacacatttaattctctcaaccattttatgacgtctgaggccactgaagcagctagaggttaaaccacttccctaaagtcattagtaagtggcagagccaggattaaaaatttaagtccttaactactttgccatcctgccacactctgcacatgcagacaagagtaagagccttaatcttgggaaaagatatttcacaagatctttgacaatttccatakccacagacaccatccagcttattagtgaccaccactcctatttgttactttctcctttaaggctgcccctacctgaactctggatcccagtaccatcactttctcaaggacctcccttctccagtgttgccctctcttgactcccctaccagcatctaaacatgctcagatctattgcatcttaagtcctctcctaactccacattcctttctacctactgccctagcttttccacttcacaactagaataccctcattgtatccaccttgggcctcctatttactcagtacatctggttcttaccaagatcactgataaccttcttgatactgtttaatagatccttttcaaccctcatcttatttgctcaatctttggcatttggcactgttgaccatcttgtctccttgaagcttccataatagcatatttaaaatttttctgccttttcttctatcctcagcttcctttgggagctctccctccttcttctgtatgtccgttaaatgttgctgctcttcagtcttatgtcgcaggcccttaaatcttctcactgaaccaccttcctgtggcctcagttaccatccattgagctctgtgccgttggccgctagttcaacagtcaaaatgaaccaattatcttaaccccatacttcctcttcctataaaatctgtcctaggaaatttcacctctttgccaggccagaaatcagggcataatattaataaaatagttagcacatattgtgtactttcttcartgccaggcactcttctaaccactttatatgtattagctcatcagactcagcctgataatatgagatgagtcctgtcattatccacatattagataacaaatctgagacatagaaaagtaatctgccttaggtcattcaactgataaaggatagagttgggatttgaatgagggcactctggtttgagcttgtaatcattatatcataaaggacatgatgcttgacttctctttctctcaccctaattcaacctattgccaagtattgtacattctccatgcttaaaatctctaggcggtgtccctgaagtataaatccaaagccttcatgcctgtaatccgagtgctttaggaggccaaggcaggaggactgcttgagcccaggagtttgagaccagcctggacaacaaagtgagattcatctctacaaaaaaaaaaaaaaaaaaaaaatagccaggcgtggtggcacatgctggctaaagggggaggattgcttgagcccaggaggtcggggctgcagtgagccgtgatcacaccactgcactccatcctgggcaataaagttcaagcatttcacttggatttaaggttctttataatctaacatctacttctcttgccttcttattaactccccattcttgtattcctaataaccagccagtagaattaaattatttgcatgggtcctatctccttttccactaagctgttgcacattgttagaattcttttctttatcccttttatgtctcagcttcaatgtcacatccactaattagagcattagatggcgctctactgtacttaacacctatcacagcatttaggacactgtattttaattattgccttacttgttttttagtatctcccactagattgtggaggtacttgtttcttgaaggcaaggacaggttcaccttcttttctttttttttcttttagacggagtcttgctctgtcgcccaggctggagtgtagtggcacgatctcggctcactgcaagctccgcctcccgggttcacaccactcttctgcctcagcctccagagctgctgggactacaggcgcccgccaccatgcccggctaattttttgtatttttagtagagacggggtttcactgtgttagccaggatggtctcaatctcctgacctcgtgatccgcctgcctcggcctcccagagctgctggtactacaggcacctgccaccatgcccggctaattttttgtatttttagtagagacggggtttcactgtgttagccaggatggtctcgatctcctgacctcgtgatccgcctgcctcggcctcccagagtcctgggattacaggcatgagccactgcgcccggccagttcaccttcttaatgtcactcatatccatccccttctstctctctctctctcctaccgtactttaggccctcattatctctagcatggacaactgccttagtccattaactgttccccctgtccctagtccatcctttatttaatccatactcaaccctgcagaggcagattsgtataacagctgagttaacacttcctgcttaacacttcagtggatcttagctgccttttaaaaagtccaaatattttggttcattacatgaatttatctcctcccattttctatctccttattaccttgtacctagtaggaactccataaatacttgttgaatgaatatggtactgtgtcaaagtcagtcaagcagaaccaagaacaaagaggttaaccaaagtaatgcagtctcggttgcgaggcttcctaggacagtatagccataggcttaagtggaagtcgaagactagtagtgtaactctttctcttaggagggaatccccaaacataccttactattagatgactctttgtctttgcatatgcctggaatatgctcctcgacctggcaaacttatcagatttggtgactcagttcaagtattccttcctctattaaacctctccacacctttctagaattgtacttctaagatattacttaactaaatgatttggggccaggtgtagtggcccatgcctataatcccagcactttgggaggctgaggcaggaggatcactgaagcccaggagttcaagatcaacctaggcaacrtagggagacccccatctctacaaaaaatttaaaaattagccaggcatggtggcgcatacctgtagtcccagctgcttcagaggctgagatgtggagattgcttgagcccaggaggtcgaggctgcagtgagacaattacagagtgataccctgtcttaaaaataaaaaataaaaaagcctagctacctagttatgaactttctttatttagaaccaaactcttaacctcaagttatacactttaataatccattctattcccagttcttcaacctgaaggaaaattatattctaagaaatagaattggaatagaatgatttaagaccataagtaatcaaaatacttcattttcatagctagtattttcaaccttttgctgcctaatatttcattagcaatggtaacatgaataatgtggaaagcatccaaacatagtgaatttattcttagcctttgtatataaacctgcatactcccagttgcctctctctctgacctcaagggttcatcctaagttaatattgatctaaataaaagttatgctgccagtaaatcatatatcccaaagtcaaacaggaaattatttttaaagtgttataaagacataatgaaagctttccacggaaatgttcatgaacacatcgttgataaccagaaaaactagaagccacctaaaattacagactaagagactgagtaaacttgttaacaatggaayattaaacagtcattaaagctgatgcaaaatagatttaatgggccaacgcggtggctcatgcctgtaatcccagcactttgggaggctgaggcgggcagatcacctgaggtcaggagttccaagaccagcatggccaacatggtgaaaccccatgcctactaaaaatacaaaatttagccacacgtggtggcaggcgtctgttatcccagtgaggtaggagaatcgcctgaacctgggaggcggaggttgcggtgagccaagatcacgccacagcattccagcctgggtgacagggcgagactccgtctcaaaaaaaaaaaaaaaaaaaaaaaaaaaaaaaaaaaaaaaaatatatatatatatatatatatatatatatatatatatatatatatagattgaatgtcgaatgaaataatagtatggggagggaaatgtgtgtgcgtatacatgcttagaaataaaatgggtttacaccaaaatgttaattgtgattaggactatcaatgcttttatttttttcttcttgcttgtctgtattttctcatttttctcgatgaacatttgttacttgtgaattcaacataatttggctttaagatataggtaatgtggctgagtgcagtggctcatgcctgtaatcccagcactttgggaggccaaggtgggaggactgcttgagcccaggagtttgagaccagcctgggcaacatggtgaaatcctgtctgtaagagaaaaaaaaaagatatattacataatgtatttgcagcagacttattgtttgaaaactgtgaaattatttcaactgaaattatttgaaatttgtcttcatttatttcttttgaatacttggttatagcattgctaaagactaattgtaaagctaaaagccaaaagcaactgcactggatactttaagtttggattaaataaccgataattgatagttagaaaatagaatttaatgttccttttctcgatgaattaatttgtttgtcttccatttttaaaagcatgctgatcccattttcaatgaagaattgcttccagttactttgtaactgccaggtcccagcagctggctttaaaaaaacagtaaaaaatgggctcattttacagtcaatttccaatgatgtctatcaaaatctggctgtggaagactggatccatgaccatatgaatctagaaggcaaaccaattctattcttttggcagaattctccctctgttgtaattggtaggcatcaaaatccttggcaggaatgtaacctgaatctaatgagagaagaaggtataaaactggctcggagaagaagtggaggaggaacrgtctaccatgatatgggtaatatcaatttgactttctttacaaccaaaaaaaagtatgatagaatggaaaatctgaaattaattgtgagagctctgaatgctgtccaaccccagctggatgtgcaggctaccaaaagatttgaccttttacttgatggacagtttaaaatctcaggracagcttctaagatcggccggactactgcctatcaccattgcactttattatgtagtactgatgggacgttcytgtcttctttgctaaagagcccttaccaagggatcaggagcaatgccactgctagcataccttccttagtgaaaaatcttttggaaaaggatcccactctgacctgtgaagtactaatgaatgctgttgctacagagtatgctgcytatcatcaaattgataatcacattcacctaataaacccaacggatgagacactgtttcctggaataaatagcaaagccaaagaactgcaaacttgggagtggatatatggcaaaactccaaagtttagtataaatacttcctttcatgtgttatatgaacagtcacacttggaaattaaagtattcatagacataaagaatggaagaattgaaatttgtaatattgaagcacctgatcattggttgccattggaaatacgtgacaaattaaattcaagtcttattggcagtaagttttgcccaactgaaactaccatgctaacaaatatattacttagaacatgtccacaagaccacaaactaaacagtaaatggaatattctctgtgaaaaaattaagggaataatgtgattccaagtaaatgtcttaatacagtttcaattagaaaataaaatgtctcatacttgcacattgtatgtcaaaaaaaaacctagtctcttttagtaacgtcaaaaaaaaamaamaaaacacaacaacctagtctctttcagtaacttctccccatctgaaattctttatcacctatccctatctgtgtatttcttctgacctctaggatcctctttcttctctttcttccttcatttattttattttatttatttcatttatttattttgagacagagactcactctcacccaggctggagtgcagtggtgcgatcttggcccactgcaacctttacctcctgagttcaagtgatcctcaygcctcagcctcccgagtagtgggactacagggttttgtcaccatgcccagctaattttttctatttttartagagacagggtttcactgtgttggccaggctggtctcaaactcttggcctcaagtgatccgccgacctcagcctcccaaagtgctgggattacaggtgtgagccaccatgccctgtctgttcattgattttaatacctggcatgtatttatatttcagctgctgctgcttttactctcttggggctatatataatattggacactctgacctcagacttagttctctgtttttcttatctctcggagatataacccagatttcttgccacctctcctcatatctcaaactctaaaattctcccttttagttatattttcttatctttctactctcccactaaaaatcaaggctgttgcacttttctaagctcttaacccttccctaatctctccttgcatcatttcccttctatcccagcctgaaatttactttatgctttactttcttaccagtattctcatttgcttctctcctttgaccttctaccatagccactttttaattttagtctaaacaattgattttctactctttttggcaggtgatgctggggggaaagatcatataatcattgaagattagcccaatttgatatttataattttcaacttatgtatctttctgctggtgtcagatttaattcatctctggttgagttcccctcattcttaaggggaatgtttccactcttctcaagctcagaatttcactactcttaccttgtcacaaaccttgattcataatttggtgagagttgaggccttcagaaatgagtccctccagcccccatggcccccctcctcccctctccactccctttctcttctttcaagacagggtcttaccctcacccaggctggagtgcagtggcatgctcataggtcactacagccttgaactgggctcaagtgatcctgttgcctcaggttctggagtagcyggaactacagatgctcaacaccatgcccagctccctctgtttatgagttattttcttttaatatatctcagtagttccaggccccatccttttatttatttttagraagagcaggcatggacacagggttttgcctacaattgattatctcasactgggggtagggtgagtgattttatttttcaaggtgtkcttgggacamacatgattggcagtttagcaggtttaatgggcaggtcyttttgttatttaaaagcaatattaaataccaagtaaacacaactttgaagagattactcatgaacatttcacacttgttaccacctatgaaaattattttttgagaaaggttaaaaatcctgatatgatgtgctttggtgcaswaataccatgtttctccagagagaggatatcatcaggcaaagggtgttaagggcttcgagttccaaattggaaatttgaccaagtaacccctgaaacatatggactcaaggtatgttttgcagtggtttccccagaactttctgaatgtttgcatatggggatgagagaggagtcaaaatggcatacacacacacacacacacacacacacacacacacacacacacwtatatatatagtcttatttttttgagacagagtctcattctgtcacctaggctggaatacagaggtatgatctcagctcactgcaactgctgcctagtgggttcaagtgatcttcctgtctcagcctcccaagtagctggaactacaggcttgcaccaccacgcctggctaatttttgtattttgagtgcagacaggtttcactatgttggccaggctgttcttgaactcctgacstcaggtgatctgcctgcctcagcctcccagagtcctgagattacaggtgtgagccactgcacctggcctttactcctagatttcttatgagattggatggatgggagtatacatggggagtagggcagtgtatatcaaaagttaggttggggtgtattatatttgaaatgtttgtgtgcttctgagatgtcatacaggcagttgaataactccaaggagaagtcttggcttaatttataaatttgagggctgaccgcatataaatagtattttaagtcatgagaatgaataattttagacttttataattcatctaaagtttaaattttaaactattaaatattcagcatctgggtmcccttatatgtttgcggacttctccacctggtaggaggtagagcctacttccttctatggaaacaaaagtttactatactctttgctggccttccttgaagctcagatgtgggcacatgacttaagctgtgccaatcagatgcaactgctccatattttgaattagacactagtgatgcagaacatctggaatgatgagaacccttctctggaagtagcgacaggggcctgaatttctggggtaatgaaggcagtgaggctagcgtgatagtttccaagccagtgatatcagtggtgtaggctactgcatccagcccttgcatcagtgtcagcaggggtgtcatctgattagttctgggtagtgattctagatgtgatttttcactccaaaacctctgtgtctcagtctatagctcaactacctactattcttataataaaccccttttttgcttatatcaggtaggagcagtttttgttgttttttactaagaacacttaaccatgtaatcacttagggaaagagtgtgaattaaaaaaaaaaaaaagaggttactacctagtacctagcttgggagaacttcggtatttaaaatgtaagaagaatggaggaagagagtgtgtttcatgaaagtcaagagtttcaagaagggagtagccaactgggtcaaatgcttctgaaaggtcacatadtacgagagtttaaaagtgcccattgaatatggtagtacagagatcactgttgaccttagcaaaaacgatttcagtggagtacctggggcagtcgccagactgaagtgagttaaagcaaataggtggtgaggaaatawgaaaaaaaaaaaaaaaaacatacagagaacactctttgaaraaatttttcatgaagaatgaaaaaatagggkggcatctggctcgagatgtgtgtactaataggaatgatgcagtacagcaggagagattgctctaaggcccaagtccttgtggaggctaaaggaggtcagatcaaggtcactgctaaaaatctggccatcatccttatatattaggaatactgactctaattttataaatttgatctctcatttttttaacttagcttatgtttccttttactcaagttttgtatatttacatgaccaagtcttttgctcttaagagttctggggctttctgttatactcagttcattaagtggggttttaaatatatatatatatatatatatatatataaatttttcattaattagctctgtaatacgtttagatttctttatrtggkgtcaacatcattacasaaaaatttctttatgcggagtaagacagaggccttaatgtkattttttccaaccatttgttgagctctttctccactaacttaaaatgtcacctttattacatattaaatactcattcatacacamtttctctctttcaaatgtgtktctggactcttttattctatcccactgatttatttgcccatgcctatgcccatacatttttaagaaaattattgtagctatgtctttatagctggkcaagcaagtctcctggkgtkactctcttttgtcatttaatttataaattaagttagagagaactgacattaagtcttcccattcaggaatacaatttgtctttctagwtaccctaattttcttttatgtccctccataaagcttatagttgttcatatagttcttaacacatttcttgatatatttaagctgtacctggtaggcttctggtgctctaattagatctggggatagaactccaaatatctagaatggatagcatgtctgtagactcttttctttaaatatcactatgtcttagccaggatttttatagaagttggataaaagttaattgcacagggttgtggattgctaattctccatagtaacgattcatatgctttagaaatcagaattgttattttaacatgaaggtaaagaggcctaacacatgttcttaccttaattaagagccactccatttccacgtggcatckggtactgggcaagataagcaaagatactctgcagaaaggaacttcggatcaggccaacacttgttcaagtgttttcctgagaccctgaatttccatatgatacagcttagtaaattagtttgagtctaaaatttttcagattcartattatcagcacctraacctgaaaagatttaaaaaaaaatcaggaactgttctggaagcccttcctggccttttatgccagctccatcttgtacctaccagctgtcccacaaaaggaaaacagtgtccaaggcttgcccaagaccactctgtccaaccttgttcccatggtctctacctttggtcctctacactgttttaactctgttgaatagtcctcagatgtgacatttatatgtgcactctccaatactgaacactggtactatagttttcctcttacatatgttagcttagctgggtttttttatttgtttctttttttattttgagatggagttttactcttgttgcccaggctggagtgcaatggcatgatctccgctcaccgcagcctccacctccagggttcaagcaattctcctgcctcagcctcccaagtagctggaattacaggcatgcgccaccacggctggctaattttgtatttttaataaagacggggtttctccatgttggccacgctggtctcaaactcctgacctcaggtgatccgcctgcctttgcctcccaaagtgctgggattacaggcgtgagccactgtgcccagccagcatgttctttgagctgtggaccgcccactacctctagcatacaacccctcttcagcctgtctccatggaatctattctgtctccaaccacacaactggcatctggatgaaaagcttacccagaacagttgattctaagctgcaaggctttacaaatgtgccagccaaagtgaatgagctgcaaaatgcatttggataactgaatgggttgatttgccttcatggagttaggtaatactgcacaactgcatgatggtaaatgtttaccaaagacaattctcttaattgtaacaaaattaacattttactttcctgtttattagaccccaagcccatctgtctcttttttttcttttgagacagggtctggctctgtcacccaggctagagtgcagtggtgcagtctcagctcactgcagcctcaacctcctaggctcaagtgatccttccacctcagcctcccaagtagctaggactataggcacatgccaccatgcccggctaattttttttttttttttttttttttttttttttctgatacaggttgcccaagctccatytgtctytttaaaagcactctaatccatggtgtctttccctcctggacttaaaactcccacaggcaaaattaagatctaattcatcttcctaatagatgcttattatttgttgacatgctcccgcagccaagtaacagagaagctggtaaaatgtttaaattagctgtattacttgaaagaaacattgtaaatctgctgagtaatatatttacaaaaatatttaggattgttcccacaactgaatgatggatccataaattagtagaaatataaaagtttattgttaaattcatacattataaaagtgatcttttaaaaaaaatccaatattcacttaaagtagacataatacaaattaggctaccacccatcatatattttttgtatgcttcttatgaaaaatgtctactgttgtttcatgacatggtcttaaatcaaaatcacaatatccaagggaaaaacgactctaagaagagaagaaaagagtatcattaaaaatgatacaaaaacagtgctacacatttactcataagattatatcctacctgtggtttcttaaaataatcaagtccccttccaatcttaatcatccatccattgttgaacctgttgaaattagtatatagtattatattcaagacatttaagtcagactattaataaagctgtagtgtattaagtgtcagcaaaatttccccctaacaaagcaaaccacttcctccagtggcatgagttgaatcaaacctggggttcattatgagctgtgtccacaatgaaaacagtcatagaaacaatcagttgatttaattatctgatagtttaatcttgaatttcagcttgttgataaaactttttcgtgttctgctaacaagtggtggcaaagtgtattcagggaaactggtggtgtttcaagagttcccctacctagagatggggaatgtgcaggaggagccctggaccctgacctctgctttaactacagcagctgcattttcatctgttttgcatatttagtttgtgattaagtttttattaaaactgagtgcccttgctataaacataaccactgtgctaaacaaaaggaagatatcactaaaataactgcatattctgttttcttatagactcagcaaattgtcatgcctactagaatatttaataacccctaagaagtaaagccacattaagtaaatattaagttcactagaaaataaattatcctaatatcataacactatatatacagttgagtagacagaaaagtgttctctttttctatatgacacagaacatgtaaatactattccattaggaaatattaaactcacacacaaaacacttggcttactttgtcaaaaagaaagccaagtgttttttttcttctcaaaagtgaaaaagtactaaatggagttttatttgaattttaaatatttataaattattaaatatttataggcaattatataaaacatttacaaaaattttaagtatatatcaactgcataaaaattaaaacattattgtagactaacctaatttctcggtcatgtattgaagaagagtattgaacttccaacagcactccgtgactcctgagtgactcttctatttcttgcaggcctctactttgctgcacttgctcaatgccctgttaatagcaaaaatacgattatctgccgcagttattattactatcttaaattatccctaagctatacaatctatatcacaggtggattaagatggaaatgttctatactagtttcaatgtctattatctcaaaaaaacaaccaatgtgaggtagtttaaagagcaattatttttatcaaaatcatctttttttctaatgtgaacataactccatcctgtctccttaaatgtagtttagaatagttttaatcatccaggtggagctgactgcttttgaaatcaatcgtagaaatcataattatttagaagcattcttattttaagtcaaaaccaagatagagatgcccactaccatatcatatcatgctaccatcccccagatataataattggtaaagaaacaaaattgttcatagtgcagacagtgtgattgcctcctagaatatccaagagactaaactaacaaactatttgaataagtgcatttagcaaagtggccaaatacaaaatcagcatcctaaaatcaataactttttttatgacatgttatgcatactgttagataataagttaattcccaaggaaacaaatctagctgaagcactgcatctgtgttctccttgactggactacatcttgtaactgaataaagttaataagaaagagtaagtgctttcaggtacctacttcatccagagaggtgagaaggtgaatagtttttactttacatggtctcttaataagcatctcacaaaatcgaagaaagttatacagctaaaagacattagaatggattattactaatttagtacattgaatatgatatttcattatattttagtatgttcacatacctgatgagtatgtctaatataaggatcttctatccaaacttctgtaactgtctcattaaggtattcgcgaaaaagtgactcataactgaaacctgttgcattctcttctattttaatttgcttgtgatattttccatctataaaacacaggcttcaacagtaaaaccagtgaccattttttttttacacattttatattttatatagagtgattaatcagcatcagatacatattaatttttttaacttattcagcaaatacttattgaatgcctactaaatatcatatacattgcaggatgttacacgtacaaaggtatttaaggcaaaccactccattagtgatttctgccttcacagaggctaggcaagggggaaaatctagaggtttcctggaacaggtccttgagcaagatcctatagaccaggcagtttgttgaagggagtagtgtatatataaaggtatccaataactccctgtcgccatgggtagcaccacatactgaaactcagtggctatctggtcctcctcttcagacttgtctttttatgtcttgcaatctaataactaaagtgagtattaaacatgaatgcagggcagagcgcggtggctcacgcctgtaatcccagcattttgggaggccaaggtaggtagatcatttgaggtcaggagttcgagaccagcctggccaacatggtgaaaccccagctctactaaaaatataaaaagtagccaggcatgatgtcaggtgcctgtagtcccaactacctggggggctgaggcaggagaatcacttgaacccaggtggatgttgcagtgagctgagatcatgccaccgcactccagcctgggcaacagagcaagactctgccttaaaaaaaaaaaaaaaaattaatgcagtataatatgaagcttcaaagtctttcttggcacgtgtacagttttaaacagaaatttatagtacttcttaataagctaaagactgggatgtcacaggatcaagaggatagatctattgcttttgttcattcaaaatgaatattgaaaaagttatcagaaacctttaaggttttaaaaaaatatgacccctggctgggcatggtggctcacacttgtaatcccagcactttgggaggctgaggcgggaggatcacctgaggtcaggagttagagaccagcctgaccaatatggcaaaacctcaactctactaaaaatacaaaaatgagccaggcttggcggcgggtgcctgtagtcccagctactcgggaggctgggacagaagaattgcttgaacccagcaggcagaggttgcagtaagcagagatcgcgccactgcactccagcctgggcgacacagcgagactccgtctaaaaaaaaaaaaaaaaaccctaatggtagcccctaaattatactttacactttgtttaaaaatcagtagtttggattctgttccaaatatttccacatagataacattggcaactatgccttattttttaagccaagatagccgtatagaggttaatttaattccatgtactcaaaaccacaatgctggaggtactatatttcatcaatgttttggagtaaaatttcattctaaatttcaaatcggggctaaggaaacataactttattcccactgaacaaaggagctcagtggggggtccccagggtatgtactgatacaggatagtaggaagagatggggaaaggggtgtagaaagtatagagaggaagaaaagctggggcctgggggcactggcttttgagggcagcagtacctttggctatagaaagcagcaagtatgcactcaggtaagggtggaaatggccatttacagacatttgtaaactggatgcttaggagtagggaactaataatagggaacaatacctacctgacctctaatcattaggaatgcttaactcctgaggtgttttgattcacaacaaaatctgagagaaatcccaggagtttctttagcttctttcatgattttggtcatttcataaagggaaatataaataaaatacacaatttacattcagtattccctgtagtatttcttaacatagggtccacacataagcttcatagggatttgtgaaccccttaaaaatggcatggaacattctccagtaagtatagctttcatgagatgttcaaaggggtgtctgatattcccacccccaactaaaaacaaaagccaaaacaaacaaacaaacaaaaaattaagaacaactcctgtatgggagtggaaatacagattaaatcctgtaagctcccagggacaactggtccagaccacacagagctccaaagggcaggagccagaaacattgggtgaatggacagtcacagttgtttatggatgcattttctaaaacaacctctttaccttctttttcttggtccaagtacttctttatgttttccgctctgtccatgtatttggaaattttttctctgagattacatctcttagtattatctttggtacctacaaatttaaaaatatatattatcaagtatcaaaatagtttttctatttaatttgggcattattttcagtttctcaagttttctacaaatttcctatcctctagtatggcttgcctcagtcctcaaacacacacaataaactcaaatttggcttgaacatacaagaccttcatatttacacgaagcgtgatgcagcttggtttaggagtgggagctcttgacactatgtctcatctctgggacatcaaatctggtgggatgaaaggtggctcattacatgtcaaactcatgtctgagcactattttatcctaactacccacaagtttgaaatttttgcataattaaaagtagcaaaaaatatttatcttccacaaaaccagctactcttccagacctccccattatagttaatgcacatttttccagctaccacaaaaatgttatttttgaatatacatgatcataaagttttacccaaccacccctcctcccaaatcagtcaacaaatcacttcttgttccttcccttttttcctttcaacatcgcttatattttccataaataatctcattttttgtttgtttgttttgagacggaatctcgctctgtcgcccaggctggagtgcagtggcatgatctcggctctctgcaacctccacctcccgggttcaagcaattctcctgtcttagactcctgagtagctgggactacaggcgcccaccactatgcctggctagtttttgtatttttagtagagactgggtttcaccatgttggtcaggctggtctcgaactcctgacctcaagtgatcctcctgcctcggcctcccaaagtgctgggattacaggcgtgagccaccgtgcccggcccatttttgtatttttagtagagacggcgtttcaccatattggtcaggctggtctccgactcctgatctcaggtgatccgcccacctcggcctcccaaagtgctgggattacaggcgtgagccacactgcccagccaataatttcattttaatctctcattttaaaaaacattttgagttaattttttatatttacagaaaagttgcaaaaatggtacagataacctccttcacctagattctcttaatgttaacatatcacaaaccatactacaagtatcagagctaggaaattaacactgaaacaatactatgaacttatctacaaaccttatttgaatttcaccaattttcccactaatgaaagtttgctttctggtccaggatcccatattgcatttagttatgtgtccttagtctcctccaatctgtgttagttccttaatctttctctgccttctatgtccttgacatttaggaataatattggtcagttatttttgcagaatgtctctcattttggacagtctgatgttttctcatcattagacttggtttatgcatttttggcaagaaaatcacagaagtgatgtcccttgctcagtgggtacatgatgttgatgtgtcttactgctgatgatattaactgaccatttggtaaaggtgtagttcagatttctccactgtaaaatcactattttctcttttgtaatttgtaagtaccttatggaaagatatcctgcttcccatcactctttctcccactaattttagcatctgttgatggtccttgcctgcaacaactatgactgtgatgtttgcaaaatggtggttttctatttccgtcattccttctcaatctatttattcaattaaatagtatgggctcagggatatttattttactctatgagttataatccaatactatcattttcctgctcaaattttatcagctttggctttgacatctccttcatgttagttcctgtgtccttttgtcaagcccgcatcgctattatgtccttacattttgattcaggatttttttgtttcattttgtttcgctgagacacagtctggctctgtcgcccaggctggagtgcagtgacatgatctcggctcactgcaacctctgcctcccaggcacaaggaatcctcccacctcagcctcccaagtagctgagactacaggcacacattactatgcctggctagtttttgtatttcttttctattttctgtagagatggggtatcaccatgttgcccaggctagtctcgaactcctgggctcaggcaatccgcctgccttggccttccgaagtgctgggattacaggcatgagccaccatgcacagccacaagatgttttaaaccaaatttgtccaactcttgcatgtggcccaggacagctctgaatgaggcccaacacaaattcataaacttttttttttttttttgagacggagtctcgctgtgttgcccaggctggaggcgcaatctcggcttactgcaacctccgcctcccaggttcaagcgattctcctgcctcagcctccggagtagctgggattataggcgcccgccaccacacccggctaattttttgtatttttagtagagacagggtttcgccatgttggtcaggctggtcttgaactcctgacctcaagcaatccacccgcctagggctcccaaagtgctgggattacaggcatgagccaccacacctggccattcgtaaactttcttaaaacattatgaggggtgtgtgtatgtgtgcgtgtgtgtgtgcgcgtgtgtgtgtgttttagctcatcagctgtcgttagtgttagtgtattttacatgtaacccaagacaattatttttccaatgtggcccagggaagccaaaagatttgttaaaactcatcttgtttattttttgccccagccctgaaatacccttttccaaggagcctcggtcacttttattgaagaatggcattgagaaaccaaattctgggtgccagctgtgttcattgctgctgggggagtcccaccactacttctagaccctctcagtcaatacagctaggaggtatatgtaggcttactaacacatacatctatatatacatacatctatatgtatttgtttctgtccatctatataaatattaaaaaccatgagttcatgctgataactttgattccacagagctcattctagctttcccccatccctctcctgcccaaataaaagcaaaacacaacctttcctcaaccttgctagactttaaattatgtagtagttcagtcttagtcattgtccttgatcagctggcagtgtctcacacatagacccatccttcaatcattacgctacagtttctcaggcttggacccttacagccatctttgattcccattaaccttactcccatatctaatcatgtgccagtgccccctccttatcttaatactggtatcatctccctggttcattcaggcccttatcatgcctcatctttttaaaaaggttttattaattttaattggcacataataattatacatattaatggggtacaatgtgatgttttgatacatgtatacattgtgtaatgatcaaatcagggtaattaggatatctgtcatcttaaatatttattgtttctttgtggtaagaacattgaaaatccttcattctagctatgttgaaacatacaacacattattaactctagtcaccctattgtgtaataagacaccagaatttattcctcttatttaactgtaaattttttttttttaagagagggtttcaccatgttggccaggctggtctcgaactcctgacctcaagtgatccacccacctcagtctcccaaagtactgggattgcaggcgtgagccactgcacctggcatctaactgtaattttgtaccctttgaccaacctctccccattcctcctacccactgcccttcccagcttctggtaaccactattctactctctacttctatgatattaacttttttagattccacatatgagttagatcatgtggtatttgtctttctgtgtctggcttatttcacttaacaatttcctacaagtttgtccatgtcacaaatgacaggatttcattttttatggctgaacagtactctactgtatatatgtgccatattttctttattcatctgctgatagacacttgggttgattccctatcttagctattatgaatagtgctgcagtaagcttgggagtacaaatatctyttcaacataatgatttcatttcctttggatatatacccagtagtgggatcaatggatcatatggtagttctcttttyaattttttgaggaatctccatastgttttctataatggctatacacacctcttattttgattccagcaggagctccttaaktggtstgcttaacttcagtctctacaggttaatgtctactttacatccttgccatattcagtcctttattcaagaaatatttattgagaactaacaacatgcccagcactgttctaagtgctgtggatacagcagttcgtaaaacagacaaaattctcttctattgttcragtaggaagagaacaataaaaataaattggcaaaacatgtatattagattgaggtaagtgctattaaataaaataatgaaggaggacagggagtgctgggatggggttataattttacactggaggtctgggaaagcctcacaaagaaggtggtatttgtgtaaaggcctgaaataggagagagagtgtgccacgcaaataaatatctgtgagaaaagagcacattcctgaaagagacaagccctgaaatgcaactccaattatgttactcctttttaaaaaccttaaatggtttctccttgcctgtggaataagttaaaatctcctggtagtcaaggccatccacaatgtgatccaagcccctatctacctttaaactttacttctcactcttcctcttcagayacatgctcaaccaaactacttatttcgtaagacagcacaggaatttgaagactcttagatgaatttctgacttctgaaattatttttcctccaaagccccaatcaaactccacctctacctttccaccctcacatgacctttaactgtttaaatcctcattgcgtttatctatagatatctctctcctggcacttattccctgtattagcgctatttgcattttggtcttaacccatctatgtgacatcattgtctctgtaacctctacgggatcagtgaagcaccctagagcagaactgtgattctcctgcttcagattcctagtgcagccaaaacttgagcagtgttccacctgaccaacacagtacaccatctctcttttgggattcagtataccagagtcgttggggccttgggctccgactgtgactctaccacctcctagtggcagaacttgaaagcgaacaatactttttatgctgtaaaacgagaataccatcaactcctacttgatagggcaattggtacggatgaaacgagatcatgcttttaatgttttctgcaatgcctggcactcagcactgaaacgtgatatctatgcttattgctgttgtcactgtcatcattatcatcaaataatgccccaggcaaggtagagtttacagttattttttcttttttttgagacggagtcttgttctattggcagactggagtgcagtggcgcgatctcggctcactgcaacctccgcctcccggattcaagcaattctcctgcctcagcctcccaagtggctgggactacaggtgcgtgccaccatgcccggctaatttttgtattttcagtagagacggggtttcaccatgttggccagratggtctcgatctcttgacctcatgatccacctgcctcggcctcccaaaaaagtgctgggattacaggagtgagccaccgcgcccggccggtagagtttgtagttctgaccaaagcaccaaaccataaagggctcccctctgctgccccaaagcttctgtaacactttaattataagaagcttaaactagaaagaacagagggagcttagtccagaccgggagtgtcgggggttggggagcaggagctgatcttatcaatttaatacataaatattgagtgtctactgtgagccagggttgtgctgggtgttaaggaatatttgggtatttctcaacattgaataatacgaaaagtctcacttgtctcctccacaaccctgcgcatttctcacaccgaacytcatccgtttaagaaaaacttttcttcttctaccgctacataattttactttggcttgctttaaatgcaaatgtttaaacagaaaattaaaaataatcgtataataaacacccttattacccatcaccgaaatttttaaaattagcatttttgctcaaatagagcttcgatttttaagaaatttttgcttaaggaaaattaactaaagacatcatagcatctctttctaaaacactttggtctgcatctctaaaaattaaggaaagttttggaaaaaaaatcatattgcctaagaaaataattttaatgccccccaatctatattcaaacttttctaatagatccaaaaatgtcttttaaagttcgtacaaacccaggtcctatcaaagcttatatattacattgcgttatatcttatatctcttaagtcttttaaaatctagactagtagcctccccaccttttctaggtaacatcaatctattaaagatctaaaagaaagcggcccagttgtcctatagaatatcccaccttctgtatttaactgcttcttcgtggtgtggaaaaatcatttttaactctttcacttcaccccagacacagcaggaaccagctccttttcctcaggtcctccccgccttggctcattgctcacctttcagaacctgcaggagcagatcaatcccctcttggtaacacaccagagcctgcggataccgcgactccgaatctagttctactgcccgctttagcacagtggctgcagctgtgctctgcgggtcckgcctcagcccggacttcgccataattctggaagttctcctccgcctcaacccaggatgaagttgagcgggtctgctgcgcttccgggaagtggtcatgtgatacccaggcgcctgcgctctctttctagggactttcctgagtgggagggatttcgccggaacaaaaatgcctcartttggaggtcgcgctcactgcgacggcaggctttgagtgtagcacttggtagttcttcctctgctcygcttcccttcggaggaaaatttcaggctgaaggtttagcgggtgccggtgagtggggaatgagtggcggagagtgcggcattcttcgcaaggtgtatccgggaaccctctgcagatcctaattgattttccctattgcgtactgaattggccggttacggcaacctaaatgggtctgcccctgatcccgtcacattggctcccgtaaggccattggcctgcaggatccccccgtttcccaatttgcaggatccagggccacgcggctttttgtgcccagactcttggagctcaagaacggagccgccgaggctggacagcttgggaaagggaacccaagcagcattttctgtgctgctgctttattcataacttagggttgccactgggtattaaggttgcttttttttttttttaatgaagacagaaaattgcctttatctttgtattgcttcattttataatgcaaacatccaagagttggcagttagaatatttgccattttattaaaactgtgatttgttaccattttgatcgagacctaccaaaagctgtttgttctgccctttttgccaagaggcagtaatgagggctgcctactgcttgttaggcactaggagttcagagaagagacacgcttccagctttcagagatctctggtatctctgcaagagtgattccatgttttgcatttcagaagtgtttttccccctttaataattgtatacattgtcggtttagaaaaagaaatcgatttttaacattcctgttgcatgcatgctcattgtaaaaagacaaaagaactatcggtcgctgggggggagaagggggaggaaaaacgccttttttcatacccccaggggtatgttaacgtttttctgacaaccttccagagtttttctgtgattacacacgttcacagacatttaaaaaaatagaaatgggatcatacttctcctgtgatgcctgatattttcctgttttacagaagacagcgtaattgtttcagggtccaggagttacgtgcctaattattaacagtaacttttactttattaaaacgtattccttgccgggcgtggtggctcacgcctgtaatctcagcactttcggaggccgaggcgggaggatcacgaggtcaggagatcgagaccatcctggctaacacggtgaaaccccgtctctactaaaaatacaaaaaattagccgggcgtccgggcgggcgcctgtagtcccagctactggggaggccgaggcaggagaatggcgtgaacccgggaggcggagcttgcagtgaacccagatcgtgccactgcactccagcctgggcgacagagcgagactccgtctcaaaaaaataaataagataaaataaacgtattctttgagtcaaacgtggtgacacacacctagctccaattactgggaaaattgaggattgcttgaggctgagttcaataccagaaacatagcgagactctgtctctaaaaacttgtaacttttgactatcacaccttcagaagtctgtaaatatttaaacttcagttattctgcaaaaatatattatatgtctgctatagggcagataccgctttacacagatgtttgggatacttctatgaatataacagacccaaaacaacaaaatctaaaaacccttttcctatggaattagcgtgctattgaatgtacatgcactaaacaacaaaacctaacagataattaagttacgttagaagataagcacgatagaaagcagtgaagaggaattgggagtgttgacagttggggtatgggtgaaaatgttaaatgatgtgatctgggttgacctcattgaaaaggtgagatttgacccaaaaattgaaaaagataaggaaattagccatgtaaatatcaggatcattccaggagagggaatggtcagtcaaagggagcatgcctgcttgactagttctagatcaaacaaggggggcagcatgtctggtgattgagcaagagagtaattggagatggagtcctggaggtggggaaggttggtagtgctgtactacaaagacatgagagggtgagggttaagaattagagttgggggtggtggcccatgcttgtaaccccagcactttgggagcccaggcgggcggatcacctgaggtcaggagttcaagagcagcctagccaacatggtgaaaccccgtctccactaaaaatacaaaaattagctggacgtggtggcaggtgcctctgatcccagctactcagcaggctgaggcaggataatcggttgaacccaggaggcggaggttgcagtgagccaagattgggccactgcactccagcctgggtgacaaagcgagactctgtctcaaaaaaaaaaaaaaaattgattttcactgtgatcaaaatggacaagcattggaggttttaattttttcataaataaactttatttttgaatagttttagattttcaaagaagttgtgaagatggtatggagtttctgtatatgctacactgtttccccctttcatgtttggtatacctgtgtacagttgatgaaccaatattgatacgttattaaagtccakactttatttagatttacttagtttttgccaaatgtccttttgctattccaggatcccatccaggataccacattacatttaatggtcatgacttcttccttaggctcctcttaactgtgacagtttctcagactttccttgtttttgatatcattgacagttttgaggcagttaggtgtttgggaagatactggaagagagtacctacataaattatttggaattcttctgaatgggatatttgttctttctcattaacttattcacctatttatattagtatgaatttagggttgtttatttatttatttattttggtttggattataagccagtaatactttgttacttattttgttgctgaaattgttccagctttgggtacagttgactgcagtgtcactttgacataccccatcgttatgttttttccagtagttcctttctagcattacaaagtgctccagacataatcagccatttctcaaaggagcactggttccttttattaaagaatgcagccaagatctgggcactgggtgtgctccttgccactgagtgctaktgctttaagtcctctcagctaacagagctagcccatgtatatatgcatatctgtaattacttctatatccctcaatagctatattaagctaaacatgagttccatttccaatctagtatataaggatcattgtagccttcccctcttgcttatatgtaacctcccacttcaacagtgagaatcctggctctctggaagatttttgagcagagtgacatgatctaagatttaatgagatgatttattgctgatatacaaaaaagatattaggggaattggaatggaagcagaagtccagttaggattttgttgagatctaagtgatcagaaagattttttaaagtgtgaagctaagtatgttggattaagtacctaaccttgatacgaggaagtctggtaaaataatttagcattagataggttcagttgctgaggaatgtttctgaggtctggctgtcttcaggagatgtcttgcgttgattctcacagttccattgctttatccacatcacaggaaagacttgcagaacttgaatgagctagaatctgcgggacactgaattacaacacttagcctattttagtgtgttagagcagaggtctccaaaccccaggccttagacccagaccatttgctggcccattaggaaccaggtggcacagcaggaggtgagctgtggttgagtgagcattaccacctgagctccaccacctgtcagagcagtccaacattagattctcataggagcatgaacgctactgtgaactgtgcatgcaagggatctagattgcatgctccttataagaatctaatgcctgatgatctgaggtgaacagtttcatccggaaaccttcccttccacccctccctatctgtggaaaaattgtcttccatgaaactggtccagtgtcagaaaggttggggactgcagttttaagagtattcttattagctttgtagtaatttaataataataaaagctacyatttattgagggcttcccacatgccaggtactgttttaggtgctttgtagaataactcatttgcaagacaggtattttctttcttttctgggggaaaaattgtaacgcacgaattaagtaacctgtccgagatatacatgtagttcatgaacttaatctttctgctatcagtataagtcagtatagtaggctacagttgttttgtgtgtaattaaataaatatgacctttttaggttatagaagcaatgcgtgtgcattgagaatagtttaaaaagtacaaacaagcaaaaaaaattctactttttaacagaaaggtgttatgatttagtgaaaatgcacttgcctaggaattaggagaatggggttccagaccacaaactttattgatagctggatgcacttggataagttattgaactttctggaattcatgatcctcattcataaagtaaggatgtgggcagtcagttctaattataggagttggaatttcttcagtcccttctagctctttaattttctgtgattctatggcaaagcattctttatctgccttcattgttgaagaagacactttaaatgatagtaattttgtggaatcaatctaggactgactcatttgatgaaagtgggatgtggctaatgtgtataattactacctgtggttgaataaaacatttataaattaattcgtgcccttattatattaaaataaccaataattttactgttaagtttacaattaatttgctgcttagttttttaatactagagaaggggaaacctgttcatttccaagacatagttgactgatgggtctacttcctacttcccacagcctctaaagagagcaatcactayacttatggctgggattttgcgcttagtagttcaatggcccccaggcagactacaggtaagtgtttcttttcaagaatttgtcttttctaccccttatgaattttttttttaatcattacaaggcaagctaagttcttttttttatttttttgagacggagtctctctctgtcacccaggctggagtgcagtggcacaatctgggctcactgtagtctctgcctccctgattcaagcaattctcctgcctcagcctcctgagtagctgggactacaggtgtctgccactatgcctggctaatttttgtatttttcatatagtcgggggtttcaccatattggccaggctggtctccaactcctgaccttgtgatccacctgccccggccacccaaaattaagttatttcaccagttccttttcgaaatggtttagatattgagagttaatcttgtttatgtatggtttttctgctgttttatccctaaagatctagaatcaaaaaagatctttttctggaaaacatgccaataaaaaatggctgtcattgattccccttggtctgtcttaatcttaaagttttaggttgtttttccccttagattatggaaggagtgcattttcaataataaaatattagaaaaatatagaaaatcagraggaagagaaataatctgtaagagaccctcagtgttagtattttcatgtgtctccttctaggcttgcttttagaaagtgcagtggtgctgcctaatctgctcataagggccagagcctagatgagcctattgacctgctcctggctgcagaggacaacaatgtaaggggctttgtatatattaccttaacctcagattaatcctgtgaggtcaatatgagttcctttttagagctgaggaaactgaccctctgagagagtaagtgtctcatgtctcacagctggtaggcagcagaactcagcccagtgcctgtcttctagtggtttatgccatctctgcaatgcaggaaatgctgggagggaatgatgggaatgactgttgcccattcccacagcagtatcctggtatgaaaggttggcagtgaatcctttttcttcagcagcctgagagaaatgggattggaggaatgtagagcaggaacaagaggtaggaactaggagtgatgacattgttagaactaggagggaaactagaaactcattttggatttcttttgtattgtcttgttaaatgtgagttattgcacattgtctakagcaagagttgataaactatggcctttaggccaaattcagcctcccacctatttttgtaaataacagttttattgaaaaatakccacacccrgctgggcgcggtggctcacgcttgtaatcccagcacgttgggaggccaaggtggacggatcacgaggtcaggagatcgagaccatcctggctaacacggtgaaaccctatctctactaaaaatacaaaaaaaaattagctggacgtggtggtgggcgcctgtagtcccagctattcagaaggctgaggcaagagaatggcgtgaacccaggaggcagaggttgcagtgagccgagattgcgccagtgcagtccagcctgggtgacagagcgagactccgtctcaaaaaaaaaaaaagaaaagtttgcatattgtctgactgcttttaccctgtgatggccaagctgagttttggcaatggagactacatagctctagagctggaaatgtttactatctggtcctttacagaaaacggttaccaatccgtggtctaaaagtatatttatatgcttttagctttatattatgttagtgcttagatgggatgcgttcactcagctagggagctaagatatacctttaataattatagggtaggttggaacagacttctgttacctaaagattggtgggtatggatttctctactgacagaattctaaaaaacaaatgatttatatcatattttagacygtgacaaaaggtgtggagtctcttatttgtacagattggattcgtcacaaattcaccagatcaagaattccagaaaaagtaagaacaaagtttgatttttttaatgttagtgttgttttaaaaaatgttttaagtggtacccgtttttgtaatattggaagattttatgttaaattatatgtggatgtaggtgatggtacagagtttaaagcatagtgggatttatgtgaatggtgatcataaaaataaaactgttctgtcacttgtgtcactggccttcacagtaatgggtttttattatttcagtctacttattcctgcttgtggtttgtacatgtgtgttggtatcaccattgtcctgagaaagcagtgggtcttcctactcaggctctcactgtgtcactcttcattttcactttccgtatcgatcattgttactttggatctttcagctttttctatttcatttctgtgtacctatcattcttttagataatattgactaagcccgccattgatttttgtttaaaatttttttttaaagagagttttgctttgttgcccaggctggagtgcagtggtgcaatctcatctcactgcaacctccgtctcccgggttcaaacagtttttgtgcctcagcctccagagtatctgggaccacaggcccgtgccaccacacccggctaatttttgtatttttagtagagatggggtttcatcatgttgcccaggctggtcttgcactactgatctcaagtgatccacccgccttggcctcccaaagtgctgggattacaggcgcctggcctgtttttatttgttttttaattaatagtctttatttcttaaagcagttttaggtttgcagaaacattgattgggaagtatggagagttcctatgtgctccctccgcccagcatatacagtgtcccccacaactgatgaaccaacgggacacagtattattaactaaataccatagtttacactagtgttcagtcttcatgttgtgaagttctatgggttttgacaaatgcataatgtcatgtatccactattacagtattatacagaatagtttcactgccctaagtatcacctgtggttcacctatttatccttcccaactcctaacccctggcaagcactgatctttttattatctccatagttttgccttttctagaatgtaatatagctgaaatcatatggtatgtagccctttcaaactggcttctttctcttagcaatatacctgtaaggttcctccatgtctttttgtggcttgcttgcttattttttattgctgaataatatcccattgcatagacatacacagtttatgtgtgcattcatctatggaaaaacatcttggttgcttctagttttggacagtaatgaacaaagctgctataaacattcatgtatagatttttgtgtggacataaatttccaactcatgagttaaatacctggagcataattgctggattgtatggtaaagactacatttagctttgtaaagcctgggttttttgtttatttgttttgggtggggggttcctaatattttttattgtggtaaaatacacatataacatttaccatcttaaccacttttaagtgtgctattcaatggcattaagtacattgacactgttgtgcaactattacaaccatccatctccagaactcttttcatcttgcaaaactgaaactctatatccactaaataataactgccaacctaggcaacataaggagacccagtctctaccaaaaaaaaaaaaaaaattagatgggtgttgtggtacacacctgtagtcctagctactcaggaggctgagcggggaggattgctcaatctcaagaggttaaggctgcagtgacctataattgtgccactgcactccagcctggacaacagagcaagatcctgtctcaaaaattaataataatagtaactccccattttcccctctccctagcttctggtgactaccattctccattgattttcttaaaagataaaacagtattaccattgactactttgatacctttaatgtgcttggtgttcttttatcagaaatctcatccaggtacaatggttcacacctgtattcctagcattttgggaggctgaggcaggaggatcttttgagtccaggaattcaagaccagcctgggcaacatagtgagactctgtatctacaaaaaatttaaaaattagctaggtgtggtggtgcatgcctgcaggcccaactgctcaggaggctgagatgagaggatcactttagcaagaggtcaagggtgtagtgagccatgatcggatcagtgcactccagcctgggcaacagagtgagaccttgtctcaaaacaaaataaagaaatcttttttatttttcaagtcattgtctttccactgctattctttccacaactatattgtcttatatctttccatgtttcttactctgtatttctggaaggatagatacaaatgttggcattcatttaaaatatgcaaggctaggcacaggcaggagaataacacacactggggcctgtagggggcgagtggagggagaccaccaggaaaaatagctaatgcatgctgggcttcatacctaggtgatgggttgataagtgtagcaaatagtgcagcagattgccatggcacatgtttacctatgtaacaaacctgcacatcctatatttgtgccctggaactttaaataaaataaatgtgcaaggcagtggttttgatcatcaactgtgataaatatgaaaacctttaaacctcatgaaaatagcccctgactatctttttttttttttttggagacggagtctcgctctgtctccaggctggagtgtggtggcgtggtctcggctcactgcaacctccatctcccgggttcaagcaattctcctgcctcagcctcccaagtagctgggattacaggcatgtgccaccacacccagctaatttttgtatttttagtagagacagggtttcaccatgctggccaggatggtcttgatctcctgacctcgtgatccaccccccttggcctcccaaagtgctggaattacaggcgtgagcaaccacgcctggcccctgcctatcgtctgaacttattcctgtattctcctgtattctcaactggtttctagacattgctacttggataacttataggtatttcaagttcatatccaaaattcaactcatcttactttccctccaaacaaccaaataaaaaagagggtgcgtctcttgtattagttatgtcagttaatgctaccatcctctatctaatttcccagactaaagacatctgaatcaagctcagcctccctcttcttcacccaacacaaatccatctatattactgcccagagttcccatatcagwcctttttctgttacagctactgtagttcaggctcttaaaccatggtcataagtgcctcctaactgggtttccttgtatcagtctctatccccagttggttttattcttaggtaagagttttctttgcaaatctcatagaaacatggtcctattggttctaaccttcattaactctgtrtccccagcggtaatttctaaaggctcaacatagtcgcgcatagtttaacttcatcctctgcattacttttcgtgcttttttctatattagccaccctgaaccacttgcctttccaaaatattttgtgctccttcatactgtkcctttaaatattctcacctttctttagtgcacctaccccttcctctgatctccaccatccttctcatcctaatctcttcaaaatctctagaaaaatataaacaagcaaaactcaccaaaaaatactcttaatcttacccaccccgagataactgctgccaactccttccacatccttctttgttgtatgttttatttttttcttttagactagtcaagtgcagtaatgaggaggaaagagtagaatacggagttcaatctgtgttgtgtgttttaagatgtgattcatctcatatgaatcaatgcttctctagctgctctctctgtttagtaatataatatgaacctctcactgtatacatttttttttaagttccggtatacacgtgcagatttgtcacataggtatatatgtgccatggtggtttgctgcacctatcaacccgtcatctaggttttaagccctacatgcattaggtgtttgtcctaatggtctccctttgcccccgactccccgtgtgttctcattgctcaactcccacttatgagtgagaacatgcggtatttggttttctgttcctgtattagtttgctgaggatgatggcatccagcttcatccatgtccctgcaaaggacatgacatcattcctttttatggctgcatagtattccatggtgtatatgtaccacattttctttatccagtctatcattgatgggcatttgggttggttccatgtctttgctattgtaagtactgcttcaataaacatacatgtgcatgtgtctttatagtagaatgatttatattcctttgggtatatacccagtaatgggattgctgagtccaatggtatttctggttctagatccttgaggaatcaccacactgtcttccacaatggttgaactaatttacattcccaccaatagtgcaaaaccataaaaacctcagaagaaaacctaggcaataccattcaggacataggcatgggcaaagccttcatgactaaaacaccaaaagcaattgcaacaaaagccaaaattgacaaatgggatctaattaaactaaagagcttctgcacagcaaaagaaactcgcatcagagtgagcaggcaacctacagaatgggagaaaaattttgcaatctacccatctgacaaaggtctaatatccagaatctacaaggaacttaaatttacaagaaaaaaacaaacaatcccatcaaaaagtgggcaaaggaaatgaacagacacttctcaaaagaagatatttatgtggccaagaaacatatgaaaaaaagctcatcatcactgatcattagagaaatgcaaatcaaaaccacaatgagatactacctcatgccagtcagagtgacgattattaaaaagtcaagaaacaatagatgctggcaaggctgtggagaaataagaacgcttttacactgtttacatttctacaaaactgtttttaatcatgaatgatattcttttttattaaaataccatctttttgggggtcaattttttttctaaatctgcttccccagagctatgactcttgatctaatgtctttgagacctttatatatattttatatgagtcttagaaacagtatttatagaatatatcacatatgcacactcatgtatttggtacagatgatgcacataacagcttacaacacataattgtgtggacatttctttttggtttttggctcaagaatatattatggccatcattcaatgtgaagacctgcaaagatagtaaacctcattcattttaatggtagtattgtatcctataggatacatcagaatttgtgtatttgcgccaggcgtggtggttcacacctgtaatcctagcactttgggaggccaaggcgggcggatcacaaggtcaggagttcgagaccagcctggccaacatggtgagacccccatctctaccaaaaatagaaaaattagctgggcacggtggtgtgcgcctgtaatcccagctactcgtgaggctgaagcaagagaatcgcttgaaccttgggggcagaggttgcagtgagccaagatcgtgccattgcactccagcctgggcgatagagcaagactccatctcaaaaaaaaaaaaaaaagaatttgtgtatttgtatcattttacttagttttattattaatcattttatttagaatggatgcatcataatgtagttatcatggtgaggaacacgggttgcctttaaacttttcagtgttacacatagtgttagaatacacatccttattcggtatattttgtatacttagaggagtgtttctgtgggatagtttcttagaaccttttgattcttagataattaattcaagtattagctctgtggagctgtttctgatcgctcataggcagagttcattagtcatttgcctgtattctcataatactttgtagattctttttataatacttatgttttattttcatttttaatttacatgtttgttttcccacttgatagtcagctcttcacctgagaatagggagggaagaggatgcagcccagtgcccagctcatagcagtgcttacagattctcctgacatttaaattatttagtgttgtctggttgctcctgctttgttctacaggttaaactccatctatctgcataatcagattgatagaaatgttcaatctgaggttgaggattacatgatgattaaggatgaggtaattatgtagttgtgtatgtgtgtgtgtcttttaagaaaaaatgggaggtacacagaaactgtgtaagttggaaatttaccatttataattctttcctttctaggtgtttcaggcctcacctgaagatcatgaaaaatacggtggggatccacagaaccctcataaactgcatattgttaccagaataaaaagtacaagaagacgtccatattgggaaaaagatataataaagatgcttggattagaaaaagtatgcaattattttaatcatctttagtgttgtttacattgctttaaattttatacttttaaaactttgcggtayacatttattatttattttgtattacttagggtaatttatttataaatttggcttagaatgaaccttcaatttaacattttactgaaacatggaactatctgcttttcagattgataacgttgctttgttgttgttgttcacaggcacatacccctcaagttcacaagaatatcccttcagtgaatgcaaaattgaaagtagttaagcatttgataaggtttgttgtttcttctcagctctttttaaaatgtattgcctagtgtaattctaaatgcatttttcttttttcgttaatgttctgaaaaaaactttttaaaaaactaaaattttattttgtttttttttaattgacacataataattgtacatatttatggggtacatagtgacgtttcaatatatataaagtatagtgatccgatcagggtaattggcatatccatcatctcagacatttaycatttcttcatgttgggaacattcaacatcctcctcctagctatttgaaactatgtgttattgttaactgtagttatcctgcggggatatagaacgctagaacgtattcctcctatctaaacgcattttcttgtgtcacagaatcaagcccttgaagttgccacaaggacttccarcagaggagaacatgtctaacacgtgcctcaaaagcacyggggagttagtagtgcagtggcatctgaaacctgtggagcagaaagcacatgagtcctaatgccccagcagcttccgattggaaaatgcaaattgtttttatttaaagatggtgagaaagtgttttcattaaaatatgttttcaaaaccattttcaggccgggcacggtggctcacctgtaatcccagcactttgggaggccaaggcgggcagatcacctgaggtcaagagttcgagaccagcctgaccaacatggagaaacccccatctctactgaaaatacagaattagccaggcatggtggcacatgcctgtaacccagctactcgggaggctgaagcaggagaatcacttgaacccgggaggcagaggttgcagtgagctgagatggtgccactgtactccagcctgggtgataggatgagactccatctcaggggaaaaaaaaaaatttttttttcactgactaaacctgctgcagctctcttttactacagacttggagattttagtttaatttggtttaattctctgtcctttccctttcactgtttcactccaaaacatgtaagaatggcaatgtttgaacatctgcgtttgggtctactgccaccttagcaagcctcattaaccattttataaaaattgcgttagtattgttgttgttgtttttgagacagggtcttgctctgtcacccaagctggaatacagtggcatgatttcagttcactgcagcctcgacctcccaggctcaagtgatcctcccacctcagcctccagagtagctaggactacaggcagtgtgccaccacatccagctaattttttaaagttttttcatagagacagggactcactatgttgtccaagctggtctcaaactcctgggttcaagccatcctcccacctcagcctcccaaaatgctgggattacaggcatgagccactgtacccagccaaaattgttttcttttttaagtgaattcaacaatttctgtgagtggctctttgcatgaacactgtgcaaggtgttggagaaatccaaagctgaccaaaacatggtccccaccttttggagcttacagtctgttctggggaacagagattcagccaaagtcaagaaacactggatgccagctagattatctgttctgtgctttggtgtctataagtacatatgtggatatgggttcattttatccctaaacttagtaccaaaccagcatttaatatctaattataaatctaatttggcctaaactttattattgcacactgcctgaacaaaacctatttgtctctatgtaaattttttcctcatggaacaagggtgtgaaatgaaaatattttaggatttattcaaaaacagactattctgttttcagcttcagaattgttctttgaatcctaaggaacctctgtcaacagttgaggttgctgttgaaaagaaagaagaaggaggcggaaatctctcagggagaattatttcctttcttttctatttyagatacctggaggggtggggagaagtaagaattgtaagggaggttcagtagtggggaattctgtgacagctgattgaagatgatgatgaagaacctctgcattctagttaccctttgcttcccttcacctcttgtaaaatttggcttggcaacaatgacattgtcatgcttattgtcccaatatccatcctgtcgtagatcttaatgtttttgatcgttgcgttaaagtggaagtgccacccacagtgaaaccagatcccattaataaataagcttaaaggcaactgcagttttaattccatagttattgaatatccagtgtgtgtaaggcctggaggggagccaaaggacactaacttctaagagctccgtctagttggagagaaacctgtgtgccacaacatacagtgtccttgcttatgtggggtcgaagacatctgtgaaaataaaagcagcctctgctaatttagcgccatctcttttactgtgctaatttttttttctttagagacagggtctcactctgtcgcccagcctggagggcagtggtgtgatcgtagctcactattacctccaactcttgggctcaagtgatcctcccacctcagcctcctgagcagctaggactacagatacatgccaccgctcccggctagtattttttaaaattttttgtagagccaaggtgttgctatgttgtccacactgatctggagcttctaatctcaaatgattctcctgcctcagcctcccaaagtgctgggaatacaggtgtgagccaccatacctggccttactgtactaatattaatattgtgtaaataggggaaaataccatggttaatttttactcaaacagtaagaaagtttgagtaactaattttaatctcaacagcccatagctagaagaggggatctaaatgttaagttgaatatttagaaataaaagtgtctacaagaagaaaagtctttagtgaaaatatgggcataggccagcagcattagctttctattgctgcagaacaaattaccacaaacttagctgcttaaaacaacacacacttattgtctcacaatgtttgtgggtcggaagtctaggcgtggcttagctgggtagtctgtttaggatctcagtgctggaaaaacgtgtctggccaggtgctcattgtagctttgacagggaagggatctgctcccaagcactctcaggttgttggcagaatttgtttccttatggctgtaggattcatggcaagttgcttcttccaaaaccagcattggagacagactagcaagatgggcactacactcttagataatcaaataaatgcaatcatgtgcctcgtgtcaccttttttgcattccattcattaagaacaagttgcagttcctacctacactcaaggaagggaggaattacacagaagtgtgaccacaggaggcagggctcatggaggcctccttaaagtcccccagccaaacctgaaaagtcaatcctggaccttatcatagtggctgtatagtttagaaggtttcttcagattggcattcctttgcctcatatcatcacttcaaaaccctataagggtttgttcctcggtcttgactttgtgtctttgaggattgctttgtttagtgtcacctgccttctttcaggaggttttgcctgacatctggtggtgaccgtggccaccaagtcaacccaaacactacctttaaggacgactgcagttctcttagggtctcctcaatctaaaattgtacctctttcaggccaaacacctattttcttcattttttttttctcataagaatgctagctagtatgcctattatctaactggcacagtttcaccaaggacagtttggaactacacaggccattttagggagattttgacatgaacaagattgcttctttgggaggtaccttaaaatgaaaagcaaagaaacttccatgcggagattgtcttgtttttctcaaaatgggataattttgcttaacataagtagtatcccttccttcctttccatactttgagaattaataaggactagctttttgatcacacagcttgataaaattttcaagggtccaaattactgtctaaaccatttgccactctttgtgtatatttgtcaaaatctgcttttctatatcaaaacttttctctcaagacctgagggaattaattaataaggaatccttggaacactggaaattctaaaataagagtcagatacaaaacactggtcactaaaattcttacctttatgtattagaatggcaatcaatgaacaaactgaaaatgtctttggatattatttctgtttattttttgcctcaaaattattaaatgacatgaaataagtgctcaagaagaaaaataaacaattcttcatttcctgttctctagttttccgtattacctggaaaaaagaaaatttgttggtcactttaaagataatataaacagctgaacatggtgcacaccccgactccccaccccactcccatgcctgtaatcctagcgctttgggatggcaagatggatcacttgagtctaggagtttgaggctgtgatgaactatgattgcaccactgcactccagcctaggcaacagggcgagatcctgtctcaaaaaagaaaaaagaaaaacagagcggtacaattactgtctcccaaaagattatttccattattctagattcaccagtcctccatacctcttttctttttattataaagctgaacaggcactagggtactgattgaactaagtggaaatcaccaggggtccattgcttatttcgtaagatccagtagccaagacatactcaccccatctgagaactatagcagtagcaataaaagtgaaaacttcagttgatttagttccagggtttccactaaacttgacagcttcccatgctgtgctgtacagggtcttctactgacagtaaactcgcaggatttttcagctacttacctagtctcccatgaattttgttgctttgcttttacacatcactggcctatattacaacactctaaactcagccacttccttcacccaaaaaagcaaccgcccataattgcttacccctcttagggaacgatccataccctgcacagacttagagattcccttggagaactgatttaattgtggttttagattattcacacttaaaaagtgaaactaaaaattgccaagtacagtcaggcgtggtggctcatgcctgtaatcccagcaacttgggaggctgaggtggggggatggcttgaggccaggagtttgagaccagcctgggcaacatagtgagaccccatgtctaaaacaacaaaacaaaaaattttaacttagctgggtgtggtagcacatgcctgtagtcccagctgctgaggagactgaggtgggaggattgcttcagcctgggatttcaaggctgcagtgagctatgattgtgccactgcactacagcctgggcgacagactcccctggggtggggcgggggggaatgctatgtagactatcatcatagtcaaagcttttctcagaaatcgtattcatttagtttggctaaattaattgccccctcccagatctgccaagttacaaaagtaaatatttatattgatacaataggaggtatttgatgtgggggtagtgtatgactttgcaatgctttagaaacaacaacaaaaatcacctgaccactacaggaacccctgtagaattgacaatgaattaaagagccttgacatgctttgctgttatggaaggagatggccataagaaaaatggaaattagcaaaactattttgtgatattacccacaatagcagagaagaattggcaaaagtattgaaccaagattgatagggtaatttaagcatattgctgaggatgttttgaatgtgtgtcccacctgccagtgacataatcctgacaagatcgttataacaggacctaggaatcttgaggcccattgaacaccttgattttctatcagctagccaaggaggacttgatactatcacaaacatttcttgctgtacttacacactacagggcaagcaaaacagaaaatattaagataaacaaaaaagccacctgactccctaaaagacccatctggattctgggacatgtttcttcacctgggttttataatctggtatcccagcattaagacccgttataagactcatcatccttttgtttctggtaatggcctgttacagttggttgatgtacactgtccaaaatctggaatgctgctctgtacccactgtcaagtcaaaggtctcaacagctcatcctgcaacaggagaagggattagctctagcccaactacagaccatgcttccgggacatcctcctggtcttgacagtggtgaaaatctggatgtcatgaattctgtggcctgacttcacctgcccttgactaaagagggggattgaggaaaagaaaaagcaacttctgacagccaggaactggcctggaactctcaggccttggtgtttccaggagctggcctggcctcacaggtggtgttcttctgttgaacataaggaatttcacagaacatcaacatcagataaagctgcactgaatgtaatggatcatggcaaaaacaagaccactctagagtcatgtctgagcacagaccaaaacatgaatgtgattcaagtcacaaaaataaccaagcatccacctattctggctaatgtgggtcactgcagctttgccaatcacagcttgagcttcatttcatttctccctccttctaggtaacattgattaagataccaatcacagaatcatctttctcctgacagcatccaatccagagcaaaacctactttttgaaacactcaccaaaataacctgataaaagcccagatcctttccaaacccctcttcctggactgctccacatggggacatggggtggttctcctcactgcagtgagcacaggccttcacttctcagtggacccgaccaggcctgtttgtcacatccctgctggagtgcctcatgcaggtctgtttgcccactctgtcccctgtctaggctcccagcaattatccctcatggtctcctcctgattaatgggccctgccccaccacactttttccaccccatccctggctttccttctgccagcacagccttctctactgttgccccagctgttctcagacattttctcactcccaccgtggtggtaagacttaccacctctgctccagagtctcaggccactgtgtcctcttcaccatccatccgacccctaccatgtgcttcctcatcttggccaccagggtcttcttggtcatcagaccctacttctttttttattattatttttaattattatggatacataatagctgtataaatgtatgggatacatgtgatgttttgatacaggcacatagtgtgtaataattgtatccaggtaattggtgtattcaccacctcgagcatttattatttctgttagaaacattccaattcaattttcagttatttttaattatacaagaaaaatttgggaggctgaggtggcaggatcacttgaggccaggtgttcaaaaccagcctgggcaacatagcaagaccccgtctttacaaaaaaaattttaaaaatgagctgggtgaggtggtgcacacctgtagtcctagctactcaggagactgaggcaggaagatcacctgagctcagaatttgaggctgcagtgagctatgattgtgccactgcactctggcatgagcaacagagtaagacactatctctaaaaaataaaaaatatgtatataataaattattgttgactatggtcaccctgttatgctaatactagatcttattcactctatatttttgcactcattaaccatctatactttttcccccatccccactacccttcccagtctctggtaaccattattctactatctctatgatctcaattgttttaatttttgcatatgagtgagaacaagcaaaatttgtctttttgtgcctgggttatttcacttaacctaatatcctacagttccatctatattgttgcaaaagttgggattccatttttatggctcaataatattccattgtacatacgtaccacattttctttatccattcatccactgatagacacttaagttgattccaaatcttggctattgtgcagtgtaaatgtaaatctgcactccatgcaataaacatggagtgcagatatctcttcaatatactggtctttcttttggatatatacttaacaatggcattactggatcatatggtagctctatttttagttttttgaggaacctccataatgttctgcatagtggctgtactaatttacattcccaccaacagtgtacaagggtttccctttctccacatctttggcagcattcgttattgtctgtcttttggataaaagccattttaactggagttagatattatctcattgtagttttaatttgcatttctctgatgattaatgatgttgaacattttctcacctacctgttagccattcgtatgtcttcttttttttttttttttttgagaaatgtctaatcagatattttgcccattttaaaattggattatttgattttttcctattgagttgtttaacctccttatatattctggttattaatctcttgtcagatgggtagtttgaaaatattttctcccattctgtcggttgtctcttcactttgtcgattatttcttttgctgtgcagaagctttttagcttgaa

SEQ ID NO: 94378 - DNA, 44606 bp, Homo sapiens
aaagataaggttcttccctaaagaagctgaacaaactgagaactacactagttgctatggacactggtgagaagagcaaactcctcacaattccggaatttgtaggaccccagctaagatttggctgttcacccagccatcctaaaacaaaatatatccgtcaataagcctgtccatatatgcaaagctcccaggaagccttagctcttaaataatgagttgtctgagaatcatcagatagttgaggaaagactacagtatcaagggcaaacaatgaaataaacctccaaaaatctggctttggaagcaactgaaataatttatgaaaaaataacacaaaaaccaactctaacaaacatagagagatttgaggagatattgcatccattacataaaacaagttatagaaaaacacattatacaaaagaataaagagaaatggccaatagatacatgagaagataaacaacctcatgaataatcaaggaattgcacattaaaaccacaaaaaatttttatctactggacagtcaaaaattaagaaatctgataacacataatgttagaaggatgtggaaaaataggatctctaatttgctgtaagtgggagtgtaaattagtaaaatcactagatatgttttacactatcttgctattatattcctacagaaactcctacacacacacacacacacacacacacacacacacacacacacacagagtggacctgtgcaagaaagatcaaggcagtattattgctcctaatatccccaagctggagacaatttaaatgtccaatggtaggtaaatggttaaataaattgtgctttattcacctgtatacataatgaaaaataagcaaactatagccatatttaatagcatagatgaatcttagaaatataatattgagtgaaaaaagtaacataaaatattccagttttcataaaactcaaaaacaaaaaataaaacaaataattctggaatacttatatctattgtaagaatatattcaataagtaagggaatttaaaaaaaatactcagaatatgggttactaccaaattaaagtggggtaaggttagggaaaaattcataaaaagcttcaaaaatcttgagtaatagcctagtttttagctggtgaattaatgggtgttcatgttatcattatgcttggtaatttccatgctctgtatctatatttatctacatatgtgtgtgttaataccacatatttcataattaaaagaatttaaataaaataaattgattctcaacaaaagcaaaagagttcaacaggaaaaggaaagtcctttttacaaatggtgctggaaaaagatattcatataaaaaaataataacctcaacttctactgatacatccacaaaaatctaagatggaacataggcttaagcgtaaaaggtaaaactgttagtcttctaattgaaaacataagcgaatatctttacaaccttaggctaggcaaagatttcttagacacaatagaacaaagcactagccacaaaagacaattttgacaaagtagacttcatcaaaattaaaaacatctgcatatccaaaggcacccctgagaaaataaaaattcgagttaaagggaaatattatttacatctgtctgtatatacatatgacattatgtatatatatgaccttttaaaatcaaacatatgtgtgtctgtatataattgacctgtattcggagtctataaagaaataccacaattcaataataaaacaagccaatacataaataggtaaaagtcacaaacatattttcacacaaggcatgaaaataataagcacatgaaaaagttcttaatatcattaattgggggaaatgcaaatgaaaatcacaatgacaaacctttaacttctacaatggctaaaatttaaatgactggcagtaacaagtgttgagaatgtggaagtggagctttgctatattgctagtgggagcgtaaaatggcaaaagaattttggaaaatatttggaaaacttttctaaagttaaaaatatccctaacttatgactcagaaattccactctttaaccaagaaaaatgaaaacatttgtccataaaaaaaaacactgtatgagtatgttcataggaactgtactcttaatagctaaaaaccagaagcaatgcaaatgtcccataagtgaatcaattaacatatttgtaccatgaaattctatttaacaaaaatggaacaaacatgtcaaaacatggatatactcaaaaacataaagtttatgaaagaagcagacacaaaagagttcatactgtatgactccatttaaatgtaattccagaactatagttctaaactatagtattaataaaaaaatcagaagatagtactgtagatgggggagaggggttgaataagcagagaaacagaggaactttctgtagtggtagaaatattctctatctcgattgtggtggtagtggttttatggatgagtacatgcatcaaaactcattaaattggccacttaaaatcaatgtgttttaatatgtatcaaattttatctcacacaaaataaaacagcttatgagaagataaacactgctatacattttcaaagcatcaaacgtaactagaaaattgtaaacatttcagacagaaaaaactgattctgctatcaacaagttaaagtgagactggcattctcatcagcaataatgaaagtcagaagagagcctggtgcagtggcttgtgcctgtgatcccagatacttgagaggctgaggtgggaggatcacgtgaggtcaggagtttcagaccagactgagcaacacagtgagactccagctcaaaaaaaaggaaaaaaaaaaagttagaagacatggaaggattgagagttgaaggaaaatacttttgattctatatacagccaaattatcagtcataagagcaaattataatttacagctatacgaacattaaaaaataaaattacctttcacttgccttttgtgagcaagtttccttaggatatattccagggaaatagggggaagcccaataacagaagatgaggggctaagaaacaatgttatttacccaagaatgaatataagcccaggataggagcaatacaaaaggactagaatgcaatctgttcaaattaaacagaaagccattgggctttaaggggaaaatcttcaaacagaggaatggaagcttgcttctatgtgcatcatacaaagaatgagaagattcagtgaagaaagcacatccacctacctattccccaggagaaagcagaaaggcaattaagaaagtggggacggttaaaaactatgtattacatactccaaaatataaagcatgctcaactacagcatattttgcccttggcaggaaagaaataaaaacccatttgaccttgatatcataaataatctccttagtatggcacagggatcatgaagttaaaactctggggaaaaaaacatatcagagcatacagcttggacttgctctaagtaacaactataaagccataatactgtaaacattttattttttttattggtttttggcacgtgaataaagcgcaaatgttatagttaagaaatatattactaactttgacaatgtacaagtaaatgtccagctaagagaaagtgggcataaatgtagtttctgaagtgataaagaaaaaggtagaatcactacttttctcgttttaccaaacaaggagtcaaatatattttcaaaagttgatgtgaaaaaagtagtttacgtatattattttgaattataaagtaaccaatacaaaaactaaaaattatgattatgactcttccaaaattcagaggagattgtgaatggtgtgggctatttctagaagtcaacggaaaaagaattagcagttcaacttagggctatctcaagaagtcaacaaaaagaattaacagtttaacttattatttaacctacagacctaaaattagaaaaggttaaaagtggttatctttgaagaacagtactgagagtaggacaggtgagacagttgcactttattattcaatcctactacgctatactacttgattttttttttttttttttttttttttgagacagagtctcactctgtcatcaaggctggagtgcagtggcatgatctcggctcactgcatccttccacctcccgggttcaagcgattctgtgcctcagcctccagagtggctgggattacaggcgcccgccaccacgcccggctaatttttgtatttttagtagagacggggtttcaccatcctggccaggctggtcttgaactcctgacctcaggtgatccacccgcctcgacctcccaaagtgctaggactacaggcgtgagccaccgcgcccgaccattttattttcaatcagatgtctttatcatcacatagctgaaaataaaataaccaaataaaacacaatgatcgaaaaagataaaacactaattagcataatcagtgttctttttccactacctcttaaatggttgtacataaaaaggctcacacacaaaaatacacacacatacattcacttacacctcgtgagtggaagaaaactaccgggggaaaaaaaacgtagagatgagagattagatgagggaaacagcagtgcaagcagttgggcttgaaaattcattcattcaacaaatattttgaagcccctattttaagtcagttgtttttccagctggtgggcaaaggataatgaacaagtcagactctgtgccctcaaagaacttagagttttaaacgactcgaatggggaaagaaagtaaaaaatagggcaaaagacgccgattttatcatgaataaaatttcacatttcttcaacaggaaaatgatactaattcatttattttatatatacattctctcaagaggttatttttgtctcaaatagatagaaaccaggacagggatccttgaaaagcagccactgacaatcctcaagtaacttccttcctctgcttcactttctcctactgctcaagggggtgttacactttgacgactgactaaacctcgagggccagaaacaaaccaaagcaaaattctgcctccaaggtgagtaatggaggggcggattctagattctctaacctcctttagccttcctttgaggcagtgacagagcgattactaagcctacggttcccaaacgactcaggtgaacctgatttacaggaaaggcgggctgtagctagggatggagacagtacctatcagcaagcggctccacagctcggttctctatctattctgaagacatgcggggccactcactgctcctgatagtcctctacctcccacagaccccacccactacgacacggaaaactggattacccaaatacctgcctctgagtctggggacgcaggcaagcacaaagacaagggggatggagcttctacacagggccccagcgctgtcgctgtggctgctgctgccgctacggcttagtgcaccagacgctgcatttcaggtgctcctacaaaagaggccactcctggaacgccgggagctcagacgctgccctttgctcgcgagccaagtcagccaaggttaaccttcgcggaacccggcgaggagcgcaagcctggccttccccaaacacagatccgagcttttcaccctctaccctcccctcagcctggccttttcttccgccctcacagccaccgcgacccaacgctgaggaaagaccccgacttgtggtgtccttccccttgcccaaactggccacgaaaggacatatagcgagagagaaagaggtgcggggggacggggggggtcgattgaaaatactgggtgagggaatggaagacgaggagcgtggtatggcaggttaatgggactgagcacaggaagaggaagaaagaattgagggttgaatctgtagaacactcaggctttcagcaaggacacctcattgggtcctttctcactgctatagtacgcgggtggctggacctacatgcttcctgctgtggctgtctcggaacccgtggtcctccgcttcatgtgagtgacgtcgtggcgggtcactcactcggggatcgccgattgcgatcgtaggggtcttccttctctaacttgcctccaggagagaggacctggcctgcgctgctaatgggtagtccgttcgcagcaggaccagccctggcctaaggaaacaggaaagagtttgagacttccttctaaaggagccacgtttgagaaatgggatgcaggcctaagttaagaatgctacagaaaaatatcgatccctaagcgtatttactgttatgtgaatgtgtgtgtcaaaggacttaggtgctttgggggagaggagggtgaagacaggaatttattcattgagcgaatagttattaagcgcccactctattccagacaccgttctaggcattaggtgaacagcagtgaacaaaacagacggaaatctgtgtctacttgtagctcacattttagagaggaaggcacatactaagcaaagtaattagaaacatactgtattttaggtcgtgatagtcctgaagagaaacgtaaagcagggaagaagggtataaagtgacacaggaaggtcttgctgaaaagatgacttttaagtaaagggctgacagaagtgggagatttaaccacgcgaatatcttgggaaagtgcagtcagacagagggaccagccattgcagaggtcatgaagcagaaacgtgctagaatagcaaggaggcctgtagggcagagttgagtgaagggtttagtccttcactggagattaaatcaaggcgagcaggtcatgaagatcttgaggacatctaacttttattctaaatgaaataggactttggagcgttttgagcagtagagtgatgggctctgacttccttttaagagggtcactctttaaggaaaatacacagaggaggacgtggtaggagaaaggagaccaataagaagagttttgcaataatccagaggaagcataatggtggtttgactatgggtggtaagaaatggccagttatattcttgatgcacttaatttggatatgtaagagtattatagatgacagggttaattttatttaattaggctttggaggacacttgaaaaatgaattccagtgtgagtttcagagtggcaaacacaagttaaaaycatggctttgctatgtggtacttgaagggattcagataagtcatgtaattttcctggatctgtctataaaatggaaatcayatctgtcaagattgcaaaggttagggtatattataggtatttaatgacaaggtatgtaatgggtctagtctgcaaatcttaaccaggtaaaagatggccttattgtgaggtaagagggtcatgggaggccaaggcatactcctttttaaattttatggactctktactggggaggaaagtttttgtgttaatgacgatggtatttagaaatgcatggactggcctctcatagctgtccaccctatagtcattccttatagccatcctttaaaccctccaggaccccctatgtcctcatcagtaaagggaaagcaggctgtctggtaagggaaataggaacttccataaaaaagcaattttagatattctttttataggttttggcaaaggttgataaaagacctagggaattactgctggttgctgcgcttacatattttgagtgtcttcagatgcattgttctcagtgtatttaattttcttctttaaattctgacttttgacacatatgatttaaatcctagcaggaattttcacctagtgctaaaaggtaccacattgctttacactataataaggacggtctttcagtgtggggtattttatgtatactataatatttttacatatccagtaattagattgtgtagcaaatcagggaaagaagttggaaggcaagaataggaatgaagggaggagaagaaaggaagaaaatgattaaaattactatattccatcaattctgagatacacatttttctcttacttaacatctctgaaatagggatgtatttttaagttgttgacatctttaaatcactgtagatgaattggcagttgtgagatatttgtcattgcccacacttacacccacttagtcataacttaatcttgtcattatttcagttgagttatatatgcactattggcatatagttgttgagtgtaatttcccttttaaagatcatttagaagattatgattagcattagaatgaaaagttactgtgtatgtggggaaacaaagggtgatacaagataaaaatccagggttaaatttaaaagaagtctgtcaataaataatataggatgtgtctaagtaataagaaagcattgggtcagttgattcaatagtgttttttttcataatgtacataaaataatagagcttcttgggattgaagccattttacaattgatggcattttagatttcttgtatagtatttaaagcttccaacaaaaatgtaaatttttacctactgtaattctgaaatagggaaattagaggttttgagtagagacactttcaaatttgtgtagcgttcctatatagcataagaattctaaaattaaaagtctgcctgtaaaactttgatttcaaagtagtaacttacttatgtttgattcccaatgttgtcatcgtggggcagagattttgctttttcaaaaagattgcaggcaatttagatggtgtgggtggggaggactactgaggaaattgctcagtaaacaaaaatgatagtgaagatctcagaatctcaaaaatcatcttttgtgtgtgtattttaatgattaagatgtactataaattcatgtacagtatttgggattctgcattagaggcatcgtatgattaatggctttttaggtttgatgaagtatgataattaacattgagaaggacaaaattaatgtgaagggacagaatgatttagataatawgtttcaaaagcttttgtcctaaaaaatgcattattaccattttaatttagtaaaggaaaaagaaaaggtcttgatcctcaccaaacacaattaacatacttggtctacagttttctgtgcttctctcttcataaatgttttatattttcaattactgtgcatgtcattcttatatctattttaatctcacagtcttaatttttttacattttagtccagagacttaaactagcatttcctaaactgttttagagaatactagttcaaataaatgttaatagctgttcctgtgttaggattctgtcattaaatatattggaaaatgcttcgtaattatatcctttagagaaattatagctagagcattaaaagagctaactgcagcatcagacagacctgagtttcaatcctcgtttactatgtattacatgaggcaaattaattttaattcaagttttcttctctgtataatggagattattacagtattcgaaattgacttgtgtaaagcatttagccagccatagcgcatgttctacaaatatatgtagttgttattatcatctatgagaaactttatacatattagaaactctgaggatttaaaattttgaaggttgacttatactcaatgtaaaattgaaaaatcacaggggagtaattagcatagagattaatgaaatgagcactgggttgaatggtaaaagatttgtttgagctttaagcagtattgttgttaaactatcactgtgccctaagcgtaacattattttaaaaatgtcttcaactgtgtttcccccatttgtctgaaagcttagttagttcaaagaacatgtttatttttgttctctactataaacccagcacatgacacaaaatcagggagtgtaaagttggggtcatgaacttattttaggagcctggtaggtaatataaatggcagacaacagggagtagtaaagtgtctgtctgtcttacttaaagacattcacatcagttatttccaacactgttagccctggaaaagaaagctatccctgaactttgtcaggctagtttgtgatccctagaaaagattagtgattaagaccaaaccctgaagaacagcatcattaatgggacagattaaaaaaaaaaggagccctgaaaggaggtgacaaggaagtaggaggtgaaatcaggtacaagtaattttttaaattaagaaaagtatagccctctccctctccctctccctctccgcaccgtctccctctgatgccgagccgaggctggactgtactgccaccatcttgactcactgcaacctccctgcctgattctcctgcctcagtctgccgagttcctgggattgcaggtgcgcgccgccactcctgactggtttttgtattttttggtggagacggggtttcrccgtgttggccgggctggtctccagctcctgaccgcgagtgatctgccagcctcggcgtcctgaggtgccgggattgcagacggagtctcgctcactcagtgctcaatgttgcccatgctggagtgcagtggcgtgatcttggctcgctacaacctccacctcccagccgcctgccttggcctcccaaagtgccgagattgcagcctctgcccggccgccaccccgtctaggaagtgaggagcgtctttgcctggccgcccatcgtcggggatgtgaggagcccctctgcccggccgcccagtctgggaagtgaggagcacctcttcccggccgtcatcctgtctaggaagtgaggagcgtctctgcccagccgcccatcatctgggatgtggggagcatctctgccccgtcgccccgtctgagatgtgaagagcgcctctgcccggccgcgaccctgtctgggaactgaggagtgtctctgccccgccgccaccccgtctgggaggtgaggagcgtctctgaccggctgcccggtctgagaagtgaggagcccctccgcccggcagccgccccgtctgggaagtgaggagcgtttccgctttccgcccggcagcggccccgtccgggaggtggggggcagcccccgcccggccggcgccccgtctgggaggtggagggcgcctctgcccggccgccccatctgggaagtgaggagcccctctgcccggccgccaccccgtctgggaggtgtacccaacagctcattgagaacgggccatgatgacgatggcagttttgtcgaatagaaaagggggaaatgtggggaaaagaaagagagatcagattgttactgtgtctgtgtggaaagaagtagacataggagactccattttgttctgtactaagaaaaattcttctgccttgggatgctgttaatctataaccttacccccaaccccgtgctctctgaaacatgtgctgtgtccactaagggttaaatggcccctgctctctgaaacatgtgctgtgtccgctaagggttaaatggcccgtgctctctgaaacgtgctgtgtccactaagggttaaatggattaagggcggtgcaagatgtgctttgttaaacagatgcttgaaggcagcatgctccttaagagttatcaccactccctaatctcaagtacccagggacaaacactgcagaaggcggcagggccctctgcctaggaaaaccagagacctttgttcatatgtttatctgctgaccttccctccactattgtcctatgaccctcccaaatccccctctccaagaaacacccaagaatgatcaataaatactaaaaaaaattaaaaaaaaaaagtatagaaaatttagataactttaccaaggtcacacagtctaagtatatataagcaagcccaagggtatatatacccatgttcctctgccagtgctagtgatcattatctgcatgttactagaaaacattaacataaacttatgcatccaacctatatttttaaaaaatttaaatgataattaatcaacaagtattagaaaacctgtttccagagcttctgttctaaagacagcaaatggcttttagcacttgagcacagttctgttaacacacagacgtaactagaagtgaaatatttttagatttcacaagatgagactttttaacattggcatcatgaataatatttccagatacccagttatctaggactggagaagaagtagagtctgggcgccagtgcaatggctcacacctgtaatcccagcaccttgggaagccgaggtgggcagatcagttgagggaggtcaggatttcgagaccagcctggccaacatggtgaaaccccatctctactaaaaattcaaaaattagtcaggtggcaggcacctgtaatcccggctatttgggaggctaaggcaggagaatcgcttgaacccaggagacggaggttgcagtgagccaagatcgtgccactgcaccccagcctgggtgaaaaaggaagactctgtctcaaaaaaaaaaaaaaaaagttttatcacttctttttatcacattgtttccttttagtagttgcatatgtgtatttagtgtttagttcatttgtatttctgtattttgaaacatgacattctctttcctaaacttatgcttgttcttcaatatgtattataaaagtcatattttatgtaactaactattccacttatattttgcaaatagttaacagatttatcaactcagtaaaattgtatttttttctcttaggctaggatttattatctctattttcaaaattactgttattcttagaagattttttatatgtttctgtatgagtcagaacatgagtttctttttttgatttttcagcaacttggtgggtatttatttttgaaggactgtctagaactgttggcttatttatgagcattattctttatggactattattttaacagtttagaaaaatacagaccaaaagagcacaaaaattcaaatgaagataccacctttaaactctgctatttttaccaaaatgaacacagaataccatgttgttacttaaacgtttgcaaagccagaattgtagagaaaatatcttaatagaaatggatatatgaagaaagttaaagtaaaaaaaaaaaaaaaactatgctcttctgaattttagtatcctgagtacagcatttctttagtttttgatgtctttttattttagtctaacataagtaatgatgaaatatactcaataggtaaaatgtagctatcacaaacaataatgagtatctgattaggcagaattggcaagttttacatctctagcaaagacatatttgatgaataatactaaaatgaatgaattggtgcattttagaaaaatacattttgaaaagatatggctcaaatcatcttattcaaatttcaaaattaagagaaaaactagaaaactagtatcagctaatatgaaacaagtagatttaagtatagactgatgctcaaaaatgagccaacagatctagacagtcacctcaaaaataaataccagccagtgtattgtggcttttcagaatattttttatataggattggtattatataataatttgaaattttcaaacaatctgttacgtgtctattatctagtttttattcaaaatttcaccattaatattgagtactgcttcatttatttaaagttagaattatttcagcaatacttgtatcattgttataccttgaattataaattcttgttaaatcaggtagaaaagaacagttcatagtattactaatgattaacctctccattgtcagtgtgattatttttcttagtatgtggcagtttaaattttaacatggtgaattaatctcagaatgtttgcttacatacatttttctgtaccttgatagtatttttttaaatttctctgaatttattataaaactaaaattctaatttttaaaataaagacaacggtatatactgacattatatctgaacaagcatatgattaatattttcttaattgttgattttttcttttaatatttatctttcctaattgacgttttcttcttgaaaattgtacctaagtgaatacacagtagaaggatccagtatacagaaatataaaaggaatgaaatcagcaactctttactttggaacacagatgtaatactcattagcatagttacggttattgttattcttatctcttagygtacctgaagctttctttgaaagctttcaaccttaaatgtggctaaatagcctgttttctgcatttaagaacaaactatatttcctcttctaagtagattcaggaattagtctacttaacatttctgctatttgtttggcttgttgctctccataggaaaactatttttctaagatatttatctattacagtagaaaatgtttttcctttcagactgctttttcatagtggcctatagtataaatttattcctttcacagtgtaatttatcacttttatttttcmtataggattttctgccgtctcttggcaaaaatggcaaataatgatgctgttctsaagagactggagcagaagggtgcagaggcagatcaaatcattgaatatcttaagcagcaagtttctctacttaaggagaaagcaagtaagaaaatttaaaattttttgaggagatacttaaaatgaattcatacaytgatggagaaaaaataatgtttaccgctttaagttatttaagttttacttagaagtttctgttatatgtagaaaaatatcaaacctgaatttctaccttcaggacttcagttggctttggttttgtttgtttaaatgtattttattttcagtagtcaatgtcagaatagaaatttcaaaatcttttgctgtcactagtagaaataaatgctttcctacgttttgtaagctaatggcttacaaaaacctgtatttactctccagaaactttatcaatttttttctaattttaacataccactttgtttctttttttatagtgtttctcgagattttaaaattatttttcttaaaaattcttactctctttttattaaaaagatgaagagattggacatagtcattgctcatatgatataatatatgttgtaaaccaaattttgtcttctgtaggtggccatttcctagcctcttgataagcattttagttttgccagtttgaaaatctttctacttattcttcacctttatattattctttggtagcctatactggtagtttttagtcatattgctcccaatttaggatgaatgttttataaaatctctgttaatatcctgtaaggaaaatatttcctagaaaaataacctacctatatataattttaaaacatatcttaatcctatatataaaatagagaagagaaataaaaagaaaggtataagtagtagtaacaataatatgtatttcagtaagtaatacttcagcagaattataccactaaaggcagtgtaagagggtcacatgccccatgattcacatacatggaatcatcaagaatgcaataggtacaatgccaactagtataggtatatagtcagactgcctttgtgtaggtgtctcagataccagaagcagatagtgatatagatgatttattcaaactgatgagtgattgattagatagtattttgaataaaacaaggtacagtctactcttgatttatgtggtacttgattcatagaaaatttagggtatartaagcatgcttaaaaacactttgtgtttatatataaagaatagttaaaaatctagactcaaataattattaataggatttttacttatacaaatttatgataggccactataaagttctgcaggatgtgaaacagttcttcattttgcaggagtatccagcatactgcaggacatctgacattcttggcttctgcccaataaatgccagtactaacaatcaaaaataatcctacagattttcaaaatcctacctacaaagcagtaccaaccccactgagaaccattatttttctcttatacttttgttaccccattgcacacttttaacacatacattatattttgagcaaatccttgagttatttcactcattgaatgtttgattagcttaactcagactttagcaatattcagcttcttttaaaaggtaatgactaaaaagaaagacatgagaatagtttttgcttgtgtggtaacatctcagaatttttttaaaaatatatatataatttaatataatgcttctcttttttttcagcatctgttattgacattttatcttttatttttaaaaatttttttgagacagggtcttgctctgttacccaggctggaatacagtggcactatctcaactcacactgcaggctcaatctccaagcctcgatcagtcctcccacctcagcctcctgagtagctgggaccacatgaatgtaccacaacccccagctactttttgtatttattgtagagatgggttttgccatgttgcccaggctggtctcaaactcctgggctcaagtgatcctcttgcctcagcctttgaaagtgctgggattatgggattacaggcatgagccactacacctggccacatattgacacttttgtgccagcttcttaagttatttgccattgccttttattatagccgcaatgctgaaaaggtggtaatttgatcttagttagcatcttaataggagctaggaaaatgattcataaacaaagtctttctgttttactcttatttcatatattttctccctctctctctctctctcttaaatagcatgttgttttaataaatattaaactggcataaaggcactggccaaacatttggttacactagagctagtattatcctagctgtagttatactggctgtcttcttttcaaatagtattcatacaaaacctcttttaaaaacatattttaactggatgttcttgatcctagttttgcaggcaactttgagggaagagaagaaacttcgagttgaaaatgctaaactgaagaaagaaattgaagaactgaaacaagagctaattcaggcagaaattcaaaatggaggtaattaaatatagaaaatttgagtaatccagaagttaagaagttggccagtcacaccaacagtgaggaaagaagtaagaatctgtatctaggcaacttggacaacttcataacttctaaatgactcagatttatcaataaaatrggggcatggatagaacctacttcytagagtatgagaattacatgagttaatttgtataaagcattttgaaaagtgtttggggcatagtaagttcataataaatgttagctgttcttatttgcaggtttctcggtttagtaattgattaaatgggaatcatgcctttattctttgatacctcaattatggctaaaatatgcctaattttttggcagccattttatagtctcagacagtggatatttgatagccatatacagtgaatttttcatttaaaaagagttcccatttgtggttcacaatttcatattttttgtcatatttattggtttaatatgaatgacattatttcattttctgtctcagtgaagcaaatascatttccatctggtactccactgcacgctaattctatggtttctgaaaatgtgatacagtctacagcagtaacarccgtatcttctggtaccaaagaacagataaaaggaggarcaggagacgaaaagaaagcgaaagagaaaattgaaaagaaaggtatttttgacctttaagcatatttagctcttgactggattatcagaaaatgtcaagttttgataatgataataataatagtatcaaaagtaaagttcaactttcatgagctaggataaaattaggaacaatatgatattggaacataaaagctgggtcctaaatggtgtgtgaatattgaccagattaacggggtaaaaatgtggcattttaggcagagggactggcataagttaaaacagactgtaaaggttaagtgtagaaacccatatgtagtttggtatggctgaattttggtatctatttgtggtatagtttgagagaagtcacagataggaaactagcttaggaccagttgtgaagataggaaaagaacattccaccagtcaaaacagactgtctgaactaagatttcaagaatccatgagaactaaagtagatagaaatgtcaccatccacttaggcaacaacccttgaaatttagtcatcaaccttaacctgtccctattccctgttcttcatatctaattaaccaacaaattctattattcctgtccccaaaacatacatagaccccagctctgctctttcttttcattaggtcctacctcagttcaggttttcaacgatctttcatctgaattaatattaaagcctcatcttttctagtttatttttagccttgctgctaaagctatttattctaattgtaaatctgacttcctttccccagatatgtctaaaaagttgcctttataaataattatgaatatttctcattatacttaaacttatttactttttttttttttttttggaaaatataacatgcagagggatttatgaactaacccaagccaatttagcctctaaagcacttgccagttcctttggcaaacatcagtaacctctgttagttaaaagtaggtaggggctgtacagcctctgctatacaacttcaccactaggtggtatgattacaatgaaagcaagtcagactaactcttctagtttataaagtacgttaagaagtagacacaaaacaactatataacctgttcttgcaaatttggtggaatccatattctattctctaaggagggtgcactgttctgactcaggattaatcagtcttctagttagagaaggcaacaaggctctcctttgatggaagagggagcacacaggaccacaagaccaaatggagttataagattagaacacttctatccaatggaactttctatgataatggaagtactctatatctgcattatccaacatggtagtcaatggccacatgtggttattaaagatttgaaatgtgggtagtatgactaaactgaatttctaatttaaataattttaaatttaaatttaaataacctatgtggctggcagctaccatattagacagtgctggttatagagggctgttccataggtgtttagctgctagctaggactgccagattctgctcatgcaagggctgtggtgcccatatgatctttctagactgctacatatcttttttttttttttttttttttttttttttggagacggagtcttgctctgtcacccaggctggaatacagtggcataatctcggctcactgcaacctccacctcccgggttcaagcaattctatcttagcctcccaagtagctgggactacaggtgcatgccgccatgcctggctaatttttgtatttttagtagagacaggggttcaccatattggtcaggctggtctcgaactcctgatctcaggtgatccacctgcctcagcctcccaaagtgcggggattataggcatgagccaccatgcccagctagactgccacatatcttaattgagcgtcactcatttgtcagtgaaggatttctgaaattccttatgataattaacaaagatcttggtatagattttaatatttgcaatcatttctagaatggggattcctgataaaagtatttcaaatgcctaggaagtacattagagttttaaaatatatacaaatgtagatatattgttatactacagtatttttaaagtaaatgcatatactttatcacacaaaaatattaagatttttggcatattctggtaattttgttgtacatatttttctgtataatttggatttttaccttttgaaaaatttttgctaatttgtttatggaaaatggaatttttttaaagcttgctaatgagattaaaaattggccattattttaagttaattccatcccctctttgataaacttattgttgtatgaattatgaatacctttacacagaattctcctttcctgcttcatgcagaattattcttcactgagtttctatatttctttgtgtatgtcatgtttatcacatattcattatacatatacatgtctgtcttctttaaaagagattttgagtgccttgacaacatggactgcccatcttactgtttccagtgtcatagcactccgtatgttgaaagattaaataaatgtatagttgagaaagaatgcttccaagctacaatagcttatctctgttctttggattcaaaggtaaataaggttttattttgattttacttttttggggccagaaaagctaattgtaaacttaaagaatatgaatcctctttgcaggttacaattaactcagtagctaaaataatcatgtgttaataagagttacattttcagcaaataaataaaaatataattattaaaacataatcagaataaaatattcttatctgcttaaatagttactgtggataaccctaaaatcctaatatatcttcagagaaatctaagaaatggagaaattaattatrtacttactagtgtatataagtgaggaggaaaatatttaatgagtgaaattgcattctgctctagttcattctgtcatttgggtactggttgtggtgttctttctaaataaagtatttatcaccttccaaagagccatagtaaaagtttttagaggaktctctattatcctgtttcggggaaaggcaaactttttctgcctaaagcctttgtcacaactactcaactctgccctggtgcaaaagtatccatagatgatatgtaaatgaatgaatatggttgtcttccagtaaaactttatttatgaaaacaggcaacaggctggatttgtcccatgagccatagtttgccaacctcacacaatgtcttcaaatagaaatacaacagagaaatagctaaaataggattcaagattttatgacttggataatttttttctttgttattatttaagtgaaggtaggagataaacattctttttattttttccttttaagctcattggtatggataccatggagttttcatagtgtttttttgcttggttttatttctgatgtttacccattcataaatactttttaggagagaagaaggagaaaaaacagcaatcaatagctggaagtgccgactctaagccaatagatgtttcccgtctggatcttcgaattggttgcatcataactgctagaaaacaccctgatgcagattctttgtatgtggaagaagtagatgtcggagaaatagccccaaggacagttgtcagtggcctggtgaatcatgttcctcttgaacaggtaatctgtacaactgaaattcytgttgtgtacatacaacattttcattccctccttcttggtatctttccattataattttgtataccatacaacatgtgcccttgttaattagttcagtcgattagtttgaatgtggttaattacacaaaaaaagcataaaaccaccaaaaacctgtaaaacatctgtaaattaagatataatgcataaggataggaagaagaaaagatgtattattttatctatttttaaagtatttttacttttgtattttgcattaaaaaactattggtgtgtatatatatataaaatatatttgaaatctaagtaacaacaaaatacaaaacatcccatttttaacaaataaaggaatactattaaaaattacaagttcaatctccgtgatcccctctcctcatttttcctcaagtatgaaaatattttttgggttttagagaaataaaacttgctctcatgcttttagattggtgctttctgggtttattttacatgattttgaaaagcaaggaattataaaattccatgatgaagcagtgataaaaataatgattatgatgactattgtgttagaagtacttaatagataaatttttttcacatgctattttatttcttactatatacaactgtcagttaagtagtatcaccctcatttacagatgacgtttaggaaagttaaccaagttatgctatatatatacagagatacatatatatatatatatacatatatatataagttggttcacttttttatgtatctatagatatatactcattatacatctgtctatatagatatatatatatatactcatttatctcactctgaggctgattatctttaatccctatactgttcagctttactgtttaccattcaaggtggagttagtcatgaaacttctaactacaggtgctatgtagtttttagagccatgcatatgaccaaggtcataaattacaaactgctgggccaaggaaagaatgcaatcccaaaaagtttcagtttatctttcatagtatttcataaaatacttacacatggaattttacatgaaaatcctgatgtcttgtttcttaaaaattcagaactaagccccaccccyacccttcccaaccccctgctattttcttaaggcagaaattggttaacacttagtaatggatagcccctttaggtggaagttagactctttaacacagtttcaaccattccatagttgaggtggaaggtcacttgtgattatttggtatttatctttacttttctgctagtgttatatttacggaaggttaagaagagactcgagtatctttttttaccatgtctcaaaaaaacaagggtgttacttgttttttctgtctaggattccttactcatttcctttacttatttggtagacagttgtatcataattgcatcaaattgcacttttgatccctagcctgggcttttgttttggctctctaatttcagcgttgctggaacacagtacgggtaatggatcaatattgacctatcatcaagagtacaaggaagtgatttcttctacttcctacttaacaagctcatttcttttaggtctccaatgattaattatccgagccagtgaagtttgggttttaagtgtttcataaaagaaattgataggaggttagagtatctccacttttcctttcttctggtgagtttagcaccagggactgtgctttgtgtagcttcagaaaacaaaccatggttacagtttatataatattattccctatttaaaatttaattctttctatagtgaaattagagctgggtatttggaatatgtgaaaagtattgatggtatattttatgaaggataaccttgcatgataaccgttttaaaagcaaattgatactccatgatgatacccttcagagcagtggtttctaactgttgctttttttcttataagctttcaaacctccttctcaacaaaagtttactttcttcctttttctttacttttgaataccatatttactttcttgaagaaatatggtttttaaaaaatctagtaacagtggaaagaatcgaagacagtagcagttttaaatgtcctctttctagatgtcttctatggtggtttgaatcatctacctatttcctctgtcccatggtgcttcagagatattgcaaagaatatggacttcaacattacgatagttctgcctttgtttattgctactctgctgcttgttggttttgtgaacttgaacaaatccctgtgttcattcaattatatttatagctgcaagtatttattaagcaccaagcacctaagtaaaggatacagcaacaaattaaaatacagagatagataaatttcttttttcttttttttttttttggagactcacccaggctggagtgcagtggggcagtctcggctcactgcaaccactgcctgcctcccggattcaagcaattctcctgcctcagcctgccgagtagccaggattacaggcaccaccaccaagcccagctaattttttgtatttttattagagacagggtttcactatgtgggccaggctggtctcaaactcctgacctcaggtgatccgcctgccttggcctcccaaaatgctgatattacaggtgtgagccaccacacacaagcaacaaacatatttttaaaaatagccctgcctttatgaagctcacatttgtataagggagtcagaaatattaccaaggtgtaagtaaatatttagtatgttaaatagtgataagtgccaagagaaaaatagggaaagaatctagtaagtattgaggccaggatgatattgacattttatataaagtgcccagggaagacctcaaaaagaaagtgacatttgagtaaaggtctaagaaaatgaaagcaagtcatgtgtttatctggctgaagagcatttcaggcagtcctgggagaaatggatggctgggatgttcaaggaacagcaggaggccgatatgaatagagcagggttaataactgagaaagtcatgggagatgaaatcagagataagggtgccaaatgtcttatagatcattgtaaagtttggcattttttctgagtaagatgaaagccattgtaggattttagagcaaaagaataacattggtcagcctgacattttaataggatcattctggctgctctgttgatgggaggaagatggaattaaggagatcagtgaagtttctcttatctaggaaaaaagaagtagacttggcatatgcatgtgctttttttactttttaatatttatgttatataggaccagaactgattcataactccttatgaagttaggagccctggagaaaagaaccaactgatcttcagccagcttaaattggaaaaactcctcatttgggcttcatcttttctgttcttataagttgtagactattttttctcttccagcagccatcattcacaaccataagcaaagctatttttataaacatctgtatctaacccatcaagatacaacctaaaataaaagttaaaaaaaaaaagatagtactagtaaacattctataaagtagggacacttagaattcaaaattatatactctgttttgtaggtggtacatttttctagggaaaagtttcatagctatcgtcagatccttaaaggattgcatcttactaatcctgttgctactcttaaacacttttgctgtaacttttaagttctcatatacgtgacattgtcaagttatttgaagcattcgaagagaaatattatttatgaagaccccctaattcatttcgaatttgactcttaggctcatttttttaaatcatagtatttcagagtaaatttgcatataacatttatttataaaaccatcttttatctagaatgcatctttttttctcctttgagcaatagttctcttgtatgattcattttaaacttgttgaaagaatttaaataactatatttcttacttttgctagttggagaaaaaaattaagacacttcaaatatgaagattaaagaaatttccgtttgcttccataaaaaatttgtagaactagccctacatgttagttgcatgatgcatgatgctgaaattgttaaatgatctttttttttttttttttttttttttttttgagacagggtctcactcttgcccaagctggagttcagtggcataatcaaggctcattgcagcctccaggctcaagcgatccttccacctcagcctcccaagtagctgggactatagccacatgccaccatgcccagcgaatttttttattttttgtagagactgggttttgccattttgcccatgctggtctcgaaaaaaaaaaaacactgggctcaagcagtctgcctgcctcagcttcccaaggagctgggattataggtgtgagccaccacacccagccaattttttttaaattaaaaaataaatctagcatagctctggaaatgatcaaatgtgtagggaagaaaatgcacatgtgtaaatgtgtccatttattttaattctaatgctaggctaaatgctttattatgcatgttatgatttaatccttatgacaactcttcaatattatttctctcattttttgaggaaacaggagtgtcaactttatgcattctcattgctagtacatggcagctgaaattcaaaaccaagtctgtttcactcatttattcattgagtaaatttttaactgaaattcctctgctctttcaaccataatgcgttatcaatttggaggaatttttttttcatgtttatgcaaagcttcgtaacaacaataagagactttgggcacacaaagacaaaggtacatccacaaaagtagaacatttgatacttagcatattaggtgtagcttaatgtagtctggatatgwttaggcttaatctgtgtacatctttacttaccagtttatatttcacacagatgcaaaatcggatggtgattttactttgtaacctgaaacctgcaaagatgaggggagtattatctcaagcaatggtcatgtgtgctagttcaccagagaaaattgaaatcttggctcctccaaatgggtctgttcctggagacagaattacttttgatgctttcccaggtaggtatttattagtaattacttaatagtttyrgaatcagttctcaaagtgatgtttgtaatgcttaaaggttaaaatcagtcctgtgtaagaatcatgagtcttacattaatgaccattattaactattattgagtttttcaagattggctcaagatgacacattgagtaaaccttgtaatcattctcctccccatgaatgtacatgttgtataaaacacctgatatggtttgactatgtccccaccaaaatctcatcttgaattgtagttcccataatccctacatgtcatgggagggacccggtgggaggtaactgaatcctgggggcaggttttacctgtgctgttctcatgatagtgaataagtctcatgagatctcatggttttataaaagggcagttcccctacgcatgctctcttgtctgctactatataagacatgcctttgctcctcctttgtcttctgccatgatcgtgaggcctctgcagccatgtggaactgtkggtcaattaaacctctttcttttataaattacccagcctcgagtatatctttattagcagcgtgagaatagactaatacagtaaattgatactgggtagtagggacactgctgtaaagatatccgaaagtgtggaagcgactttggaactgggtaacaggcagagattggaacagtttggagggttcagaaaaagataggaaaatgtggaacagtttgggacttcctggatactttcagggctcaggagataggaaaatgtgggaaagtttggaactttctagagacttgttgaatggctttgaccaaaatgctgatagtgatacggacaatacagtccaggctgaggtggtctcagatagagatgaggagcttgttgggaactgaagcaaaagtgacttttgctatactttagcaaagagactggtggcattttgccctttccctagagatctatggaactttgaacttgagaaagatgagttagggtatctggcagaagaaatttctaagcagcaaagcatttaagaggtgacttgggtgctcttaagcattcagttgtattcattcacaaagacatggtttggaattggaacatgtttaaaagggaagcagagcataaaagtttgaaaaatgttcagactgaagatgcagtagaaaagaaaaacccatttctgccagctgcagaaatttgcataagcaatgaagagccaaatgttaattgccaagacaatggggaaaatgtctccagggcatttcaaagaccttcacagcagcccctcctatcacagaacctgaggcctaggaagaaaaaatggtttcctgggctgggcccagggcccccgtgctgtgtgcagcttagggacttggtgccctgcttcccagctgctgcagccatggctaaaaagggctaaggtacagctcaggcccttgcttcagagagtgcaagccctaagccttgacagcttccacatggtgttgagcctgcagaggcacagaactgaggttcgggaacctccgcctagatttcagaagatgtatggaagcccctggatgtcctggcagaaatttgctctaggggcagggccgtcatgaacctctactaagacagtgcagaaaggaactgtgggatgggacccccccacacacagaatccccactggggcactgcctagtggagctgtgagaagagggccactgtcctccagaccctagaatcataaatccactgacagcttccgcagtgtgcctggaaaagctgcagacattcaactccagcctgtgaaagcagctgggatggtggctgtgccctacaaagccacaggggtagagctgcccaaggctgtgggagcccacctgttgcatcagcatgacctgcgtgtgagacatggcgtcaaaggagatcattttggaactttgaggtttgatgactaccctgttggattccagacttgcatggggcctatgggccctttgttttggtccaatttctcccatttggaatggtgtatttacccaatgcctgtacccccaatgtattctggaagtaactaacttgcttttgattttatggctcataggcagaagggacttgtcttgtctcagatgagatgctggactgtgggcttttgagttaatactgaaatgagttaagactttggggaactgttgggaaggcatgattggttttgaaatgtgaggacatgagatttgggaggggccaggggcagaatgatatggtttggctgtgtccccacccaaatctcatcttgaattatagctcccacaattttcacctgtcgtgggagggacctggtaggaggtaattgaatcctgggggagggtttttcctgtgctgttctcatgatagtgaaaaagtctcatgagagctgatggttttataaaagggcaattcccctacacgtgctctcttgcctgctgccatgtaacacatgctcctctttaaccttctgccatgtggcggcctccactgccatgtggaactgtgagtcaattaaacctctttcctttagaaattacccaaccttggatgtatctttattagcagcatgagaacagactaacagaacaccacagagagattttgtcctaactaaagcaataatattaataccagcgtagcagaaaagtatgacgtggatagagaacagattaatgtgctgcaaaatctcttatgctgtagattgtctcatgctgcagcacagaaagacagagatgaaaagtttagatttataattataaattccatctaataatatacttgcatatgtttttactcaamttcaggatatagagaaaatatctaagttaaaatgtaatgattttaataatctaaaaggaagtttcattttgtattgcctgttttctctaataaaaatactcctgagacagatgaagcttcataatgtgtgagaaagtttcttcaaataggtctttgaagcagaagagaaaagattcttggcagatatagaataagtatttatctcatataagaggaaggacctgataaaaagaaaaacagttagaaattaagactgcatttaaaggatatttatttgactagagtaattgggaaaggcagatataaatgaagataaatagaattaggtaaaagaacaatttggagacatatttgtagaaatgactgaggatttgtgtgtgtgtgtgagcgaattattttgtaatggtgcaataaaattaaactaaggttttttgggkttttttttttccaacttgtattttaggctcaagggatacagatttcttatattggcaaattgtatgtccttgaagtttagtataggaatgatcccatcacccaggtagtgagcatagtacctaataggtaattttagaaccctcaccccactcccgacctccctcctagtagtactcagtgcattttgtttccatcttcatgtctgtgtatacgcaatgtttaggtttagctctcacttataagtgaagacatactgtatttgatttcctgttcctgtgttgggttacttaggacaatggcttccagctgcatccattttgctgcaaaggatattaatttctttttttaaggctgcatggtattccatagtacatgtgtaccacatttttttaatccaatccactgttgatggacactagagttgattgcatgtctttgctattgtgaatagtgctgcagtgaacttacaagtgtatttgtctttttggtagaatattctatttttctttgagtatatacccagtaatgggattgctaggtcaaatggtagttctgttttaagttctttgagaaactccaaactgcttttcacagtggctgaactaatttgcattcccttttctcttccacctcaccaacatcttatttttgttttttgtcttagtaatagccactgtgactggtatgagatggtatctcattgtggttttgatttgcacttctgtgatgttgagtgtttttgatatttgttggcgacatatatgtcttctgttgagaagtgtcttttcatgttctttgtccatgttttaatggagttatttgttttttgcttgttgaattaagttccttatggattctagatattagagttttgttggatgcatagtttgcgaatattttttcccattctttaggctgtctgtttactctgctgatagtttattttgcagtgcagaagctcttcagtttaatcagctcccacttgtcaacttttatttttgttgcaattgcttttggagacttcgtcataaattctttgccaagggtgatattgagaaggatatttcctagaatttttgccaagggtgatattgagaaagatatttcttagattttcttctaggatttttaagttttaggtcttatatttaattctttaatccatcttgagttaacttttgtatatggtgaaatgtaagggtcctatttcattcttctgcatatggctagccagttattccagcaccatttattgaatagagagtttttttcccattgcttgttttgttgacttgctgaaaatcagatggttgtaggcatgcagctttatttctatgtcctttatcttgttscatttgtctgtgtgtctatttttgtaccagtacccttctgttttggttactgtagccttgtagtatagtttgaagttgggtagtgtgatgcctccagttatgttctttttgcttagaattattttggctatttgcactctttcctcattccacgcaaattttagaaaatttttttctaattctgttataaatgatgttgtatgtagtttgatagtaatagtattaactctgtagattactttgggcagtaaggcaattttaacaatactgatttttccaatccatgagtgtacaatgtttttccatgtgtttgtatcatctgtgatttctttcagcagtattttatagttctccttgtagagatctttcacctccttcattaggttcattcctagatatttcattttttgtgtgcctattgtaattgggattgtgttcttgatttgactctcagcttgaactttagtgtatagaaatgctgctgatttttgtgcattgattttgtatccagaaactttactaaagtcatttatcagctctgggagccttttggcagagtctgtagggttttttaggtacagaatcataaatcagtgaagacagataatttgacttcttcttttcctatttggatgccttttctttctcttgcctgattgctctgtgtaggactcccagttctrtgttgaataggggtgatgaaagtgggcatccctgttttgttccagttttcaagggaaatggttccagcttttgcccattaggtattatgttggctatgggtttgccatagatagctcttattattttgaggtgtgttcctttgatgcctagtctattgagggttttatcataaagggaggtagattttatttaaagctttttctgtatctgttgagatgattatataatttttggtcttaattctatttatgtggtgaaccacatttattgatttgcatatgttgaaccagccttgcatcccagaaataaagcctacttgattgtggtatattgctttttgatgtgctgctgtatttgatttgccagtattttgttgatgacttttgtgttwgtgttcatcagagatattggcctaaagttttcttttttccttgtggtctctgacagtttttggtgtcaggctgatgctggcttcacaaggaaggagctcctcttgctcagttttttggaatagtctcagtakgattggtaccagttctttgtacatctggtagaattcagctgcgaatctatccgatccagggctttttttttttttttttgagacggggtctggttctgtaacccaggttggagtgcagtggcgttatcttggcccactgcaatctctgccttttaggctcgagccaacctcccacctcagcctcctaagtagctaggactatgggcatgcgccaccacaccaggactttttttaattggtaggtttttattactggttcagtttgagaactcgttattggtctgttcatgtttttactgtcttcctagtacaatcttgggaggttgtgtgtttctaagaatttatcaattttctaatttgtgtgcaaagagatgtttttaatagtctctgaggttcttttgtatttctgtgggattggttttaatgtcacctttgtcatttctgattgcaagtagctgaattttattgaatagcaaggctgatgtgattatataggcatgttttaaaattctccgttaactgtgtttaatgaaatattacaatatgaagagttttaacatggaatagtaagacagaaaatatggatgaaagcatggaataatttccttggaactcatttctactctcctaatcaaaagtagactagtctaaaaaaagcacacaggggattttctttttttttacaagtacccatgactttgaatgaatctgtgtcttgaaccttggtagatgagaaatcatagtggtctatgctctaacaacatttttttggagattacatttcgagaaaatctcagtctccatgatttctcagagatgcctaatggctttagattcatggagcatatgctcaccactctactcccaccaagcaaaactaacttgaaaacagtactacagctaggaaacaaagacaatgccaggtctttgtgagaatgcactatttatgatcaaataataagtaggaatttacagtcagacttttaatttccaagatcatgcttatttctattgatatcgagtcgtattaatagtagaaattaatagataattatgaagcataggtttaacttaaaagtccatttattaaaaatccaaattgtctatacttgattcctcctcttgaaaacccattttaatcaggtttctttccccactgtgttttgccagaactgctttgggtaagatcaccagtcactccctgtagctatatgtctagttctcagtcttattattaattaacttggcttctggcaccacactctcctggtggtcctccttcttcactggctgcccctgtcatttcctttgatgattcttccttacctccttagattcttactsttatagggcctcagaccttggatttggacctcttttttttccatgcttattcctttggcaattttacccagtcacttagataagctagatagctgccaaatgaactctttgatgtacatgttccaagggggaaggacacatatcccattcttccccctagactttcatttttccatggtatttttcatcttatttgataggatttccatcctcctagttgcttaactgcttttctcaatctgtacatcttctcctcagaaaatcctagtggctctaccttctgaacataccgaaaataattattaactccaccactagcaccctaatcccaaagccaacatctcttttctgcatatttacagaagtcttctaacttatcatcctgcttttgccctccctgttcttccatttattttcaattagagcaggcagagtgatctagcagattatattactctgctcaaaactattcagaagcttttcatctcacctagagtacaagcccaggttcttacagtgatctcccattattttgttaatctcatgaactccagcttttccttgttcactccacttgagccactggctctttcccaagatagctgcatgattcgcttactcatcttattcatatctttctgaacctcagctttttcatctataagaaggggtttttagttggtatttttcttaactgggtttgtaagctttaacttttgaaacatttagccaactgcctggtattttaaattctttgctataacttttgtgcttcaatatcctcatctgtaagatgagagtaatgaatattacttacatatgtactgagaggattaaacaagttaatatatgtacagcactcagtacaatgaccagcacctagtaagcactatatacgtgttgtgtgttattatgaatgttatctagtttatatggcactttctttctagatctgagaaggttaattttgtgctgcatcacagctttttatacttagggcttatgtctgcttgcagcaagaatttacccacacaatctatattctttataagaagcstgtatgtcagtctgcttcttaactaactcattatcagtttggcaacatccttttgggccaaggttgcaaaggttgcaaatctgagtcagtgcttaggtctccctgaacagtatctctccctctagccttccagaatcctggagtgcctgctttgccacacaatatatgcacaagattatgattatagattaaggaatgatttacaaacaaaaaataaaaatcttatggatctaaggagcaatataattgaactttatttatggttattttttttccattctatttattagtttctctattgtcgaatcaaacgtccttaaaggagtaggagaaattcttattttttataccagtcactttcagtcttagtttcattacaagttctaatgtaggtgtatcattcaattaactactctgttatctctgaaagcctgcatgttagaaggcaatgttgtatgttcttgcagtttcatagtttctgaagagctaataaacaacaaaactacaatgaccaactaatttacacagttttgttattcttatatgtatatgactggaaaataaatactattttatataataagatgtcatcagaatataaaatataaatataaaatatattttatattcctaatataaaatataaatataaaatatattttatattcctaatctaaaatataaatacttccagtaattaagtaattccaagagatctcaacttaggagtcagtgaaaaaaagatctagaaggtttatatttctatcattacttaattatacttcagcaattttttttattacctccaggaaaataattgaatcatcgaagttctacagcttaagagatatgttacttttcttcattgtttcttgaactgactgattcttcattctaaatattgaacattctcagctattgaacttatattaaactttactctctacttttctgtcattaagtagaggagctgtttggtacattacttgtctttaagcctagaccagatatactctactactaatttttcttttattataaaatttatactatgagttactataaatagaggggttgtgggtattaaccacatgtaaaaaggttgtttactttctaaagtatggtttgtcagggggcagagtgctgtactagcagaacaggggctttgttgatcatgtgacattgagcaacttgtgttttctcagcctcagtttctttatacttaaaattagagtcagagttatgtgaattttaggcaacaatatatgttcctagtgcttagaaaatactagtccctgtctcattactcctttctgtttctttacatctcaccgagtagaatgggtaacaaatgaaatccaaagtagttatcatcattagctagagaaacccaaaatttaagccattctccagtattgataagaaatctttaagcactagagcagtgatctagctgctcattttgtattttgaaacatattaaagcataagctgcttctgccagttgtaaaaatataacatatcgaaatatattttcatttcttcacagttttcctttatatttaatgataaaatgagtatattaatccattcatgcactgctgtaaagaaataactgaggctaggtaatttataaggaaaagaggtttaattggctcatggttcagcgggctgtacaggaagcatggcagcatctgcttctggggagcctcagaaattttactcgtggcagtcaaagcaagtcaaagcaagagcgagcatcttacgtggcaggagcaggaccaagagagagagcggggaggtgccacacacttttaaacaaccagatctcaggataactcactatcatgaaaccagcaccaaggaggaaatctgcccctataatccaatcacctccaccaggccccacctccaacattggtgattataattgaacataatatttgggtggggacacagactcaaactatatcaatgagtaccttacattttattattttgataatttggatacaattcattaagctttattacttataaaatataagagtaaaatatgatatctttaatatacataaagaaacaacaacgattttattttaccaatcaagaatataaactgctgacataataaaaataaagtaaatgttaaaagtttgattaggtccaaaaatcagaaaatgttgccaaaacaattcactggaaatctctgtgaatagtctctttaatatttttgtatattagctgtgtaattttcttgtgctttttttctcctacacaggagagcctgacaaggagctgaatcctaagaagaagatttgggagcagatccagcctgatcttcacactaatgatgagtgtgtggctacatacaaaggagttccctttgaggtgaaagggaagggagtatgtagggctcaaaccatgagcaacagtggaatcaaataaaatgcttccactaccaaaagacattagagaaaaccttaaaagtaataaagagaaatatatttgtcacttatacctaaaatatgagtggctcatttttgcrttactctcttctagacttgactagtcatttacttggtatatattgttttcattgattggggaaacactagatttttacctcggtttttgatcatttataatggrgagaggaagttgcctatgttttgtaataatttattttttagcaggaatattgattagcagcttttttttctttatacacatagataactaactagattaatgtttagtttcttatttgtaggcacaggatgcatgaaatttcaagctctgggattttttgtatattgtgtatctgtatcaaaaatatcctctccttttcaaaaatgacaggttggaaaatgtttgtcagacttattaactggtcatattataataatactgataatgaccaactgctcattctgaaagccaaacataaaagctaggagaagtggcatctgaacatttttgctttgctgccagagtaaccctgactaataatacaataacagcaatttttttaaaaaactgagatttcctactggcttgaagtttttctatttagcaaaataattagtaataagttttgactaggtctaaagaatgaacacattgtaaacagttgccacagtagtttctaataaattgatcataaaagcagctatcctttttttttttaattctagcttctttttaaagattatttgggtacctaataaaggataatttatatcttattacagactgatattttgctttttcatgtgtcatcatactgtcagtatattaaaagaaattacagcytaaaacttaacatataccatacatatatattaaggtgtcaaatagctattctcactcatcttacaaatattgtaagagcaataaaaattaattgaggaattataagcctacaggtcatcagccttgaggtgattactgatgatttgggcttacacacatgtcagcaagatagggagtgtggataggggagggctggtagctwacaaggggcctcacagagaaatattagtgactttaaccaggtttcagaatctgggccttacctttacaggttcaacaaaagaatggcatcaatagaggcagaagtataracattgttttaaaaatacacacatgcacacacacacaaaacattttagcattatagctgtctgaatccttcaataagaaggagaggcacacacaaatacacacactcacacaaaactcaacaaccataaaacaaccctgcatgttataaaaggcagaattaaattttatttatttaaatccatggaactctggtaggccaggatatattatagtaccattatcaatgtgatattctgaaaatatgaactgagcgtcattaacaattgttggtacctaaacacaaaatgaatttcaaaagttactttgttctcaagatatgtcattcttttgggaataaatacttctggtgacaaagtcttttgtgagttttttgctctaatttttctcaattatattaaatttctttaatataatttaaataatatttcaactacctaggtagttgaaattttcccaactaaatgttgaaatactgtaccccagatcaaattatctaatgttttgttagtgaaacctaaactgatgattaaatcgttcatcaaacctagagataataaaaactattggtcttttgttaaaagcccataatgtagcatcatcagtagctcatttgtgctgaaatttatgacgacttactacaaaagagtacattccaaaaatgtcacatttgtctttctcaagtactatattatgccttaccaaattataacaaatgtccatgcttccctccataattcccacaggtctttaccatgtaaaaatccatgctaaagagtgctaaagagagaaagaagtggagaattaatcagtgatttttcaagttgtatgaaagcattgaccaagttatccattcagccctattcagtacttgttttcacagaaaacttaattctgttttatttgtattgctgggatgggagagctcttacggaatcaacaaagaaatagcattgttggcaaactggacataacacttcagcatctgatgtattctggtttttaaggatttcaacgatagggggtagtgtttggtgggaggatcactttgagcccaggagagcaaggctgcagtgtgctgtgattgcaccactgcactccaaactaggctacagagttgagaccctgtctcaaaaaaaaaaaaaaaaaaaaaaaatcttagttggggagcacctcgctgtttcttataactgggcattaaaatggcctgagtatacctcctcaacttttcagagaaatgatacgtccttttaaaatataaaagtatcagaagtatataacattagccatgtatttcacctacataaatagtgacacaagtcctgattctaagtgctatccagcagtatgaaaattacaactttatcaccaagatgcaaaataaaaagaactaggaagggcaaattagtatgctcaacaggcaataatgttgcaaattgctgtctcatggagaaagctctaccctccaaaattttagttaaggaataatcatgccttctctaacaaatgtaagggtgatatattaataatacatgtctactgtcatggattttattacagaattactattaagattgttattgccttctaactagtcttttcatgtgttttatccaccccttaaaagctccttttgaggtagatcagccattttaccccaaagagtcaacagaaaagttaaataaatgccccatacaaagttgaaacctggtttaatttttttcagttcttactgatcctgtgttctccaatacatcatgctttcttaacatgttagttaaatggtcatgtggtttcttttatttgaatgaaaagtttagctttactttaaatgttagagaaaaatagtgacataaaaatacctaaatttgagtagtttatgattagctcctttagtggaatacttaagagattctaaagggagagttgagattattaaacactctttggagtggttatgaagagaatttatcaattttttttctttttactattcaaatatatagggagaattcacttggcaaaaccaagctgctgctgctggtagcagttgcctttttgaagaggtttataccatgattctttgaatagtgcgctgttattgagggcactgaatgtgtaatgacagtccatcccaaaagccaacatgatagatgtcactaagttccatacagatagataatttaaaacagaaacataggtatactccattgtgatactacttatatgataaccccaaaatttgcaataatgatgaaaaggatagttgctgatggctaatatgcctctgtacaaaactgaatcatcttcaggtaccaacttgttggaattagaaagagtcacttcacattattttgcattgtactttgtatagttatggtttttcctttgagtaaatcttggcagagataactcataggagtataactccataaaaatatttggaggaaggacccagaacaatgaaataattgttggtgtgaaagtgagccatctggaatttcagagtgtgaactaattattgtatattgtattttttcacccttatgtatttgggtttttttttccccttcctttctaacttccacctatcctaacacacactattcccaattctctagatgtttaagtacaaaaacgtgtgtaagtatgatttttgtcttcatcaacatcatttcctatctggcaggctgttggccttagcaacaggagcagaaacaagcctgagacccaataattgcaagaaagaaaaatcctttttaatgaagcgttaactactcttgcccttcccattgctacataatgcctacagaattgttcaaatagccattgttaatgtcttatttcctcaatggcctttttgtgatgaaccttcatattaaggctgctctgacaaagttttacatttgtttttgtaaattgcctcattagaatatcatgcatcccagcagagaaatgcacccaatatatatgtgcactttggttttcagattgcatatttggctgatacttgttcatttaaaatccctcaaattttcacacctggggaatttggaaagaacagtgcaagagtcatccaaaatcaacaccacaactgtatttctctttgaaaaagattaatgaaaaatgcaaactaaaagtcactttcaataagtttagcaaaagggaatgatttcagtagaaataacttttttcgaaaactttcagttttcctataaaaggataacatttttgtgttaaaactgcacatacattgaaaacaaaaacaaaaacttttcagatacttttggagagatttgttttgaaaacaaagttggagtgagaatctgggaaatagcaatgccacataaaagcattagctttatgtaaaagaagtacagtatatctgaaaatcagtagaatagaaaatctaagaaaaattttaatataaaaaatatagataaacatagctttaaaaaagaaagtctttgaaaatgctgtttgaggtgatgtatctagaggaacaagcctggcaagagtcagagctgatagattgcaggggtaatcactggtgaccccacattgaatgcactaatgagactttaacactagctgcacaaaaacatcagatacactgtcttccaatcctctaaaatactcaaagcactttcaaattaagctttagtagagatttttggtgtctggatgagaacagcatacagattaggcatctrgagggacatgagaaaatattgcaaataatagactctcataggaaaggtggcagggtacaaaagatgaacttgctggacatcgcttattttacttaaagtaatcctagtctcatggttctttagatgcgtaggggcagaaagatgtgatacctttccttacccatcttaagagtcaaagctgacactcctgtaacaaaagacaagagaaaaacataagtgtatttaatccaagttttacatgatacacgagccctcagaaatgaagaccaaaagactcagggaaagctgtctattttgtgcctaggattgctgaagaatggacagccatatagcaatgtaattggataaaagagaaagtgctaaactgtaatagactggtcagggaaacccagcaaggccatccagattcttcttggtgtctgtagcatgccttcccctgggtatggggcaggacccttctggaatgagggtcatcaagggagaagggagacagtgacctttctaagttttatggcttgctttcaggataagaaattctggtttctgtgactttcttcaaggggaaaaagaggtggaacataggagggcaggagaaggacagaaagaccttgcctctgaagctcctccaatctccttcagttcaaagtactcagcatgccaaggtctcgtatttggaatatggtcttttgagcccccaacagctgcaagttgtaattacctccagaacagatgagtttattcaatgaatatgcacacactgtcatccagaaaaagctgaacaaaccagcctcaaatggagaacagcagcaagacgttcacttcagtgccttaacattcatataatccaacatccccattaccaactaacaaaatatttccctacacccactatgctgattcttatgaaaagctaggattgctattgcataatggtacacagaagagtatgtctagaatttaatgcttcatggatattatactagaattcagagtatattgggaaaacacactaaccagaaagatgggaaaagatgaagaggaaggaaaacagtggtaagatatggaccttctactatttgtatattgaattaaaagagctaatgataaactaccaggatatatgcaatgtaagttataagaaaggactcttgaaacaaaagggacaacctgcaagggggagtcttgaattaaataattaaatatctgagcacaatctagtaatatggtgaaaggaaaagcattccaaagtccacttttctggggaggataggagaaagagaactagggcggaaatggaagtattgtaagggtcttattttaatagtaggaaattcttggtaagggaaatagttcatactgtgtcatcaggcaatagcagagaagtatgtacatgattgtgaawtcaggggcaagaaaataatctttaatgagggtgaattagaatagaacttccaaattatcaaggggaaatattgaattaatagcaatgttatcaaggtagcaaaactaaggaaaagaaaaaatacaataaatacactaatataaaataataaacataatgtaatattctgtgtccttgtaaaggaagatttaatatcatggggtgtcatttaccatacacacacacacacacacacacacacacacacacacacaaaataatttttttttaatttaggaaaaacaatctaagaacatgtatgaatgaatgcctgagtataaccagaaaatattttgaaaaaagaaaacaagtttgacctcctagatatcaaggaatgatataaaattattacaattaaatcactttggtattgagaacaatataaataaaataggtaacagaataggattaaaaatacaggataaatccagaaatagatccaggatatacgtttcagtctctatatctagctacctacctaccatataagtagtaaaaggatgaatttataaatagaacaaatacaactggttactcatctgaaaggaagtaaaactaaaaccagctatatcatgtacacggaaatatatgactataaaaaatttcacaaatttagtttggcaaaacttaccatacaaagttaaaggacaaataatagatttgaaaaaacaattgttactcagaggacagacagagggttaatatctgtaacatacatagagctcttccaatttgccaaacaaaaagtaatccaatagaaaaagaaatgacaaaaggacaaaggatgtgaagagccaattcataaaagactaagtctaaattaccaaaatgcttacacaaaaatgttccaaatacagaaaatcgttccaattgggaaatgcaaataaagtaacagtgggctgtggttttacatttattcaacttgttaacaataggtgttcaagatgataacacccattgatggggagaaaacaactcacgttgttggaaatcaagtttatcacaatatttttacaaagaatctgttaagatatattaaatgtatatatacttttatacttttatatatatactcttgggaatataacttacagaaaaatagtattaact

SEQ ID NO: 94379 - DNA, 20036 bp, Homo sapiens
tgggtgttcagggtcagccaagaccagcacagatggaatgcagtgagcaggggagtggccccgaaagggtgcaagggcaaaacaacaccgtagccccacaccagctgccaggtacgatctcagcactctgcgagaactgcctcatatgatccccagaacatcccataagaggaaggtgcagtgaccatctgtttacaggcgaggaggcagtgcctacggtcacacagacctcatgacaccaggagaccccacaggccatccagctccagagcccatcagcccctagaccctgtgcccagcaactcaccgaggcaggagtccaaacacggcccagcagggacaggacagtcagtgggcagcctgacgtcacccatcccagcgtcgccctgggccttacctgcccctgcacgatggccttcagcagagccagcaccgcgtgccgggcctccagcggccgctccggctgcaacagatccgcgaccgccttccagagtgcttccactgcgtgctgtcaccagcagaggggacagcggtgaggatgtgctctccaagaaccctggccccggcaactggagcagtgccgtgagcggaggacagggaggaacaacgggggcttgtgactgagagccccacctccaaagctcgtatctcctgtgtctcctgcagcctgagatgaccacaggcttcgtacagggaacggctcagagcttcctcaaaccccagcaggtccctttaactcccaccaggtgacagactgggggctgagaggacagcagcaagccagggcagcaatggtggcctcacctggaccaggagggagtcccactagagctgccggaatgctggcaggaagtcatgggacagtctcagaaccacaagtgcacactaagccctaggcctgcacctgacccagaatccctgcttgtggctctcctctagtgaacacaccagcatcgggccctcgaccccatgcccctgcccgacctctgctgcctgcctgacctgctgagaaagagcgctgcgtggccttctgaaatctgcctcctctaactaccacccagcctgtgaggggctcatccctgctccctaaagctgccagaatcagtctcactcggcaggggtttgggctggctctcaccaccttcccttctccacattaaccaacagccacggctttcagaccacaggctcattcctggccttactcctctaaggaggggaactaaaatggccgtgttccggccaagtgcggtggctcacacctgtaatctcagcacttcgggtggcagaggggagagggtcacgtcagcccaggagtttcagactagcctgggcaacacagtgagaccctgtcacgacaaaaaatacaaaacttagccaggcgtggtgctgcatgcctgtagtcccagctacttgagaggctaaagtaggaggatcacgtgagcctggcaggttgaggctgtagtgagccatgattgtgacactgcaccccggcctgggtgacagagtgagaccttgtctctaaccaaataataacaaaatggccgtgttcttttagatgtcatctgaccaacatcccaaccaattcagacaactggcactctcacctcctttgtctcattgacaatactcttaccgttgcaacctgagctgcaaagatccgtggacacagggcccgggaccatcccagcctcggaggcctatttatccactcacaggctgccccgtacccacacaaacaactttcagaacaggatgcaggacgcttgttcttttttttgttttctgagacagtcttgctctgttgcccaggctgcagtgcaatggcacaatctcagctcaccacaacctctgcctcctgagtttaagcgattctcctccctcagcctcccaagtagctgggattacaggtgcccgacaccatgcccagctaatttttgtatctttagtagaaacagggttttgccacattggccaggcgggtctcgaactcctcacctcaggtgatccatccaccttggcctcccaaagtgctgggattacaggcgtgaaccactgcgcccggctaaggacacctgttctttacacctatctttggtagcgtacggccagcacgtttcagatgagctgctgcagaggtagcaatcactctcctcttagcagatctgagcatgagaggtccaggtctcactgctctcccacacacaaatgctgggcaaggcaagggcagagccctcaggtgctctaccagcaacctgcactcccaaaatgaccacttcctgtcctgtccacaagtcatcaggaaagtctggcaatgtttgcccaaaataaatatttctatgtccgtgaggtcgcccaataccaccgaccagtcaccctcccaaaatggcaccaagaccagcgtgcctaggattgttctctgtggaacaaaccctttcttgatttttcttggcctgaacttgtaacaggagagagcgagtgagcatgcgtttctatcagccactacaaactcttccttttttttttttttgagacagagtcttgctccgtcacccagactggagtgcagtggggcgatctcggctcactgcaacctgtgcctcccgggttcaagcgattctcctgcctcagcctcccaagtagctgggattacaggcatgtgccaccatgcccggctcatcatcttttagtacagacggggtttcgccatgttggccagagtggtcttgaactcctgacctcgtgatccacccacctcggcctcccaaagtcctaggattacaggcataagcccccgcacccccgctcggcatagaaatcctttctggtgttgctagaaaagcctaatccctttgctccccatttccacgcttgattggtccctcaaggttgtattcggggcatttccagtagcttccccatcactacgatgaaagctaaattcccctaaaacagtgcaaactggctgggcgcagtggctcacgcctgtaatcccagcactttgggaggctgaggcatatggttcacgaggtcaggagttcaagaccagcctggccaacatggcgaaaccccgtctctactaaaaatacaaaaagccgggtgtggtggcgcgtgcctgtaatcccagctactcaggaggctgaggcaggagaactgcttgaacccaggaggcagaggctgcagtgagccaagattgtgccagcctgggcgacagagcaagactccatctcaaaaaaaaaaaaaaaaaaaaagtgcaaaccagatcatcggcagtcagctgtcaaccatgttcctaaaaaaagcaaactcaggctctgaatagtctacgtgcctctctctagtagctcaactggataaacctacctcttcaaatttcttggtttttgcgacttcacaaatctgccctatcatccggatgcgattgttgaggccacattccatgctcagttcctggagagagatgaaagaagaaaaaggggccagtgctcaggccacggtctccttaactgcaagtcacaaaccacctaaagactcccactgcattttccagactagagacttaaaacagatctttctggaatcaagattcacttgacgagccgcggtggctcaggcctgtaatccctgcactttggggggccaaggcaggtggatcaccagaggtcaggagtttgagaccagcctgcccaacatgatgaaaccctgtctctactaaaaatacaaaaaatttgctgggcgtggtggtgggcgtctataatcccagctactcgggagagtgaggcaggagaatcccttgaacccaggaggcggagattgcagtgagccgagatcgcgcccctgcgctccagcctgggtgacaagagcgaaactcggtctcaaaaaaaaaaaaaaaaaaagatttactgaggggctttactgctccatcccgaggagttgagaatgtgcaattttttttcacaactgcaaatgttgtattgagataaaacataacatgaaatacaatttcaaactgcacaatttttttttagacggagttttgctcttcttccccaggatggagtgcagtggcgcgatcacggctcactgaaacctccgcctcccgggttcaagcaattctcgtctcagccccccgagtagctggaattacaggcgcccaccactatgaccggctaatttttggtatttttagtagagacggggtttcgccatgttggccaggctggtctcaaactcctgacctcaggtgatccacccgcctcggcctcccaaagtgctgggatgacaggcgtgagccaccgcacccagccaggatggactatattttattcatcagttgatgaacgttttagttgtttctaagtagaaaactttacaagtgcaaaaattcagcatttactcatgggcaaaacacaatgccaggcatgtgtgacaaagacacaaacacacataaaagataacgacctagcccatgtgcgatggctcatgcctgtaatcccagcactttgggaggccaaagcgggcagatcacctgaggtcagcagttcaagaccagcctggccaagatagtgaaactccatctctactaaaaatacaaaaattaaatgggtgtggtggcacgtgtctgtagtcccagctactcaggaggctgaggcaggagaaccacttgaaactgggaggcagaggtagcagcgagcagagattgtgccactgcactccagcctaggcaacagagcaagactcagtctcaaaaaaaaaataaaataaagaacctacttctcccaggaactcacatcttatcatgtaacacctggacatatccttacctgtgaagatgatgatactcaggcctcatctataagatgggctttctttcatcaacatctgaatagtaactcaagtgtgcctgaaccaggtcaccaagatcctgactttcgaagtctcctgaggaaggacatgtcggcctccaagtactggagacagcattcctgtgtagacagttgccagcaacccgtctcccacagaacctggtgcaagaccaaacccagccttctctgcatttccctctagcctagcaaagacacaggtagctcactcactctcagtatttccgcggtgatgataaactccgtctgtttaccctctgcagacctgggatttggcctcggtgttcccagtcccaacagaatcttaaacttctccttcaagcctgaatctttgcttgttggtttggccatggtggaccaggacgcaccagaaaacccctctgtgcaaacgaaacaggaatggggacatctgagcaacacctctgcccaccttccccactgcggacctccagccgtcaggaccctgggtctctggtgggcataacctttcctcccacactccctgggagaactcaactacagcccagctgaccagctcgcaaacaggcacctaggaaagcccgggagacaccaggcctggtctagagagctctctactcagacgctgccgcccgccccgcccgactcagtgcacgggttaggactgccgccgcgaagtcctgggagccccgacgtttgccgtctctcctctacccatgtgaagcaggagctgtcacggagccgcctgcagcagagacccgttcgcacccgccatgacttaaaactaagggatgctcggagctccggagtcgggttgcagtgggcgcgggtgagggcccgggacccggacactgcggggtccgcctctctaggccgctgccccgtggggaccgccacttgccccgtggggaccgccacttaccccgcgccgcgccaccgcgctccgggccgccccgacgcggagaaaggcgcacccccctggccccgggacgccgccggaagcgcgacccgcacttccggtagcggcattgcgcggagggccgccttgggagcttgctgggagttgtagttctgtgccgccctctggcggaaaggccggcgatccttgcatcacgtgacggggccgcatgggccgccgggatgtgtagtccgcaggagtccggcatgaccgccttgagcgcgaggatgctgacccggagcyggagcctgggacccggggctgggccgcgggggtgtarggaggagcccgggcctctccggagaagagaggctgcagcaggtagcgccgcgccgtggctggagcgtgggaggaggcgggataggggctgcaggctggagtcccgggccgcctcctgcggctcccagctgcgcgggcaggggctgcaaacccggcagccgcgaacggttcccacgtgcggccctgcgttcccaccttgcgcctttttcccaaagattgcggtccgcaggggctgggtttcgggcgctccgctccgctgccccctttcgccccaagcaagaaaacgcttcctttcccaccactctgtccgggactctccactccaggctctgtgggtcccatccccgccctcctgcagtgaacttgctgtcctcggagaggctgggtgccaaggacacacgcagccagaagcctgctcccccagctcgggggagggtgcctctgagggaaaacaggaaagggcatggcacttattatatttatcctgcagccgttgaggacctgctgggggccaagcactgcagtgagcagtgagggacacggacagggcctctgcgctagtcccgctgggacttctgcagaattggccaragytggattcccataggcacccagggaccccaggggtagtccaractatgkcaggaggaactggtgcagctgggagcaggcaggtggtgatgccagccagggtggcaggagctttgatgccaggatagagtttggagtttattatgacagtaaacggaagtcaattaggaggttttgttgtttgttttgagatcgggtcttgctctgtcacccaggctgtagtggagtgttgtgatctcagctcactgcaacctccgccccccaggttcaagcagttctcctgcctcagcctcccaagtagctgagactataggcccctgccaccacacccggctaacttttgtatttttagtagagatggggttttgccatattggccaggctggtcttgaactcctgacctcaagtgatccacccacctcggcctcccaaagtgctgggattacaggcttgatccaccgcgcccggccggccaggattttttaaaagggagtgacacaacctgatgtgggtgttagcagactgtctctggtgcagtatagaagatgtattgggggcaccttggtacaggctgttgctagagtcctcatgagctaacatggaccttgtcagggtcgctggcataaggagggcccacataccccagactgcagagggcagagcaccccaagtgtattagatgatggacagttgtggcatgaacgagtgaggggtgagctagcaggcgggatggcacccctaccctaccttcacctgyggccccaccagagggactgygtggtgctttttgcagaagcgaggaaaagccacagccccgtgaagcgtccgcggaaagcacagagactgcgtgtggcctatgagggctcggacagtgagaaaggtgagggggctgagcccctcaaggtgccagtctgggagccccaggactggcagcaacagctggtcaacatccgtgccatgaggaacaaaaaggatgcacctgtggaccatctggggactgagcactgctatgactccagtgcccccccaaaggtaggcaggggccccatctgcccaratgaccccccatcttagcaaggtccttgttttctttctaccyggtggcttttggctggcaccctcccctgcagacagcaccttgggaggatggacacccggtgccccagagcatcgcctgcatcactgtagccactcagcaggtcaggacaccagtggtttagggcctcgtgctcgaacttctgcccagtgcaggcgtgacctgggctttgtgtgatatcaggaaggaagagttccttttgcttcacggtcccagggcctgaaacccttagaccaagctgagttctaatccctattctgctaccaggtggcttggatacaggcctctctgagcctcagtttgcttgtctgtaaaatgggtagtatgggccaggcatggtggttcaggcctgtaatcccagcacttcgggaggccaaggcgggtggatcacctgaggtcaggagttcgagaccagcctggccaatgtggcgaaaccacgtctctactaaaaatacaaaaattagccaggtgtggtggcaggcacctgtaaccccagctacttaggagggcgaggcaggaaaatcgcttgaaccccggaggcggaggttgcagtgagccaagatggcaccaccacacttcagcctgggtgaaagagtgatactgcatctcaaaaaaaaaaatttgttttaaagggtagtgtgatgattcacgaagcaatcataatagtagtggccaatggctgttcagtagtgatgggccagatacgatcgtgttgggtttttttttgagaccaagtcttgctcttgttgcccaggctggagtgcagtggtgaaatcttagctcactgcaaccttcgcctccgaggttcaaattattctcctgcctcggcctcccgagtagctgggattacaggcatgcaccaccgcacccagctaatgtttgtatttttagtagagacggggtttcaccacgttgatcaggctggtctcaaactcctgacttcaggtgatccgcctgccttggcctcccgaagtgctgggatgacgggtgcgagccaccrcgcccggccacatacgattctaagcactgagataattcatttaagcttcacattactccagtgagtcaggtactattattgtcctggtgttgtagatgaccaaacatacccaaaccagacctccccaccccacagggggaggctgatgcctcaagtgtggcccagggcaacaaaccagggtgtgtcgagggcggggggcggagcctggccagggaatcacccaggayccgccgccaccccggtccctgtcastgcacaagcaggtacgcaggtaccaggtgctgctgtcactgatgctctccagccaaaccaaagaccaggtgacggcgggcgccatgcagcgactgcgggcgcggggcctgacggtggacagcatcctgcagacagatgatgccacgctgggcaagctcayctaccccgtcggtttctggagggtgagccctgcctgtggcaacgggggccgggtggcagtggcctgagagagacctcagaaggctgaggggggtggcgacggtgcaggaagtgagggtcaagcatctcaggctcggggggtccccctgaagcyccccccaggccgtggggccctgaggcctgacgcccagtcccagcagctccttggccttcctgttcgcatcctcccttccttcctctgcttccccgcctcgccgcctgcccacccttcctcaccgccaaggctgcctgcccacccgcctttccctttgtttactgctagcctctcccggtgtgtcaccccctcctgtccagagcccctcaccctccaggagccctggggaggctgctccccaaccccgccgagcactggatggtggtgggcggatctgttgaaagcagcttggtgggtggggccgcttccccttggcacccgygtgggccgcagtttctcagatgggttttaaatagccctctccactcaggcacaggatgggaaccacccggcaggcctggcagctggtggggaagccccagctccagccctccttcctgaaggcgcaggtgcagccaagccccactcctgggagcggctggcctgcttggcctggcctgggtgctggcagggaatgacgggcaggggaaccccagccagagcctacacgtgcatcattggcccacacgggtgggaggagggggtcaggcctaccttgggcctccctgctgccctccgcttgttcccgcctcctggggggcgggggctgagcttgcacacgtcctcagcaggtgcaggtagctctggccacctgtgggtctcctgggggctgcatcctcccaggttggsctgtgcccttgcctccaaggctgaacccacccctgtctttcagagcaaggtgaaatacatcaagcagaccagcgccatcctgcagcagcactacggtggggacatcccagcctctgtggccgagctggtggcgctgccgggtgttgggcccaagatggcacacctggctatggctgtggcctggggcactgtgtcaggcattggtgagtagaggagggcggggctggctccagcccactggctgctcttgggattccccacatccttgtgacctgtgactccacttccagcatgctggtcctccacccagcccatagagtcagaaaggtgctcccagggtggagccaggccagccccactcagagacaggtgctggggcaggaggtcacatgggctgagcacctgctccgtgcagggctctgagagaggccccggagctggactccatctgcgttgtattcgggagaaatgtggagcgaggaattccccactcgtggagtggaaaccctgatggttgtgcagggtgctcttggggcctggcttgggcccagggcctctgggaaggcccccaaggtcatccttcacctgagagctgcagagcaaggtggggtgagccaggccaagaggaggaagtgtgttcccagcagaaggaacagcatctgtaaaaccatgatgcgagagagagggccaggagcaggaagttctggaatgagatgagggcagagtggggaggtaaggactgaggagggaggaggaagagtatcccctcagcaggtggggtggggagggaggtgctggggggakaaagggggagggtggggagggaggctctgcggggacaggaggggaatggtagggagggaggcgctgggggaatgggggargagggtggggagggaggcgctgggaggatggggggagggtggagagggaggtgctgcggggagaagaggggagggttgagagggagaagaggggagggtggggakggaggcactggggggagggccctccttgaatccttttcccaggtcctggtgtctcttcctagcaccggaggcttcttggcagttgggtgcagacagacccctgggtttggggtggggctgcctcctcctcggctttgtccagaggatttggggctcctaaggccacacgcagccgggcccagccagtccagaaaccagggcttggccctgccctctgtgtgcccccatcccaggcccctttgggactcctgcagggggcctgtgccggaggcggggggcttgcagcactttctggtgggcaagagggccaccaagggccgggggcctctattctgagccggggccacctggtgaggctgaacagccacagcagccccaaagagccagagccaggccaggtgcgccggggcagggcctcctcccgactgagactcccagcgtcaccacctgccagcctctcagtggacacttgagcttatctgggcggctgtcctcagctgcccgtgtccctggggtgctgcatcgtggttgggcagggctgtgggggaaggtccctgcccgcagccaggcagggaacgggctttgggagcagcgggcacaagagacagccatgtggaaatacctccctctccaggtgtctgtgggcctgaccacctgcaaggagaccccagggctgcctcctaggggttccccgaaagagaaacgctctcagttaaaatgtcagagctggctgggtacaagggctcaagcctgtaatcccagcactttggaaggccgaggtatgtggatcacctgaggtcaggagttcaagatcagcctggccaacgtggtgaaacccgctctctactaaaaatacaaaaattagccgggtgtggccaggcgtggtggctcacgcctgtaatcccagcactttgggaggccgaggcaggcagatcacgaggtcaggagatcaagaccatccaggctaagatggtgaaaccccgtctctactaaaaaacacaaaaaattagccaggcattgtgtcaggcgcctgttgtcccagctactcgggaggctgaggcaggagaatagtgtgaacctgggaggtggggcttgcagtgagctgagatcgcgccagtgtactccagcctgggcgacaaagcgtgactccgtctcaccaaaaaaaaaaaaattagccgggcrtggtggcaggagcctgtaattccagctcctcgggaggctgaggcaggagaatcgcttgaaacccagaggcgaaagttgcastgagtggagatcgcaccattgtctgtatccagcctgggtgacagagcaagactccgtttaaaaaaaaaaaaaaatgccacagccatarattgctggctccggtcccagctctgcacctcctggctgggtgactctgggccaggcccttggcttctctaagctctggccacaaagtgggtgaggcagtcctcgtcattcactgtccaggtgggcaggaggctcacacaacgtgacgtggcctgactcagccttgaagcatggccacttccgtgttacagaggaggaaactgaggctcagagccccaggggtgtgacccctcaggccttgtggtctccccacaccctcggacacctttttctaggcagcagcgaaggagctggtgcaggcctcggctttctctttgggaaacacgggaggaggaggcagggctggggctgcagctggccggggccaccgggtgggagaagggagccccagtgagcagacgcctggggtggccagctgaggggagcaggagccagaacccaggtggacagcagctgcggccggccagggcatgctcccgctgtgtccctgaccgctgcagtggcaggtgctaggtctgcaggcagtgacctcatgccggcctgccaggcagagctgttgccacccagcctggtgcccakagccagtgcttatgccgagaggagcctcakgccacaggagacagacagagggaagcctggatggacccttccggggacagggccacgttyctggggaggctgagggctgaraggtgcttcggagtcrggatcctgccgggcctcggtttcagcatccgtargacctyatgaggactcactgagctggccaatctctctggcagggtctggcccccagcaagcgtttgtccaagcgagctgtcgctgttattgtggggaatagagctccaagcagagccgagtcatcacccccaggccctgcccaaagcagagaccccaccacccacacatccaactagcaccagtgttgggagtgggcagcccagaacagagccccccaggctggctcaggtgatgggagagaggcctgcaccccaacagagggctcagcccctgccccagcacctcakgggcagccaagatggtcacatgtaggcttgcagccagggctttgcggttccaatgtctaactggagggccacgggggtggtggcagactcgcctctgggcggggaggggcacgggctaggctggtggagtgtgcccctgttcaccccgcttggcctcccagcagcagtgkacacgcatgtgcacagaatcgccaacaggctgaggtggaccaagaaggcaaccaagtccccagaggagacccgcrccgccctggaggartggctgcctaggtatgagtatgtggggggcttcctagggagaagagctcaccccgcccgccctctgtcagcactgacccagcccccacccccayagggagctgtggcacgagatcaatggactcttggtgggcttcggccagcagacctgtctgcctgtgcaccctcgctgccacgcctgcctcaaccaagccctctgcccggccgcccagggtctytgatggccgcatggctctggccgaggtgccgctgtggccaccgtctgtgaagtggctttacgcttcaggaagccacgcctgttgaataaagctttggtgtgtttgcagatgggatctggctgatgtctgtccctgagggggcagagagcctgggaatcgcatacaaggatgtgttcgtacacacccgtgctcgcgtgtctggagcagggctgcctgggaggccggctggggacgtgacaatctttgctatgtactcagggagggggagggggtgtgcatgaacctgggagggaggaagtggggagagccagctgcagccagctgttggaagtccgctggggaagcaagcagcccccgggcagctggctggggaccctggcccctcatgctatccaccgccggccccccagcttcccagcccggacaccgccagctcctgaactttcatgccctcaaagcccagcctctgccagggtcccacccctgtttacagagctacccggccttgaaagggacactggggacccaggcagggcgccacagggtacaaagcttgacctgtgactgctagaggtcgcagggtgaattgggcaaagggtggcccgtgtgggtgttgtgtggggccggatggcttcacagggaaggtgaaggtgggaggctgagtctgccaaataagagagatgggcatgggcccaggatgtgccacacagcagggggtcccatgggggtcagcgggggagatggagcagggctgggagcagatggatgcagggcacgggctcaggaacgagaccgtttccagctgctgagactcggggagggggctccctgaaacagcctcatccctccacccctctcaccccacggggaggaggctcagaaaagacagaggcgtgtgggtcccaggcagggcctgtttatcctgagagcgcgcatgcgctatggcttacgaggcaacagcggtgccggtcgatcggtggtcggttcgggggtgcggggcccgggagggaagtgcaaagtcaacagggtgtccacgggggagcccgccaagcagggctgagccagaggccaggcgtccttcccgggtgccgctctcacacacctacgttccccaggcctgggagctgccgcgcggaatgaggggcctgtccagaggccgccctcctcggggacgtggggcctccatcctcaggcccctcggagagcccaggcccccagcagggcacaggcgcacagggtagctgggtggggagcagggtgtggcctagggacccccacaccagggcaggtgggcaggggcagctcctacggccacatcaggcctccctggccttacccaaggtccccacgaagaggctgggcgccccaacttggccactgggaagtcccagggactcccactcaggacggccgctgctgaggggagggggcggggaggaaatggtttgcagagaaaggtttgttttattgcaattatttagagcgcgtcccaagggggaggggaagggggaggggaaggggggggggtctctggtattaagtggaaacatgtgtggagctggagatctttttggaaaaaaagcaaaaacacaaattcctttcagtcagcaggccccggcagagcagcaaaggccctcgccccgcggctgccgcgcgctcgctcgctctctctctgtctctctctgtgtctctctctctctctctctgtctctgtctctgactctctctcacatctctgggtctctctccccctatcttgctgccacaggcccccagtacctggtgggcaggggcaggatgggggctcaccggggctggggctgatttctgggcaatggcaggaccaccctccagtccactgaggctgggggagctcggggcaggctgaggcccaaggtccgtgcgggaggggtcccagggtcccgagacaggcaggaaggggctcagaagttgctgaagatttcacgcttcctgttccagtccatctgtggcgcgcgcttgttgactcgcatggctcgagccttctccttggcctcggccgccgtggggctcaggtggaggccgctctcctggaagggatcttgcttccaggcactgccatcctggggtgagcacggtgggtggggtgtctggagtgagccctagtcccacaccccagacggtggcccctcctagggagcaaccaacagaggctgcctgctggggctggggctcacgaggacttcctgaacagagaccccactgcccgggctgacatctccacagacgcctaccccaaggcctctagcaaccccacgtgtgagctcaggagtggagaacatccatacctcagtgtccttgtcggaaccaggcaggtcacttcgggacgagcacgcagagccaccattgagctgggaaaccaagggcagattgtggtttcacagacacacacaacacctgcacacgcacacatgtgcacagaggcacacccccccccagtgtgtgctcctccactcggcagggggcctcgggcctctggtggactccagatgcggcggggcaggcaccgggcgcctggcagtgacaggcaggtggcctggccggctcatggtgcagagggggttcaggtgcaggaatggccggcgtgagcaacgcctggggtgaggccaccgccagctccctgaggaggcagagactggagggcaactccttaccaggtggtgcccaggagaggacagaaggcagtggccccgaccccaggggccccacgtggcttgtgtgtggcacgacccaggatgagacccacaggggcattaaagggaggtgacagggctaaaatcgggtgtcactagcacacctcgaggacggatctccagggagaagggggcctctgtcgggcctgggtacccccagaggcaccctgtgtctcatgggcaccccaccctcttacctgggcagggctggttccattggtgacgggtgacggcagaggacctgtggggacagcgtgtcagtggctgctcagccaccacaccgcacccaccctgtgccctgggccgtggcccaccttccacgtgctcctcggtgggtgtgacccgaagccgcttgaagtgttcatctgtctcggggtccacgaccagcagccgggcctcgtcctcccgtgccttgatgctggccaccacctcagcatggcgcagtccctccacattctgcccgttcacctgccgccaccagcatgtatcagccccgccatgggcccagacagcccccaacgccgcgtggccaggtgtggcatcaaatattcatcacagccaccgcccaccgaggcagcaggaggcgcaccagctcaggttcccagcgtctccctcctccctgcaaggacccagggccccagtgtggacaggtgcggggcactcggcaccccgcagccctggtgggccggtacctcaatgagccggtcctgggcgcggaggccagagcgggcggcaggtgagcccgsgtccacagagcggatgtactggccgggccgggacttgwcactatgcaggttgaacccatagccctgaggtccctttcgcaggtggcagagccgagggcgcagctccctcaggggcccactgacatcctgcaggcccaacggacagggtcagtctcttgctccagcctcccgcctccagaggccactccccggtggtgccgccactgcccaaactcggtaccgtgccccccacgggcaggcccaggtctcagtggcaaacactccgggcacccaggctgcctgtgacagagctttagctgtgggaacttgggcaaagcctgttttcaaacccagaagcctccccgacgggcccagccgccttcccgggttgctgggagaattcctttggctcgaggccagcgtggcgcacaggcagggtgggaggaagcaccaggtgggatgaactgtcgccgtyggcctcctggggcggttgtccctgagggctctgcctgtgcgtccccctgccccgggctctcctccagagcgtggggcaggcgctcctaggccagcagttttgttttctctccagaggcctccgtggggctggctgcggtggcggctctgtttgctttcacattccaggaaaatgagccgccccacccccgtgggcccagcaagcaggggctggggcaggagcttagtgtggacagggcacagagggcctcctggtgcccggaaggaccccccgctaccatcccaggccctgccccatgttacctctggcatcctgcrgtagggctctgggccaggggaccatgcaggcaaggccaggcccaatgaccacctcccagccagggggtgggccagggtgcggcggcggtggccagcggctgcccgtgctcagttaaacatggcggtggccggagcaggcaggaggcagctcaggtttccagggagcgccaagcttgagggcgtgcgcaggggagactgtgcaggcgggctgggggctgccagggcccttccctcacctcctacctccctgtgtgtccctgagggaccacaggccaggccaggccagggctggggcggcatggcaagggggcgctcagacctcaggagggcaggtctccaggcctcagacacccccaacccctccagccacccaccttcaagctcgctccaaaccccaatggaccagaaacggccatgtcagcgggggggaccgccccgccaagggagcaagggggtccttctccacacagctagtgctctgtcccctgggctcaggacctgcccttggtctggaacacccttctcctgtccagcctgccagatgcctcatctgaagcctcctgcccaccctctgaaccctctctgcatggccaccacccagcccgtcacaccagaaactccagggacaagcctgtggctccctggccccacaggggctcagctgggccacatgggctgaattggagggtgcaagacccccaaaatctccagggccccaccacatagactcactcctcccccagacacacctggtggcacaggcgtggggcttcaaggctgaccctgacacctgcccaccaaagtgcccctcagggatgcagtcacagcacggcccccaggctggcctgggacgcagggaaggcgtggggacaggagtccagttcgggaggggaagtggagcacagcccccaggctggcctgggacggagggaaggcgtggggacaggagcccagttcgggaggggaggtggagcacggcccccaggctggcctgggacggagggaaggcgtggggacaggagtccagttcgggaggggaggtggagcacggcccccaggctggcctgggacggagggaaggcgtggggacaggagcccagttcgggaggggaggtggagcacggcccccaggctggcctgggacggagggaaggcgtggggacaggagtccagttcgggaggggaggtggagcacggcccccaggctggcctgggacggagggaaggcgtggggacaggagtccagttcgggaggggaggtggagcacggcccccaggctggcctgggacgcagggaaggcgtggggacaggagcccaattcagtggaggaggtgggagcgtgatatgggcccagtccgcaaagacacatcacacagccacagacacaagacgtccacacacacctgcaaacacgcacagcagcccacacatgcggccagccccacagtgctggcccggcagcccttcccacgcctgcacagcggcctgcggrgcagggtttctcagggcaccagacaggaagcaggatctggtgggtgtctggggccctgaggccaggccaaggacccctcagtgttctcagggtcattctggccacccctctgcctctgtccagaagcagccgtctttcactctacaaggcaagaagttctgcctatcaaacctaaaccccttcattgtcagcagggtcccagtggcgccaggcacagcactaaaacctcaggtggaggggctgcaatggaggggccagggtgggctgctggcagcacatgggctcgtggggaaggggggcccagagagccgaggagctcgggcggcgttcatagctcacattcctcctccctgccctggctcagcacacac

SEQ ID NO: 94380 - DNA, 57457 bp, Homo sapiens
caagataatttcctgtgcttcatgttgcctttattgggtttttgatcacttatgaaaactgagtccgctttattaaaaaatgtaatttacaactctgcaactctctgtatttgcctttgaagtctttaaattaccactctgattaaatgaatgattattgttcacagtgacttgtgatccttttttgatcaaatgttttaaacctttgatattttttataaactttccaaaataaaattctaaattaagtcttttcttgaaattgaattaactttgagattttccatatgcaccttcagaatatctcaaaaggatatctcttgttatagaaagagacatattaaagtaattggactgatctgatatattaaattatatggaaaggattataaaataataaataatactactttttttgaattatatttgtatagaatgtgttaatatgtatttcagaaattgtgtaaaattcatagaaatctaatagttctgctataaagctatcagtcataattctagtaattatcttaaaatgttgaatacaacagaagtaactgagtttccttgtcaattgtgtcattattgtaatgaactcttcccagatctttaaagtcatggccattttaagtcttgtcattcacagatagttaattgtttactctgatactttctgagaaaccataagcctaaagtgtacatcttcaaggagatttatggaaagaactctgagaattacaggtttctcataactttaaaatcacaccattgggttgggtaagaattcccagactctaatgaagaaattgactgattcataaaactgctaacctaatgtcacacagaataaaaataatacaaaggaaatgacttgggcagaatttcatgctaattaagccagtactgaaattaagatatacaacttgaatgaactatataatattgatccaagtcaaattacatttgataaaacctattcaataaatagtgctataagcacctgaattggggaaacaaagttggtatttaagagaattaaatccaatgttaagcctggatgcatgaagaacctggatggctgcctggttcttctggagtcttaaatcttccaatattaaaagctctgcactccatgactcattatggaggagataaaatgattcaaattatgaaaaaagattggtggggtgactgttataaaattgctaaaatagtttataaccaatgtctggtttgtcaaacccataattgtggtaagacaataaaaacttcaggtgatacatttcctgaacacctacaaatggctttcattcaatttccactttaaatgcatgttttctggttgtatagaagatttccaatgcaggaaggccaatgatataacaatagctaaaaggttattggaaaatatgtttcccttatggggcattgccggagaaatttctagcaacagagaggtatgcatttcactggacacgctgtaaaacagttaaacaggtattataaacacaatagcttaggaaaagctaactgaattgattggattgccttggtcaaaggtattactgattgatggcaataagatccattcccactgtaaaacataaattgacccctcataaaatagttactggaaggcttatgcccctaataataaagtctcatgtatcttcccctcttataaaccctgacatgacttaatagtgcaagccttgaatgcattctgccaaagcatatttttaccaagtgaaagaagtccttcatgacccaccaactgatgacaaccaagtgtttcataatatagaacctggaggtgggggtcttttggaaataactccagagaaagacattacttgaactcggttgaaagggaccataccaagttcttctctgcagcaaacttcaaggccttgaatcttggatctgcatttctcaacacaaaagaggtcctgtagacttctggaactataaacttgttggagaccttgaaataaagctgatcagggaagtttttccctagaagcatatggcatcctatatgtagacagctttcctaatattgcagatcaagagttctttgctatcatgaaagccttctctttttttccttttttctctatttcctgcaatactaattccttccctttctttaggaaaaccctaaataatgccagacttttttgaattatatatgtaaggatatgttattaatatgtatttcagaacttgtaagaaattaatagaaatctaatagtcctggtataaggctattaatcgtaattctagttgttatctcaaaatgttgtatgcaacagaaataactgaatttccttgtcaatttgggatgatactctgtggatggctttggcaaagtcttatggtctccaagaaaccagagtaactgttgggtttatgagctaatgcgcaaaaatctggaaacaatttcattaacgctaatgcctgtgttcctaatgagagtcaccctgcaaccccaaggaaagagaggaaggttatctttgatatgctacacatcactgctacctgccttcctatacttgctgaaaatagtatcttgatctttccagttaataaccaaactgttaccaaatataaaaaatctggatagaggggattggtcaatgggtgcaaagttacagttagacaggaagaataaaagctgctattctattacacagtagaatgactacagctaataataatgtattgtatatttcaagatagctagaagagatgattttgaatgttatccccaaaaagaaatgataaatgcttaaagtgacatattatttaataattatcctgatttgatcattgttcaacatatacatgcattgagacatcacactgtaccccataaatatgtacaattattatttgtcaattgtacataaaagtaaaaaaaaaaaactatcagaatgatgcctgcaaaaggtatcttgtgcttccgggcattgcatacttaagacgttggggactacctatgtgggtacaaataattgcttgtgtgatttcactggattaaatctagcaaagtctttttactagatccagtggtttgcacccttacaacatgctatatagggaccacagaagagtaagttcaccactggattttattcaggagctatgccaacttgtgggtggacaaatttaactgacctcggctcaaacaccactaagtggccctcttttcaagcccccaagggcctacattgggttggtggataatctgacctgccttctctgttgtttcctcactggttcagatcttgctatttggcctggctcgctcctacatcccaatagccttccctgaaagttcccataatacctttcataatcagaggttaaagcagtcaataaccaaagtaagcaccaacctaaaaataaatgaagacaagttagtttctactgaggaaaggttccaatggaggtgctggaactcactcttggcattagcagggtgcctgttgtatggaatttgaaactaatctataaattggggaaaatcttgaatttgtagccagtcagacctcctaggggttcacatggtagaagctactcaaatattctcagtggatcaaaacatttgtgttcaacaaacacacttcatggaacattacacaactttggatctcctctttgctcatgctgggggctcttgcatggtgctgaataaaactgaatgttgcacttatttttcctctaattttactactatagaaaacttaatttaaaaggtggcagatactgctgtttctctaaacactgccactgaatatattaaggaaacttctcaggggaaaggaacacatgatacatttatgggagcagctaatggttggtttgtaggcatcctgagtagtgaaaggcaagctaggctattccaaacttttctaatctttatgcttctttagtggctctccaggttattataacttgtgttaccaggctaattacaaaaatggatacctctttaaatcaggccataaggctgaatcaggtcattcagtgaactatggtccttgtaaaaagtaaagtagaggttccttttcaaagactttcctcctcatctgattaggaataaatagtaacctctcttagaagcaaaatttattcaaagacctgttaacattcttaaatatctgctagctgtaataaagaaatcaatgtactttatgttcttagctcccacaatttagcctaaatatttgccctggcatgcttatactggtccaagtgggcattaggtcatagcctgttcctcttccttatttagaggtgtttttcccttctcagcattccacaagttacttcctccttcctttgttctcctctgcctttgcctcttttaagaatttctaagttgctagccaatcaagacaaatacagaatgtgaagtcccgttctagccaatggaaaccagtcacaacagtaaggtggacgggtcaggttataaatgaccctgcctcctttgttcggtgtactcttgtggcaaaactgctggcgagtgtactctttccgcagaaagtaaaaatggccttgctaaagaaattaattttatgttcaagtgctatttctttacggcaccaagaaataagcatttctagcagtccttaaccgccataatgccctaaattagaccatgaccaattggactcaaatactttgaactatctttattgcctgaactttgaattgtttaattttgatcagttcagtttgtggagactcctgttaaggtgtgtacctcagtttattgctatactccttctcgtggccataatagtctccctgatgtgttgttgtcccctcgagagtcttcaatgtctctatgcagccatcctttgtacaccaaatggtgttattacagttagaataacaacatgaagaaagtataatcactcaactaatttgacattgtgacttccatactgagacaaaacaaggttctggtcaatctcgtaaaactgagaggctgacccaaaggaggaaactgttattaaattaaatctggcctaaagttgcctccctacctagcaaagcataatcaaacctaatatgtaaataaactgcaatgtaatttgagagtacgttcttctaacaagtggccaagtcttggccaatcaccgcagcggagcttttagcccattacaggctgcaaaaaatattgtctataaacgcggcttgcccactgttaggggctggagctctctgaacctttactggctcaggatactacatgattcatgctttctttgctcagataaactctgctaaacttgtttgaagtttttttgttaacaatatttaaacataaagcaaataaattaataagaatcctatatcactaagttacagtaattagaaagtattcacctgagtgagaagattggccaagctgctatccagtcttccattatttgacaagacatttctttcctatgctttctaatagtattcgttattccagaaaggttgctctatgaccttaaaccgtccacatgttcactgcactgatagacgtccaacgtcaagatgggtaactaaaggtcaactctctctttaccttccctgagcctgatttttgcattgtaactcatggtcactagacatttgttttgggtgttcgcagtctacatttatttcccttttaggggaaacaatcactgtccacgggattaaaataatcccgagttgattatttggtgacatcaaccaacggtgcacattttgggtccattaccaacacagccaagcagcacatatttcttcagagcctagatatgcacatgtcatcaaaggatagcattttacagagtcaacaccactcacttcatagaacaaggggccagtggcttttcagaagaagggtctgttctcggccccacaccagaacgccagccgccaggtcccgctgctcagcaggtctcaagcccgcgctcactcgggctccggctgctgacagctgcgagcccgcgcgtgtatacccgctcaacgctgggacrttacagccagggccaatgggcagagcgsgactcgaggccccgcccccgccttgtggcgtcacggggacgccgggggcgcgcgggctgcagggccgcgtaggtccccgcccccagagtctggytttccrcggctgcccgcctcgcgcgtcttcccygcccgggtctcctcgctgtcgccgccgctgccacaccatggccttcgtcaccaggcagttcatgcgttccgtgtcctcctcgtccaccgcctcggcctcggccaagaagataatcgtcaagcacgtgacggtcatcggcggcgggctgatgggcgccggcattgcccaggtgagcggccctccctgcassgtgcccacgcgcttggccssccaccctgaggtggaagctctggcgcgaccggccgcgaggggcctgcacccgcccgacaccagggagttttcaccccgcgcctcccgggtgtagttgaaatatctcgcgtctgggcctgtgagggcccaagtctcactcccctcaaaattcagggttctgggccgatcctcagcttcctcgtttggaaaattctggctgcccccagggcccgctgaaggttccatggagagtggcggtgaatgcattttggaagcgggccgtgcaagagaagaaagaattgtatgtgcacaaggttcaggcataacgcgtttgttcctgctcggctcaaacgggagtttgctgccaaagacatgaactgcgatcagttttaattctatcagttatttttgatttttattctgtaattgtgcagyctttgtcaaagtagtttyctctcctaaacggcctcccggctctccccggtcttycctycgcttgctaggttgtaaagaatagtagtagtcatgacttttgtagcactttgtaaagtcacctaatggaagattgctgaggtcctggttttgacctttgaaatagtgccgtctgtgcagagttctgagcttgcgattttggcgctgcagcggaataagtctctctctttttttttttttttttttttttgagtcggagtctctttgacccaggctggagtggagtgcaatggcgcgatctcggttcactgcaacctccgcctcccgggttcaagcgattctcctgcctcagcctcccgagtagctgggattacaggcgccccgcccggctaattttrtatttttagtagagacagggtttcaccttgtgggtcaggctgatctcgaactcctgaccaaaggtgatccgcccgcctggcctcccgaagtgctgggattacaggcgttagccactgcacccagccggaacaagtcttttatccattgtacatcttcagggcttttccattgttctgctgagctgtggttcaggctcagttgtgcgagtgattgattacctggctactgtaatgcttgtactttttttttttaaaaattattccatttcagctcacattggagaaccatggttttcgtatcctagctgattatattcttagcatttcagtcctttgcaacttggtttgttggggaaggcggttatagtcatctaatttttcttggggacagtactactgtggctacagtcatgagagagtttactttttcaatgtcttgtttccaaccaagtccacgctttcatgcttgctttttaaaaacaaaaacaaaaaaaccttttactattaggtattatatatctcaattttcttctccttggcaagttttttacaacgtttttatttgattgcattttcttctaaaagctatatccctgtaatgttttatttatatgacttcttacagtctcccatttcctctgagaccataattttggacatacattgccctttttattgtgtggatcccctggctgctaggttatagtatccccataatctatgttgtatgtggactgggaggagtaactccctttaacctaaaagttccacaggttatactcaagagaaagtttagtttgagtacgtttgtattcccaggctccacccaaatctcccaaggctgtgagagtgagatttgttgtgagcaggaatagaacaatgtgttttttagaaacattttaacaacatcttagtaacaaaatattagggccttaagcagcctccaggaacattatgggaaatggatccagaaacttgtggctggtgtccttgaagacagcagtggaaaaagattagaaactaagtagaaagcgtcacttcaacttttgtagaaaatcagagtgcttagttctttgaatgctgcatccatcattggccaaaaatggatgttgtgttgcattaaaaggcagaggggcaatacctaaaattacaggtatggtgttggagctttcacctgacaaaggagtaaggagaaatgattgacattaatggagaacacaggcttgtgcttgtcaatcaaactcttaaataggtggaccagggagtgccttttgaaacttaagggaaaaaaaagctatttatgccataggctggacacataatggaactgtcattctgaaaggttataaagaccagaaatctataaagtggacgaccataagaaacagttccatccttatgtaacacagtttggaaaaacctcagttactttagttgacagctccaatcctctaaaacatttgtgagcaatgctttgcagtggtttagcttatctgcttttgcaccctaccctgtagcatgcagttctaggcagtattgcttcattctttatgctccttgaccaacagcttttggcatagggtaaatctgttttgcttattgagtgccagagacgaattagttgatgtgttttgagtacagatgggctacagttcaatataagaagttggatggtctgcatgctagctctgcctcatgcagtattaacatgggactttacctctgtgtctcggttttctcatctctaaagtagactaatgctagtactggcctcgtagggagagaattgaataaattcaatgaattcatgcatatgtcaagcagttacatatatcaagcatatgtcaagcacttacacagtgtctggcatgtaataagagttcacagaaagttagctgcctttataataattatcttcggcccggcatggtggctcaagcctgtaatcccagcactttgggaggctgaggggggcagatcatctgaggtcaggagttcaagaccagcctggccaatatggtgaaaccctgtctctactaaaaatacaaaaaaattagccagcatggtggcatgtgcctgtggtcccacctacttggaaggctgtggcagaatagtctcttgaacctgagaggtggaggttgcagtgagccgagatcgcaccactgcactgtagcctgggcaacagagcgagactccgtctcaaaaagataaataaaaagaataatcatcatcttcattgcagttgtcctgtccttttgcccttttcccctcatatccactcccatcctgatcacagctgctgaggtaggcctgtaaggtttagatggagaatattggtcatgattccctgtttcatcttgcttaatcttgaatgcatatacccgctgatgctgcagcgggtatgttttttcagggacctctgaaaggagggagaacactttttagttaccccccattttattgttaaactttagtaaagccataaaagtacaatcacaaactagtatygaggttatgttactgattttcattagcttaattttcttgaactttctgacgtggttttaatgttagtcaaggtgcagttctgcttataattttaatagttttgtcattttaaacacgtcagtttgtgctcagaaggatgaaaaaatatttaaatagattttgtgggagcctgatgcatttctcaagcaattaagcaatttaagacaagttcagtgcttaattacatttgatcagagcacaggccatttgtacatgtgtattttccgagagtatctactttgcctgtcatttcttttgtttgttttaaattaaaaaaacaaaaaatcccttagactgcaggttaatatttgaagttaacttgtttcatgtgtttgcttattacacacttctgacttggttttgattgctaatttatcttcactggatacttaggccaataaagaagcttataggattaaatgagccttgagtgggggacaggttgtttttttgctttataaagaggaaaacaagaaaggaagaaagctggtagctgtgtgcatttctccagtattgaatcctttctaggctttgcttcatacattgggttttttcatatgaggagcccagagagaatgcatagctttcattagattacttgtgaggagccagtgggctccctgggaacggggcacttcagatgtcccccttgagacactttacatgctctccgggtgcaaccttctttttagtgcactactcttctttgaggaagtgagaaagtttgcatcttaaagggggttggggataggttcttctctcccaaagcttgctttttttttttcctcctttttaaaaagcagaaagtgcatattttttctagagagagcttctttggctattaaaaacaaagtaagggcagggagagcctgctacgttgcagggattttgtgtgactctaccatgcttgataaggattcaggtagacctgaaagcttctccccagccactggatttgttctctcatctcttcttcttgcccccaaatctgcattttctgatgctgaaaaagagaatgatcagagttgtttcatatttttttagctttattctcttctactgtgagtacagctctgttgagctgtacagtacagtactgctttgcttgcaaagcagtacagatgcctaggagaagtttcaggatcacaggagaccagcagttacctggctgtaagctctccttttgactgttccttatggagggaatatttgtactcccagttgttaccttcctgctgaaggacatgagatgtgtctgtttgttatgaagttttccccctacttcccgagttgttgcttatctttgktgggctgttctctgctcttggttgaggtactgggatgtagaaccaccctctattagcatattagttattggactctgggtgaggttggagatactgtcattcctagagggtagaagaggtagggctcacaggcaacagaaaataatgctatgggatatgtttggacattttttagagcagaaatggcacttcagtcagtcaggttttggcattttcctgccatgttctgcctccagctttaatcacttgccccttgcttgagtttcttctttcttcccctctcccttctctcttatctgtggtaggcacacacacctcactctctagttctcctgggaccacaggaagataatgtggatgttctctgtggctccccctgttatattcatgatgttattatttctggtagtggtattctaatctcaaaagtacaggctatgaggtccctgccagggtttagatgctagccttcctatcctgcctttaggaaccttgggcaaatcacttaactcctctctgcctctttacttacctgggaataatgagactcacctgacagctgtgaaagttaratgaactaatatacaagctcctagaatagcattagtgtgtttgatagtaactgtctgataaatattagctgctttcacatagacccatcagacctgatctagtgaggatttctcttagattgtcttcactgtcggaagagttttgatatagggagttccagcaattctaaagatgttaagacttatttatgtgggttgttgagaaagahagtgtaccatttactggtttttgtagagctaaaaccactctacaaaatatgacactttattctgttcaaagaattttgatttatttaatttcatgtgaccattacaataatcacccctgcagagatggttcctggggtcaatggtcagaggcagagctggggttagaacttgagttctcttctgttctgctgcctgtaaatccccaagcctgaattcagttctgcctgcacctctggcaagtgctgtattgtggggagaagtgtggcatccatggcaggggatcctctgtggctctctggaatcagtacatcccaggttgacgtctccttggctctggactcaaagttagtctacctgctggtcgtctacatcagggtgctgtgctgccatccttctgcccatggtagactcaaactcacctgccaagatctaattcattattwcccctccagctttttccagagagcttgcccctcctgttgctgcagttgttcttccagccacatgtactctgaagatgggatcacaatcagtgtckccataccagaaaaggctctgtaactttttggtcatgggagagctctttcctctgccctctcctttgcagttcctagaccaggtgtgttaacctgaattgtcatgggagcctcttaattggtcctttcagcaaaaactaaaagaaaaaacccactcatcatggcaaacattgtcatattagtcttcctggagaggcatttggatttataactctcctctacccggaaagtgtccatcatagcaacatcttccagggattcttaaatataacgatgctgttgacatgtctggttatccctttaccttttcagaatttgtgggaggtgagaagtctgggagaggttatctgggttattatgaaacctacacacttactgaattaaaaaaaaactatgtaacacaattctagtctaaaaatgggcgcacactttctttgccttttagaaatactttttgaaatgtaaaattcgaagtctaataaaggagtctgtccaattaatttaactgtttgaagaaaaaaaccagtccaggcatggkggcttacgcctgtaatcccatcactttgggaggctgaggcgagcagatcacttgaagtcaggagttcgagactagcctggccaacaaagttaaaccctgtctctactaaaaatacaaaaattagctgagcatggtgacacatgcctgcagtcccagctattcaggagactgaggtggaagaattgcttgaacccaggaggcggaggatgcagtgagccaagatcacaccactacactgcagcctggccaacagagcaagactccttctcaaaaaaaaaawaaaaaagaacaraccagctggttgtggtggtggtggttgacatcctcaacagaacagcttttgctaattgttgaagtcagggaagacaacttgtgctgatggcagagttcaagacattacacaaccagagacaatcataaacccagaaatgccagccctgagagatgcaactgatgtatgacttttttcctctctggatcaaaccatgacaaccgtaaaaggcaggccttgctgttaaggcgctgcagcctctgaagcacagttggcctcagggagctctgactcagtctacttattctggggatctggagaaagtcagaaatcatgtgtggtagatagtttgcataactttgggattttccagagagaggatgaaaacggtggccctccttgtaatgtctaggcacatgggacatccagtggaactgttgagggaggagatgggagggagaccagtcaccagaccagttgatgtaggtctcatagactcaccactcaagttgtgcttcggagaaagctgcttcaaatcttcttgatacatttacaaagataaataaatccagtgtgcttctgcttggcatgtttacttggtcctgtggtcagagtgctctggggctttgacaaatgtgctagtcacttagcctatttttacaactctgaagcagccgtgtctaaaaatatttcctctctggctgagcctgccttccaccaggcctagaaaagtcatggagctgaggacatagccttcaaatatttttttttccattgcagactgcttgtcctcaaggtcttaccagcatgtaggtcactgtaatataaaacatgagttctcaatggattgatttaaattgtggtcactcaaactgccaggaagagtcctcctcatttgttgtaaaaataacagatgtctatgaaaggagaaraagaaggcctttctttttttgcagttcatttctccactgccttctccatcccagaaagttggcggtaacttgggtgttactgaattactcaggagaatgaattgtacttgtttctctgtagttattttctaaataagaggttacgttatcaggagaggccatcagctacagcagtggaaagagccaccaggtctcatcttgactttaccaacaaatgtctttattcagtcaacattccctgagggccagccacagccaggcagggtctaggttctcagtgtacaaagatgaatgacatttggtcaggagcctacagtagaggagttcagattactataacacagtttggtaggtgctgtggtacacagatgcagggatgttacagggcatatgggggacatctagcttagggctgagaggatcttggggagtaggcttactaactggaaatgattgttttgttttgttttgagacagagtctctctctatcacccaggctagagtgcagaggcgtgatcttggctcactgcagtgtccacctcccaggttcaagcaattcttctgcctcagcctcctgaggagctggcattgcaggcgtgcaccaccatgcctggctaatttttgtatttttagtagagacagggtttcaccatgttggtcaggctggtctctaactcccracctcatgatctgcccgccttagcctcccaaagtcctgkgattacaagtgtgagccaccgtgcccggctgatttttaggcttagttaataggtgaagttggggagaaggtgaggccaagagaagggctggagttgagaggcagatgtagggagctactggccttgtggtggtggtaagactgtcatgcatgaggcaatagttgtgttctttttgtttttttgtttttttttcttagtaatagccatcctaatgggtatgagatcagaggtttttaacattatactgtgatggacattagagatttcatgaatctccttcatggttcccgaaaggttggtaaagattccttctctgacctttgttgtacatattggtcttcaatatgcattstkatggaaaraggtgttcatggctaaaacatttgagagccaccacastgaatgatctctgggttgtcttcctcctctcaaaattgatgatcctgattatctgtagctaataagcctgaacaataaatgctttcgccaatctcttaaagtagttgagaagctaggtgtgttagtttcccttctgtgatagagaagaaacctgtgttggagagcagtgagcttatgtgtctgtggccatctctgacctgattcacacatgtgcccctcacagacaggcacagacacagggttggcatgcctctagccttacagcctcttggatgaaaggtataagacacattcacatgttggagtgaattaagcacacatccattttgaaatcacagggctggataccacttaaagaatattgatcttgcattgggcaacgcatagcaactgccctacatttccccttttacctagcgtcacaaccaccagtactagaaagcagttaatctgctcaccaaaataacagagagagactttagtggcattttttccacttggtaattgactagactctggctattagctccttttttttccttactatccttttcaaactaataacgtgacttctcataattttaaagtaacttgatgcttacacaaagtttatcataaaggtttctagcaacaaaaccagtcatgacttcttgagaacttatttctaaaataatttacaaattgagacttatgaaaaaatagctctgtcattcaagtgttcatttcatgagtatgaaatatctcccttgtgctagacatcaggccaggtaaaaagtaagatgtgattgctgctcttgagaaacctactgtctagtggaagaaatacaggtatgaacaactaattgtaatgaaggcacagacagcctacctgtcatatctgggatttgatctgaaacagatgaaagttataatagtttacataccttaccttaaagtatggtttttaaatacttaagatgtgatatgacatatagtgtgtatatatatcttatgctaaggaaaaagggacattaaaaaagcttatgttaaaagatatatgtatacattgtactgcctgtatgtttgtgaaatttgtatttactggaaattctcattggcctgtagataggagtgttcctaagcaccctatattgggatttgtggtaacagcagcttgacaacctgaagtggatgatgcaacagcacttttgaaaggtctctccgtactatcttgatttcatcatctaaagttggtgttggcaaagagaagataagtgtttagggtrttggatatcccagttaccctgatttgatcattacacattttaggcaggtatcaaaatgtcacatgtaccccaaaagtatgtacagctattacatatcagttttttaaagaagaaaaggttggtatggttagcttttctatttcaagtgtatcattcatctttcacatctgggatttctcctatgctctggttggttaataacttttattctgaaatcggtgagattcttatgacatgaaatagtctataaccagttaagtttttatttctctgttctgttcacatcctggggactgggctgccattacataactgagcagccattggtggttcacaccagcgccacacccarttattttctttcagtatttgaattcctgcacaaaagatctgctgtatctgcaaatcactagaggcacaaaagaagtgattacctctactaagggttgggagaagtttcactaaaggagagatggtgtccatgttagattatgaagggtaagttgaagtccatgaagcagcaatgagggagccggacatgtatggcagaggaaaccacatgaacarrggcacagagccatgagatagcacagaggagggagacgtgtggtgtggctggggaagactacagaatcgggttactaccgtccaaagcatttgttatttagcagttattgaccagctatcatattcaaggcatgtgataagtactaagggctacaaagaccaaatcaatttctgccattaagggattttaaatctaagagcagagattagacagagatctaaatgacacagtttactttggtgtaaagtagtacaataagagcagtaaaaatctagttctgaggtttcaaaatagaaagtacattcatttggaaaaaggcttcatggagagggtagcatttgaaatgggcctgaataatggatagaacatttctggacagcagttaatggttgggattaaggaaaaagtgttgtccagaaaatggtgacctacagaatagtggtaccagtaatgaaggccaaggagaattgattttagggtcaaggtgataactgcagcttagatagattattttggtttcaggcacagttggaagtatgagaacgattggaatttcagaaggaaattatattggaaacagaaccttgaaggaagtccttgtttataggcttagaagatcaagagaggtcaattaatatggctaaaaggaacagacagataagaaactgaagagtttcaaaaatgaaacttttattggcaatgtacagagctgttgtagaagatgaagccaaagaacaggcattgactttagcaatttagtagaccattgataagttacagtagtccccccttacgaggggagggagtacattcctagaccctcagtggatgcgtgaaactgcagatagtaccaaatcctatatatactatgtctttttgatctgataacccagtcaactaccaagtgactaatggattgggtagtatacagtgtggatatgctggaccaagggatgagtctcctcccagacaggacaatacaagattgcatcacactactcagaatgacatgcaatttaaaacatgcatcatttatttctataatttcccatttaatatttttggaccatagttgactgttggtaactgaaactacagaaagtaaaaccacagataaaggggggaccaactgtatctaatttcatgcagcagtggtggtggaagaagctactctgataggaatgtttgtgttccctccaaaatttatgtcgaagctgaatccccagtgcagcagtattaagagataaggcctttaggaggtgattaggtcatgagggttctgtattcatgaacagcttagtgccatttaaaggggcttgagagaccaactttgcctcttctcccttctgccatatgaggacacagtgctcgtcccctccagagcaggggtccccaacttctggtccgtggcccattaggaaccgggccacatagaaggatgtgagcagctagcaagacttcatttgtatttacagctgctccccatcacttgcattgctacctgagctctgcctcctgttggatcaagagttgcattagattctcataggagcatgaatcctattgtgaactgtgcatgtgagggatctaggtttcgtgtccttgtgagaatctaatgcctgatgatctgtcactgtctcccattatccccacatggcaccatctagatgcagcagaacaagctcagagctcccactaattctgtattgtggtgagatgtataattatttcattatatattacaatgtaataataatagaaataaagtgcacaatmaatgtaatgcacttgaatcatccctaaaccatcccctcttccctgcaagacggtagaaaaattgtcttccgtgaaattgtctcccatgtcttcctggtgccaaaaaaggttggggacctttgctccagagcatgcagcagcaaggcaccatcttggaagcagagaacagccctcaccagacactgaacatgctgatgatcttgatctctgttgtttatacattacccagtctttggtattttgttatagcagcactaacagactgaaataagccatattactagagtttaggaatttaatggctcaggagaaagtagaagcaccaagtgtagtgaataaaatagcagctaacaagctttgtgcaccttcacatgmctggcactggtctaagcatgttaaacacattaacttctttaatcctcacaacagttttatgaggtgggtacctttgttactaacctttatgacagatcaggaaaccaagacatagaggcttcatagctcacccaaagtcacacagtgagtgagtggctaaatcagtgtcttagtcttttttttttttttttttttgctgctattaacagaatacctgagactgggtaatttataaagaacagaaatttattttctcatagttctggaggctgggaagtccaagatcaaggtaccagctttggtgtctggtgcagacctactcgttgtgtcttgctgggggaagaaggctgtctgcacatggcagaaggtggaagaaagctagacgaactttctccgtcaagtccttttataaaaacctttaatcccattcatgagggaggagccctcatggcctaatctcctcttaaaggcygcacctctcaatactatcatattggcagtgcctgacttttgaagaggacacattcaaatcatagccaggttttaaacccaggaactccaactataggcttgtttctccacatatcaccatgccaccaagtaatttaaagactttggtggtaaagcaaaggccagcctcaggtgattaaggaggatccttttcttcctccctttttatatggagcaggatcccagcccgtttgtaaaaaaatagaaggacacagaagggaaaacttgaaaatgaaaactgaaaaacaagtcatgaaatcagaagatgtgagatcaaaagcaaaataaaatagtttaccttagaaggctgtgcctggatccaacaataggcctcagacccttgcagaaagaagaagggggcagcccagaattaaaaaaaaaaaacaaaaaaaaaccccgcaagctattgtgatgtgccaggcaccactgcaggtttttgacttgtattaacccatttaaccctcccaacaaccctgttgcccctgttttatagatgaggagacagcctgctgaggttaaggaatgttttccatccccaacttggcacacaggctctggagtctggcccttgcctgtctcagtactgtttcaggctgttgccctcagaccccgccatgccttccagggtcaagaaaggcatgtgagcaggcagcttgagctccctgtcacgtgtagacagtgagaataatgtgccttccccaaaggcagttatgaagatcagaggagataatttatgaaaagtgcaagctctcttgagagtaggggattttgtttgttcaccttacaaggcaggtgttgagtcaataggctgcagtcagtgaaggaatgaatgcagtggcatgcgcagcgtggtggtctaagtggtagttttggtccatccctaggggagcacaagtcttgggcagaggatcaaaagcacacacctctgagaagccaagtgtttttgtctgtaacctttgatcattcaaaaggaagcattttctaacctctgcatttttttacccaaactgtacaaaggcttccttgctgtccaagttgtggtatactccagtgcagctgcctggcttccaagagaaacttagcacttcttgttctgtttgtagcctcaaatcaacatgtaaccaaaagctgtgaatgaataatccaaacttgaagaaccccagattttattcaggaggagtaactggaagccataaccatgaacttccatatctgtcataggaaagaggttggcctcagcagcaatgagggataattctttcaagaaaggaatgaagagagaagttagatggaaaagagatttttaaggtcaaaagaagcagctgaagaacatgtgtaggacagccttaggagttactacacttcaagacctgggtgtctgctggaggaaggaacatgaccctgcggagatgttaagggttgggagagctgagcttggaggctggaagcccagctgggaggctattgttaaagaggtaagatgaccctaaactagtattcaggatgttatgtggtactaaaaggaatgttaaacgaagtgataatactgtattcagtttaaatgtttatttgatactgtaactcaccatatataccttctttttttctttctttctttattttctgtattggaaactcctaatcaagataccttctttcttaatatttgatcttatggttaccaaaaagattaaatcaagccattgtttttcaaactagggtctttggggatctaaaacttacattaaacaatcttaaaatttgcctttttttggatgatcctacaattaatacaagtgtattctggatgatttgaatgtttcatcactaacgagatctgagatatccatccccttatgtgcatttgtgttcatattattatttgtgccaagtgaagccacagtgtctcctccaaggacattttgccgtaagttgaagaaagaaaaatggtgggagaatggagcaattacaggcacttgataatgttggtgttaggacttcgaatgctaaagaatggggcctcacaatggtcagtacagtatttatgttgtaaatgtgtgtgttgcccggattcattctttggaagaataattagttataggcataatggtaactgtgaatgaattttcctcttccaaatatcaaatacagtcatatgctcatttaatccagattttaatatcataattatcttgtttcraaagaacaaactgcataactaaagtgatgcttcattaaaattgacatttgaccttggagaactgattaaataaaattaaatgagataggataggcctggtgtctggcatttggaacgcactctgtatgggagctgttattagggctggcaaacctcaatgggctctggtttcagttggttgtggagtctttcacggaatttcttctctaggagattcaagattttctcccagcattgtagcctgtggagaagaaaggaggatcaaagctcaaaggtggtggttagtcagccaggagcaggcaggtgaccatcaaggaatctgtacaggggatggtagatgcaagtgtggccagaggtcaaggctagaaaagtgctattgcagagaaaggggctagaacaaacatagtcaaggaagcaagtgcagggcctgaccttcaagaaaggaattaagcaagctttatgtaggactgatggagcaagaccctgatgtgaagagtcccaggcaggaggcctggtggggcttgacctttccttagggagtgtgtgggggaggagtcttcccaaaagtgtcttcagcatagcgtctggaactttcagagagcaacaggaagactttggaactcaattggtttagagcttctcagtggtttgaggagatagatggcaacctaggagtggctggtgtagacagggatagggatcagagccgacaggttattttagggcagtgctcagtatctgggggtgtttttaaaaatagcaatgactaggcaccaccccagactagaggaattagaatatctgtaggtggggcctggggtttgggctttttaaatattcccagttgtttctaatctgtgccagatcagagcacagatcttagagcagtggttctgaaaccttggtgagcatcagagtcacttggaaggcttgctaaaccayagctcactgagccctacccagagtttgattcattgggtctggagtggagtctgagaatttgtatttctaacaagtccccaggtgattgttgctgctggtccatgacccacactttgagaacccttgtcctagaaccacaaaagggttagggtgttctgtgttgcttttgagtctgtaatgctgacatggaaactgtcatttgtctggataggtgcacttgtttatcaggtaatttttgctattactgtgactttaatttgattgaagctgaaggattcttgttgagggtggtatgtgttagtttcacttactagccctggggccttagacacattatttaacctctctaagcctcagttttcctcatctataaaatggattagggttgttggattaatcagaaatagtcttggaaaacgcagattatgaacccggcacatagtagatgctcagtatgtggcacctcttatttttgctgcatttggcttttttctttttaaaggcttaagtttttgtttgtttgtttgtttgtttgtttttgagacagagtctcgctctgtccctcaggctggagtgcagtggtgcgatctcggctcactgcaagctccgcctcccacattcacaccattctcctgcctcagcctcccgagtagctgggactacaggcgcccgccaccacgcccggctaattttttgtattttttaatagagatggggtttcaccgtgttagccaggatggtcttgatctcctgatcttgtgatccgcctgcctcggcctcccaaagtactgggattacaggcatgagccactgtgcctggcaaggcttaagttctttctgagggtaggtagagattgacttctgttggctctctcagcccttggagatctcatagaagaaataagacaagtgtactaataattcagaaataaacaatgtggccttcaggtggcctatggctgctcacccatgcttaagagtaccatagcctgtcgaaccagtctggggataaaagttgtgcagtttttaatggtccaaatgagagaaaggaatagcctgcctaatatcttgagtccatctctgttatggcccatttagactaacgcaccagtaggagatgaacaccaactccatgtggatagattaatcaaagaacattggacctataatcctgtggatatcttattaagcatctaatatgtaccaggcatcaggttatatgtttttcatgcattgattgctcactgtgggtcatgggttgggcactggggtttgtaaagatgattaagacttgaagctgcccttagaagttgctaaccttgtgtctctagggtatgactgtaagaaatgatggcaaggaaccttgcacttttagattgggttgatctctgcacatgggtaaaatgaaaatgctactataatttgaaatcacttgaagttatgctatagtggtagtttattgcaacacaataaattgtgacctgcatcactgacttgaatcattggctagatgggccttggtccgttgccacttaggggaaaaccttggtttggattgatgagggttttgcttttgggacgttgttttactttgctgcctgcccgcagcctgtggaatgtttctgctgatgggctggtttcctgcttgcctctgtccttgtatcaagataattcattscacgttgccccggttgcccagtcctggttgtcaractttttggtcctgggagcgttttcatgccttggttcccagacggtgctgatgcagcctgcaggtccacaggctcagacatgagcccactgtgtgctgctttctcagggagccatgagtgcagttgaaataaccttgcacttaaaacctgtcttaccattttgaaaactgttctttggaaatcttgccttgggatttgaacgtctttgcctttaggttttgctcttttgtttctgtttcttttactcattggttttctgcttttgagttttggttgccttgcttcaaaaatcttatatcacgaccatggtttgggactatttctgtcatctccttgttcttctctgggcaagttcattccagataacttgcccctctcctgcacactgttggtgtcatcgargttccaaagcaatggttttgcagggggcttctcagatcctgagggatatctcagttctgctgtcctcttgcatcatttatgattatattaggtcatgcctgtcctcttgcttctggcctgaactaattcacttacacgtgcctataaggtgatcgaggtgacccaatgatcttcttttagccacaatacctattscatgatccttgctgaagctattgccagacagtgatgaaatagggattgatttgtcactcactgtgactaagctaagctggctgtgtgtgagcttgggcagtttcactaaacattcccyttaccctaggattcctccctcagccagggtggcatggtgaaggcagggaattgcccatcctaaattagctgatcccaaagacttcattttcttgggagtcttgtcaccaaatagcccttggggacaggagtctttttgccaccattattagagtttaaattcttacctattactgatttaagggctgtagaagagagaagggccaagaggccaagctgtacaaggggctccagctccaaggagaaaaggatggtggctggggagtgggtgctctgggaacagcctgctgagcactttgaaatatggctagtgccactgaggaactgaatatttaattttacttaattccaattaatttaaatagccacatgtagctagtggcccctgaatggaacagtgcagtgttaaaatcagtacagagaagtatttagagcttggccttcggggctttgattcagattccggctctgctgtctacccattgagtgaccatagggacacttcttaaccttctacagttgtttcaagaatttgttgtattcaatataaagggtttagaacagtgcctggcaagaagtgtgtgtttagttaatgttgacttatcatatgttcactcggtattttgaatggaatggtagtagaattcatgtggaatatgaaatgccactgttttttggggtggggtgtgtgcgcgtgcgtgttatgttttctttcttttaaaaagaaattgttcttttgttgctctaggttgctgcagcaactggtcacacagtagtgttggtagaccagacagaggacatcctggcaaaatccaaaaagggaattgaggaaagccttaggaaagtggcaaagaagaagtttgcagaaaaccytaaggtaatttcttattatcgatgtcttcaagacaagtcctctgactgctttacatttgcagggcaatgggggatttctggctttctttctttcttttttttttttttttttcagtttgttagtgtaaaactcatttttccataactttaaaccaatataataacataattactaaacattcagggggtactgattacaaaacaggagaagtaaataaccattttgttgggtgggatttgaggttgagaagaaagcttgtacatacaggtggtgaactcattctagaagaacatgagaatttggaattgaagaacacttgtttygctaaaaggatggaagaagaagaaacaggaagataatttttatactacaagttamgaagagaatgatataataaatatggtatttatagaaactaagagtgaatcattctacttgccaggagcagaagagatagaagaatttgaggaactctgtggaggctgggaatacaacagcatggtgggatgagwaggagttggtgactaagggccatgctgttttttcagcgcactttcacttaggagtttgcatttaattagaaatacagcacaaatcasccaaacaaattttaatttaccttttgtcatcttgttaaagttgcttaagattgatttccttggggcttggatagaatttctcgctgtatgcagccagagaaaagtacacataaggcatttgttgtttctcacttcaagtatccaaggtggtatatctagatgcttttaaaaatttttttattatggtagaatatataacataaaatttgccattttaaactatacaattcagtagcattaattacactcgcacattcatacttcatgtaagtggaatcatacaatatttgtcctgtgtctagcttatttcacttagcataaagttttcaaggttcatctatgttgtaacatgtgtcacaacttcattctttttttttttttttttttctgagacagagtctcactctgtcaccaggctggagtgcagtggcacaatctcagctcaccgcaacctccacctcctgggttcaagcagttctccttcagcctcccaagtagctgggattacaggcgcacgccaccacgtccagctaatttttgtagttttagtagagatggggtttcaccatgttggccaggatggtttcaatctcttgaccttgttatccacccacctcggtctcccaaagtgctgggattacaggcgtgagccaccactcccggccaacttcattcctttttatggcttaatattccactggattattatcatattccaatttaatattccattggatttataccacttttttttaacccattgtattagtctgttctcatgacattgctaatgaagacatgcctgagactgggtaatttataaaggaaagaggtttaattgactcatagctccacatggctgggaaggccttacaatcatggtagaaggcgaaggaagaacaaagtcatgtcttacatggcagcaggcaagagggagagcatgtgcaggggaactgtcctttataaattaccccccactgggcccctcccacaacacgtggggattattacaattcagggtgagatctgggtggggacacagagccaaaccatatcactcattcatctgttaatggaattgggttgttttcaccttttggctattttgaataatgctgcagtgaacattggtatgctattggtttggagtctctgttttcaattctttgggttatatacctacaagtagaattgctgggttgtatggtaatcctatatttagctttctgaggaaccaccaaattgttttctgtagtgactgcactattttacattcccaccagcaatgtacgaaggttccaatttccccacatcctggccaacacttgctattttccatgtttgttttgttttgtttcttattgtagccatcttaggtgtgaagtagtatctcattgtggtgtttttgttttttgtttttttgttttggaaatgaggtcttgctctgctacccaggctggagagcagtggcatgatcatagttcactatagccttgaactcctaggctcaagccattctctcacctcagcctcccgagtagytaggactatagatgtgagccaccacacccagctaattaaaaaaaaaatttttttttagagacagagttgtactgtgttgcccaggctgctctcaarctcctggcctcaagtgatcctcccaccttggccactcaaagtgctgggattacaagcataagccaccgagtcctgctatcattgtggttttgatatgcattttttccccaatgtctaggtggcctttagatgatggtggagataattttaccttctctaggatgaaattcaaataataaatatcacaggcagattaatgttagaaatgcttgttctttggtgctgtraagaaatagcacttgaaataaatttaatttcctcagcaagaccatttttactttctgcagaaagggtacactcgccagsatttttgccacaagagtacaccgaacaaaggagacagggtcatttataacctgacacgtccatcttactgctgtgtccggtttctattggctgggacgggacttcacattcaaatgtatttgtcttgattggctagcaacttagaactttttgaaagaggcaaaggcagatgagaacaaaggaaggaggaagtaacttgtggaatgctgagaaaggtaaaaacacctctaaataaggaagaggaacaggctatgacctaatgcccacttggaccagtataagcatgccagggcaaatatttaggctaaattgtgggagctaagaacataaagtacattgatttctttattacagctagcagatattgaagaatgttaacaggtcttagaataaattttgcttctaagaaaagttactatttattcttaattagatggggaggagagtctctttgaagaggaacttctactttactttttacattaagatattcttcacctgtcccttatattcttttttgttgagacggaggagtcttgctctgtagccaaggctggagtgcagttgcgcgatgtcggctcactgcaagctccacctcccgggttcacgccattctcctgcctcagccttttgcgtagctgggactgcaggcgcccgctaccacgcccagcaaatttttgtatttttagtggagacggggtttcaccatgttatcccggatggtctcgatctcctaacctcgtgatccgcctgcctcggcctcccgaagtgctgggattacaggtgtgagccactgcgcccggaccatctgtcccttatattcttaattgtagtgggaccccatgcaggggatgttatgaggagggtccagacagatgagattataagagccctgggctgagggttggagtctaggacagagtgagtttgacccagatagcctgcattttctgcttgtttacagactttcagctaattgtctccttgggctgagtttctgagccacaccctaaagataaaaggatggcccctatgctcaagttgctcagctctggctagctactcctcagaagtctatactcctgaggtttctctcctctgccagggacaccactgaggagggaggtgtcagtttctctgcctagttgacatactatgcttatctagctctatactgaccaccaatataatagctactcacaagtggctactgagtgcttgaaatgtggctagtctagatagaaatgtgctctgagtgtaaaatagacactagattttaaagctataataggggaaaaatatataaaacatctcaatatctttaaatattgagtacctgttaaagtgatggcatcttagatatattgggttaaataacattaatttcacctgcgaatgtcttttccctttttttaatgtggctagtagaatatttctgtataacagctgagatctagctgcttattccatgatgattttggatgcctttgctgattatgactattttgatgccctgtggacaaattacactatgaaataaaatggcggcttatagaggcaccatctccaattctgtccttattgaggtctgtggaaacctggagtcacaggagaaaaatgaggaaacgatgaaaactacaggctctttggcagcagaggctgtgtctagcttgtttcggaaacaacagtttcaggcatatgacagacaataattatttgataaatgctaagtcggctttcttaccctggctcttgcccttgctctaataggagctagtctctgcttttattagagaggaatagtcagcaccacctcaagactaatggatggcagggagctatggaaggataaattacaggcttcgtggacactttgagaacagatagggtaggccaatacaggtgctctgaacacccagtttgctaactggagcagagstaagaacttgaaagataatttccagtgagcccrgtgaatgttctcttcttcctcccactgcattaggccggcgatgaatktgtggagaagaccctgagcaccatagcgaccagcacggatgcagcctccgttgtccacagcacagacttggtggtggaagccatcgtggagaatctgaaggtgaaaaacgagctcttcaaaaggctggacaagtttgctgctgagtatgtaacctctggacaatcttctctttttttttttttaaccttatttttgtttttcatttttattttttgtttttatagatttgtgagtacaagtgcagttttgttccatgcctatattgtgtaatggtgaagtctgggcttttagtatacccatcacccacatagtgaacactgtacccaataggtaatttttcaaccctcgccaccctcccaccttttgaagtctccagtgtctgttatttccctctgtacatccatgggtacctgttatttagctatcacttatatgtgagaacatatggtatttgactgagttgtttcacttaagataatggccttcactcctgttcatgttgcttcaaaagacatgattttattcttttttatagctgagtagtattccatggtgtatatatgccacattttctttaatcagccattgatggacacttaggttgatttcgtgtctttgctattgtgaatagtgctgcaataaacatatgagtgcaggtatctttttgatagaatgagttttttwcctttgaatatatacccaatagtggggctgctggatcgcatggtagttctgtttttagttttttgagaaatctccatactgttttccttaaaggttgtactaatttacattgccaccaccagcatgcaggggttccctttctccagattctcaccaacatctgttggttttgactttttaataaaagccattctgactggtatcaggtgctaaactcattgtggttttaatttccatttctctgttgattagtgatgctgagcattttctcatatgtttattgaccactagtgtgtctttttttgaaaaatatctgttcatgacccctggacattcttgacagattctgaggggtccctccctgggccttgaactttcctccttgtttattgctttctcccaggaagggatcctttgaccaagtttatccacctccctctctcctaccccacagctatttcaagaaaagccaatatggtttccgttgttctccatcttcccactcccagtttgcttctgaagcttgggctgctgtgatctgwwccttgtcccagatgcgtgtagaattacccatggtracatggaggggtccatccagggacaggcctatgtttcwtgaagtgtgtaggtcatggatactcctatgccagaagctgctctgacgttccttggttcatttcacacyggcatctagaggctgcagagacatctgacagcagacagttaaggacatgtagggtacttctgtgctccactctcgggcataggagtaccctacgtgtccttaactgtctgccaaggaccctcagagcagttctgtgtttcctccttttttggatggagcaaacagaatggtgtaattgaagggaatgcctatagacagagaggactttcctgttttgagcttcatctgggttcaatcgaagtactcttgggagtgttaaaggagcattgacttcttagctggctggcttcctggtggaattcttcctggcagaatgtaccttgggatccagagccttcgagtgtgtgacacctgacccactgatcagtgctcttctagtgacttgtttgactatattttcatgcttcttggttggaattgaatggcagaataagattatatgacaaaagcaattctcagggcacttccggtgggcagtggctaaagagagwcacttgcataccagcttgtcggaatgttaaccttcagagatgggtggccttgtggccagagaggccctgcccctgacaaagagaagagacttgsctttctgtcatctgtccatcactgccaatcagtgtcctcgtgcatttcacactggcatctagaggctacagagacatctgacaaaaacagaatatacttgtggtaccgggactggctcccaggccagcagggagccctctgggataataaacagccaccccaaaaaagggagttttgtcaagcagtttgatctttattgaaaagattggtcgctcttggtgacagtgaaaggcctgactgccctccattgtccatgtctggtacagaagaaggatcactggagaaagtcaggaggcctgggcctggtgctgaccccctcaccacctccagccttggaaaggtcctcagtytcgtcatctgtaatgcaagttgaggtgattggggtaaataatttcctagacctytctggctctaactctctaagactagcttcccccatttgtwaaataggagcagcagcactggtacctattgtacagagttgtttaggaaactcatttcatttagctcacatttcctgagtgcctgctgtgtatcaggcmmtacactaggctctttaacctgaattgatgcaaaacagatatgaggtgtgaaaagaaggcatgacccatagtcataccaaagatgtgactttgctgctgaccttctccacctttcttggcactgtttgtttttgttttagatcaccaccattattgaatgcttgctacaatttttaagccagccgtatttgagagggtacttttctgacaaattttacagggttcagtcctataatgggagaaggaaaatatagtcaagtgatacatttcgggttggaagccctgatgaaacagttgcatcctggagagaacatgacttctctagcagcagcctaagacacacaaatgaaaagtatgaccagacgcacaggcagccagatcgaagtcctgactttcccctttagacaaaatacagactcttgaatcctttgccatccccaccacccctcttgtcttctttatactagggtctggggccattgctaataatcactgtgcttgtgttgtcgattttcttttagaacatttaagagaaaagtagtttttttggtacctgagtgtccgaatgaaaaaaacaaaagatggttcaagacaagtgtttccaggaacatgtaagagtactttttttttttttttgagacggagtctcgctctgtcgcccaggctggagtgcagtggcatgatcttaagctcactgaaacctctgccccccaggttcaagcaattctcctgcctcagcctccctagtagctgggattacaggcatgcgctaccatgcccagctaatttttgtatttttagtagagacggggcatgttggccaggctcgyctcgaactcctgacttcaagtgatccacctgcctcggyctcctaaagtgctggtattacaagtgtgagccaccgtgcccagcccagagtacattttgtttgtggatgaaaagactgtcctatgtgtttagtattctctgaagacagtgtgagacttttaggaacaaagtcagcctgaccctgttgggagaggcagaagcagaggtctgctggggagagatcatttcctccttctgataaaatgtgccagagtgccctggactggtgatacctggaactgggctctgatgtcactttattttaccaaatgtgcccaagtttcccctttttgcaggtgaatggcccttcaaacattctacmaaaaggggtattacgattgtaatactaatctttaaaataacactttcttttcttaaggggagtgtggagccacagctggcacagccttgggcccaggctgtccctgctctgtttttgtggttccaggtgcttgtggtgcaggttgtgtggttgaacagtgcttgtgttggccacacacattgttattggaagaggatctttttttcattaccttctgtaatggggaatagtttatattattttccccaatgaccaaaagcaagaaactttgaaaactgaaattttaagaccttaaaacaatgtcattttttttttaaaaaggaaaccctggcatttaaatggcctaccttggaagctgttggagaaggtggatkkgctcatacctggaaagagaaggctctccgctgcctaccmacactagtctcgccttttacctcttttccctcctttccaaataactggtttcttctcccttctcttcctcctctcctcccacccgcccctgatttgagcagattatagtattgcctgttaggtaagcagaaacccccaagcctggtcagtaagggatcctttcctttcctgccctgttacagtccatcttggttggaatcagcaccaggcctgtttgtatgtttttatccgcaaggtggcgctgcaggaaagcctggaagtcaacctgtttaaagcttttcctctcatgcttttggcacgccactttactgtggccttaaagaactaaatttggkttaagtcagtatggattttttttaatgaataagttaatgtcttatatatgcatatgcctatatcctcttttccccatatctacccatgtaaccttaaaatttttttgaaccatgttggtgttcttgttttcattttaattcccattcaattgaaaaataaagcttttcacttcagggaaaatatcttaattcaygtttattatcatatgtttctgattgaggatttatgtgttcatttagaattttgttgcttttaggtgtctttctttcattattttttgatcactgagtttcgtttgtgactggggttggttaagtagcttgatcaattagccacctcttgttatctcacataccttggaagttaactaatacaagtaggtaggggaaattttgttctggaaaatcaaggaaggattggtgaaggttaaatacctcttcggaacaggaaattccaattttatttcaaatttaaaaatttttaaaaagctgaagtcacttgatttcagcctcttatatgaagatgtgtcttctccctcattcccccaatgggtcaggacaacagatgtggcagtaagcagtcaccttgtgcattgcatccaagagtcatgctgttttgaaagaagagattcactctgatactcccactatattttctcttcacagacatacaatctttgccagcaacacttcctccttgcakattacaagcatagctaatgccaccaccagacaagaccgattcgctggcctccatttcttcaacccagtgcctgtcatgaaacttgtggaggtcagtgggtgtcagcttgtgtgtgtctgcccgctctgccagctctctcagtcctgcttttctgtgttacaccagccctgccaccagttgcctaggatgggttttaacctgagggtagaaggttgtccctgagcctcatatctaggagggcttctatgctttgtttcttcacagccctgtgtcttgcttagtgatatccagaaaggctgttaactttgtggaatgtcatttacttatttgtgccagagctgatgggcagtgctgagaggcatcagaatgggaaggcagcactagaaaccgtgggctggwwgggaccacacagagggcagctacatgtgttcatattatctcatcgaggtcagcttgcccatgctgtaaatgcagttctcattagatacactatactagcttgtccacagttcctggggttaattctgaccccatgtaatggtgccttagcattgtccccagatgaggtacatctcctgtgcattgtgatcagagctattaaaaccagctcccattgggtgcggcggctcatgcctgtaatcctagaacttttggaggtggaagttagtggattgcttgagacccaggggttcaagaacagcctaggcaacatggcaagaccccatttctacaaaaaataaaaaatcagccaggggttttggtgcacgcatgtagtctccagtacttggaaggctgaagtgggaggattgattgagcctgggaggttgaggctgcagtgagctgtgattgcaccactgcactccagcctggatgacagagcaagatcctatatcgaataaaaaaaccctaaaagtaaaaaaataaaaccagcttctgatagccttgagcctcctgaccataaacctggaaggtggagcggggaggcagggagggcttccccagcatcctgtttggaatgcttggagactccaatatgttggagttggagtcacagtaggcaatttgcacctgaaatgggacaacttgccttttacagggtcctaattacagggtctgaggagcagccgctattaaagtagcatttgttctgaggttgaggagttattgccctgcgaagtgtgggggacgctgatgctgccatgtgggtgatgtggggccaggcaaacctacacacactggctgtggcctctctgggagtgtgtatcgtctgttttcttcattattgccttttccaactaccttttccttcctttatcctcctcattccctcaccactactcagcataagcatttttaataagtcataataatgaccattttttttagcattttctctcaagtgacaactttgaccatctwgcaatgggactttttctgtcttactaacattgcttctcagcttcctcctattttctcctatcccctaaggctgattttttgaagaaattgaagaatgaaggggagggatttggggaacagaagaaacagcatttaacagctcttatctcatgcagattaagagcamagaagtggcatgcatttccaacatttcagtacttagggactagttgatttctttagttattatattgtatatataagtgttttggagataggcacattctgtagatttactttaataatgttttcamctgcatttatctggtaatgtatgcttttgtctttggaaatgtagtgtgttggktgttaacagctgatgtttagcamatgctactattttttagaaagtattttgtaaaagtgttcttctctattcagtttttattgtttaactttagctcttccttgtgttgctggtggtgtacaccaaaataacttgtataataagctaagtggctcctttacttaggactgggctcatttaaatgtatatatatatgtattttttttcagactctgttggaactaggagcagcgtatctgtacaaattactgttcgttgaatgaatgaatgagtgaataaacatccatctctcctgtttaaaaagaaacaaaccttcactattattaactcccttaaaccaaaaacttaatttgaaaactccatagtcagcagtgtttgtcccccagctcagtctgtggttttgatggagactttttagacctcctttcaaacagctctgggattctgtttgatttgtggtacccgcagggtggcttctggtctttctcgtcctgctcctcttctccatcttcactgtgtcttttcctgtttccatccattcacttctcttgatgtcacgacatgacaccatggcccaggctgtgatcacacgaaaacaggagtgagaactcttctttgtttatatagcacctttcatccctgcacagacactagctcattagttcaccgagtcagacggccctcttgcacagggaagacatgcccatgatccccattccagagaagagaggtgaggcagttgcctaagatcccatgaagggtctaaagtaaaccctttgactccgattgaagttctttactggcctttacattttacatatatatgtgtgtgtgtgtgtgtgtgtgtgtatgtgtgtgtgtgtgtgtgtgtgtgtgtgtatagttgaatgaatgcgtgaataaacacgcatctctcctgtttaaaaatatatatatatacttcatctggttctttccatttaccattacacatgagttctctaactgcttactgagggctgactgtgccgggcatcgtgcttggtgccgtcccctacagatgccagtagggcagcccttgtgcccttgcctgtacctcacagaggtcaggagggctgctggagcaggtggcagsccccrcttgctgtaaatgaaagccttccccagaaggatgagtctgttctgaagccaaggggccactggcctctagagcatctgtgtggcagagggtggagtcatgggagaaatactcaggaatccaggagaactgtcacttgggcaaattactcactttcctggggctcctcctcctctataatagaagatcaggtcccatgtagaagactttaagggcaaccatcatatacttccagacttctaataattaaataatggaagtcagcatttattgagcatttgtgcttaggctttgtgctttactcccaatgtaatttcattctcacctcaacttcctgaggtgaacagagtgatttcagtgtcatttcagtttcaagaaacatactcagggtcacacagccagtaagtggtgcaactgaacccaggcttgtctcaacaacaaagcctgtaaaactgtcctatacacacacgtacacacatatacttgtattttaagccgtgattttgtacattctacagtacactgttgtcttttttttttttttttgagacggtgtcttgctytgtcacccaggctggagtgcagtggcatgatctcggctcactgcaacctccacctcccaggttcaagcaattcttctgcctgggcctcccaagtagctgggactacaggcacatgccaccatgcccaactaatttttgtatttttagtagagatagggtttcaccatgttagccaggatggtctcgatctcttgacttcatgatctgcccgcttcagcctcccaaagtgctgggattacaggcatgagccaccacatttggcctctgttttaaaatagtcattttgggaaatacattgtttctggcttgagattcctacttctatgctgaaactcaaactatttttgttgcctatatggagccttttgatcaatcattccttgaaccattctacygaagttgcttgctgacactctggtcataattctctgctttgcatttccaggtcattaaaacaccaatgaccagccagaagacatttgaatctttggtagactttagcaaagccctaggaaagcatcctgtttcttgcaaggtaagagtatggrtagcttgggaaggaggtagttcttttcttcttggaccctgacttgttmctggtagaattcttctcatagaatgatgtgaaagaaggagyattgtatactgcaagcttgtccacrtgctgtaaagagcaatccgtgcctcctgttctagtttgtagacagggaaactggactcctaagccatgcctaaggccattatgtggatagtctgagacctgaatggagctcaggacaccagctgagtagaagacacgggactgctctctgtcctggcttttgtctcctgatgaatggctgcattttcataaatgattttaggtacagcttggtaaacacatacmtccctaacagaaaatgagggctttacttttgcargaaatactacagatggtgaaataaatgataagacagtgagagagcaacctgccaaaatagcaataaggaacctgtttctcaccgggaagttgcattatgtttttattgkttgttgttttgtttttcaagaagcagcatggtttagtgggaagcctgcttgacctccatcttttttttcccctttcttaagctgcccagttattgtatataaaataatcccagttgctgaaatgataacctacctgaaggtaattattttgattaccttcagtttctccatttgctttagttcctctttagttcccccaaaactcggggactatacttatgcatgactttgcagtttttcttaaggggtagttgtgtcacaaaatgctacaccattacraagatttacatataagtcatctactttttttttaactgtaatcctttgtatcattatagttctcatagcaaacttttgctttctaaaatattctcgagtttgaacttacagtactgtactaacccatgaaaaatcatgytgttcatgaatcacctgaagaagccatctgttgaggtggactccagcagccaaagagagcaggcttgtgtgtcctgctcctccccgtccatgggtaaagtgttgttagggagtctcatgctttaacacccattttttgtttgtttggttctgtagttttaagtcatctagatttctaaactcatattaataattggatgttatgattgtactttcttacgcagttatgctttgttagtggaagaaagtagtaatggtattgaaaagamcatctgtgcaagacaaaaagatatggaaacagaagtacagggaaaagctaatgattatctycagcagcataataattaatctacaaagtaatgattcagtcttccatcagagtggccacggcagctgcagagatgggaactctttgttctcattaaattatcttgttaggtcattccagaactctctctgtgtggtattctaagggctttcagagggtctttctgggtcagttattgaagctctttatgaggcatctggacaatatatggcaactacataggacaagggtcagcaaacttctgtaaaggaccagatagtgaatattttcagccatacagtctctgttgcaagtagtcagttctattgttgtagcatgaaaacagccatagacagtatatgcaatatgagtgtggctgtgctccagtaaaacttgacttacaaaaacaggctgtgggctacagtattgtactttaccaayacttgacatagaagaggggcattaatgtgcctggaatgtgccttcctagtgagacttcatgaggggattgtggtatataggttaagggtatgaactagcccaactgggtttaaatcctggtgccggcacttattagctgtgtaaccttaggcaagctacttaacctcgctgtgcctcagtgtcctcatgcttcacataaggataattatagtacctctgtcacagggttattatgaggaatgaataaattaatatttttaaagtatttagaacagtacctggcacacagtaagtacagtaaataaaatgtgtttaataaataatctgaaaaatatgaatttgattacataaaataaaattactttatttaaagattgtgtctcctgctaggcacggtgcctcacgcctataatcccagcacttcgggaggccaaggctggtggatcacttgagcccaggagttcgagaccagcctaggcaacatggcaaaaaccctctctacagaaaaatagctgggcatggtggtgtgcacctgtggtcccagctacttgggaggctgaggtgggagggtcgcttgagcccaggatgtggaggctgcagtgagctgagatcatgccactgcactccagcctgggcaacagagcaagaccctgccaagagaaaaaaaagactgtgtcttttcacattccaccaatatactgatagcatctgtctctctgcattctcaatagcatcaaatattatyacagkgggggaaaaaccttysataatcttgttggcaaaaatgcgtattyttttgattactagtgagtttatttatttatttttttatttttcgagatggagtcttgcagtgtctcccaggttggattgcagtggcgcaatctcagctcactgcaacctccatctcccgggttcaagcgattctcctgcctcagccttctgagtagctgggaccacaggcgcgtgccaccacacccggctaattttgtatttttagtagagacggggtttcactgtgttggccaggctggtcttgaactcctgacctcatgatcctcccgccttggcctcccaaagtgctgggattacaggtgtgagccactgcgactggccagtgagtttaaatatttaatgagtcttggcactttttccttattgagctctatgagctttttctgtagaagatattaactgttggagcttcatgttctcaggtaccctatcttgagtctatagtgaaccttttgaagttgaaaagagtatttttgcctcaattataaaatctgtattgttccataatcttaattaagctgataaaacttgtttgtgcatctttgtgctcatgtggcaatagatggggttagggcttggtttcagtttgcctagggttaaaggaggttcacatcctttgtgttactgtccagtttccccgcatgcagtcaggttagctctgtgaggagtgcctggtcatctgtaattcagacattaaggaagtacctggtgtgtgctagaaacagaatgcagagttcaggccagggtgaggatttctgccctcaggaagatcacagccttttgacaaaagaggaggcaccatttgcctagtggaaatcagcttcaacaaaaaaatcacctgcttttctctacaagtcccyggaagagatcagtagataaaatccaaatcccacacctgtcctccagagagatgattawtgttagttactgagaagggaaatggatgaaaggcatatgtggcacaggggtcaccgcaggatgcagaggtcttagggggtgtgccgtgaaaggccagctctctgtcagaggctctgctcctttgtcggagcacgtgccctcaagtcagctccactgcagtgtgcgctggaacctgagaagttgctgagtagccgaggagtggctccaaggagcctggaaagcagtcctcctttgaggaccattcaaggtggagtgtgacgttttgtcgattcttgaaagggaattgggaggaaagaggaggaataaagggatgggtgtagggctgtgtgtacagcattttatgtgttttctgatttatcttcacaactttgagacaaactgtcacccccagttcacagatgatgaaacagattcagagtgacagaaggaccaagagagtattcaagattgaacccaaatctgtctctcccaaagccatgctcttccaggtcacacctgtgccttgatctgtctttatgtcaggatctgtgcagtggggcatctgggtttgaatgtttttttaagtactatgattgttggataaattgtcatatgagatagaaataaggccatgctgcaaattttgaaaatgtacagcttgataaatgggggcaaacatgatccagggtaagaaggggcaatttggtgacttcacaaaagataccatttaatgaaaatttactagttttttgtttttctgtctcccaaaacaggacactcctgggtttattgtgaaccgcctcctggttccatacctcatggaagcaatcaggctgtatgaacgaggtatccttctgacccaggccaggagcagcagacctcagctcctggcgccactgtctggaattctcagtgtctctaggaggggtcgggccgtgcacaatggaggaagcagtgtctgttttctagctttgtgagctcagctgcaccctgagccctggtacctttttcactgttttcccagggcctcctggcttccctgtgggcctctgagaaaggtttctggaactcccaccacccccactacagtcccagccagagcaattgcatggccggcccagattgatatcctggatctctgcttttgattaaaaggtttactgcttttaaaaataatcataatgtaaaaatcactaggctaggagatcttgaaagttccttaaggttctaaaacttgtgactgacaggtgattagaaatatgtgacaaggccgatatgtggtaaggacagtttttagtagtctgtccttactgagtgatgtcatgatgtactttttgtaaccttaagaatggtgtaaacagttttcctcagtacttgattgacaaagaatgcttttctctgctgtagaaatatcagatttgggacagggtccaggcctctaaattgatctgcattctcctgcctgctttccctccctggtttctggaaaggtagctctcatgtctgcttcaaaggcaaacaagccttaataggactggataaaaagcaagtgtaattgttttcaattacttcattcataaatgctcactcctgagagtgtcattttttaaacaaaacatttacaccagctcttccagagagatgaaagcacatttgsttcctcaaaatctgctttaaatattaaaacttttctctatggtttatggaagcaattgcctcacttttgctccaagatcaaaccaacagttctggtttatctatcaacaaatatgcctaattacacctcaaagaaagcacagagcattttaccctaccttgaaaggcagktgtatgtctttttttttttttkaacaaaatgtaatgttttagaatgtagcatgtgagagatccaccttttaatggtgttttcctcactgtccatttgatgcattctccaatgcaccaagtatcagatggtaagttgaaagccctcttcttgtctgtggtccctttctgcataggtgcatgccctttagccctcaccatccctggccgcctgtgggctgaagctggaagagcaggacctggcctcaggacatgctcttagcttgctctgggcatgggcttcaacagcctatcattgctggtccctctgcttctttttccaccaccttctcagaatctgcttctgaagttgctgggtgtcctgcctggggtgggtgctgcttccctactgcacactacagtcacaccctaggcctcttaccatgtccccccgcccaccacstgctccctcctctcagccaacacagaggagtgctcagagcatgcccaccgtgccatctccgttcatacagttccaccttgaagcttcaagcatctggaggctccttctcgtctgccacatctgttcatcacttttgattccttcctgtcatgcctgttccacctcttcatcccaccttttccccatcccagtcaggctgccttcatgaggttccttaggtagcagagtaattcacgctactcatgtcttttcctgactggtccccgctactgcacttactgagaaagtatcatattgtccaggaagttgagacaccgcctactgcatctgcccacacaccccctgcacagcctcggcaggagctctgtgactgtttctgaactcatgcaaggagaaattttctgtaccccactgttgatacacctggggttccaggcacatggtttggccaatgctgccttgagtggtgcaggctctctggaaggatgtgtgtgctgttgtaggtcaggcctcctggatgaccgggcctctgccactaacacttcttgccagtccccatgggatctcgtggaggctcacgcccttttgctctgctgtttgtccactcattttggcttccatgttgggccttctttcccagtatcccagctccgtcctcactcttcctattgctcttgttcgttcacactgtgactgaggcctgatgcatgccccagtcactstcactcctgtgagtcagagggacagaggctggataggctgtgtctgacagtggactgctgcccttgccaggcacccactcctaatggccagtgtgggcaggatggtggggccaaatggtcagctcttctcaggagggctctgctggcaacaggcctgggagcaccatgagcctgccccccagtcaccatgtgacatcttgctcacattgtcgcccctgctcaagacaggctcagtggttctctggtttcctgccatctacaagctctgccagagagccttccttctggccaacctctgcccctgctgttatcaccgccaactactcctgccattcccacgttgccccacctgagtgtctgcagagctcccagctggacatcatctctgtcatcacaactcttcttgctttggctctcccttgggtcacttgtcactgtcttccctgtggcatggcaggtgttttctttcccttactatactctcttttctggggcactctggctcctcctcatcttcatatgtcccaaggtgctgtgtagggcgggcacataggcagctgctgatgagtaaaaatgctgtttctgagttgttgctaagtgcctctgttgttcatgctaagaatggttggcaggtggtgctgctgagccagacaaagaagcagatgttgggcaagtcccaggccctcagctgtgctgatctggagttcactgaggaagctttcctttgctgtcttgtctggagttaggggctcttaactggagggaggtaggagagggtgtccaatgaacctcctaaagttgacgcagaatttggggtatatgtgcattttttatggaaagggtgtctgattgtcagaagtacttgattctaaagaagtttaagaattattagtttaaaacatgattccacatctaactgtcacttggcacaccaatctctgtattttgtttctctgtttctgaaagtttgcctcttttgctctgcattattgagaacacgatctttagagttgggctgactttgtagagttatttagatatttttctatcatgtgctgtatcttcatattatttcttgaaataaaacagtcctcaagtgagtctctgaatatggaattacagcgttgcttctagggttaattgtcctgtccttgaatatagatttcattaaatggctttagctgagttgcaaccattatgctgtcagatttctgtcccagggagactgccagtaacaaatgaaccagtacataagcatgttaggttgtgatgagtaattgtggagaagaagatagtaaggggtggcaagagtcttgtcctagtgtcctggccttttctttagtgcagggagttgctttttttatatatgcagggaggagaagaggctgtcagaagtatgacacctgagcagaggcctggaggaagtgagagactgagctccgaagctgtctgagggcagcacctaggcacagggagcatatcccaagcctgaggagcctgtgaggccggcacttccagcattccagggctctaccagcacagaagctgcggggcttcctaatgaaatcctctgagtagaacccacttttaagcttcatagccacaccccaaatatgctgtgttccttcccattcctgcctctgcatgtgctgttctctctacctagaatgcccttcctggtctgctcatctcaggattatcttcaccttccaggacccaggcatgggggtggttttggtgaagccctggcagtgtgagtaaatctctccatctttactcacacagagctgtgtgagtcatgaatcttcaggtcttattatgttgaagtttttggcttacacatctgagttctcccattatgtcatgagtaccttgagtgcttgtctggtttatcttkgtctcattcwacatctctggtgcctgctacataatgaatagaagttgaatgaatgaatgaatgaatgacgctgcctatatgattatttttgtttctttgctttcttatggcctaacactcaaatcatgatttctcaggcgtctctaatcctaattagtgtagttattagtaatgtcaaccataataaataattgtggtgtattttagtcaccttaaaatgccttgaaatcctttggaattactttagtaatttatttgcttttaaaaatatatcttctttatcgatgtttaagtagtttctctctgagtgtcttaacatttttccctctttagctttgatctgattgacttcttaatgctttggaacaaaattctagatagccacctgttgcagactattctacttttctgatttcaaagaaagggaacagattgttctccataaaggcctcttggggccaaaggacatagtaaatttccaagggaaaagcacattgatccttgtcgtagtctactcaacagacttccaaacgtgtggtgattctaactcgggtttgggcttttctttaaaaggtatcttgactaaaaggtttgtgtgaaatgtgatgccaggggaatactccttacttgtaaaacccaaaaaactgggggaaagaatacatacaataactatacatacaaaagcagaaagcttagttttctttttaagaaagttwatttataaatcaaaaatatgctgtagcattaaattatactttaataaatgattccagagttggaaaatcccaatgtatttgaaagtagctgaagtttcaggcatggagacttctgtctccatgaacagggtatcagtactccaaaattcacctcagtggtgcgtagctttgaaaatcttgggccacacactgtggcttacacctgtaatcttagcactttgggaagctgagacgggaggatcacttgaggttgggagtttgagcccagactggccaaatggtgaaaccctatctctactaaaaatataaatattagccttgtgtgggggcgcacacstgtagtctcagccactagggaggctgaggcaggagaatcacttgaacccaggaggcggaggttgcagcgagccaagatcgtgccattgcacttcagcttgggtgacagagcaagactctgtctcaaaaaaaacaaagtcttatgacctctttggcatgtactttagagaggaaatcttacccaagccagaaagtctcagtctaggcattttttttattgtgcaagcatataaaattctagtaattctggggctaatcctgtgatagggagaattcaaggaaaggtggtggtgacccagtgctgccgttttctccttaggtgacgcatccaaagaagacattgacactgctatgaaattaggagccggttaccccatgggccyatttgagcttctagattatgtcggactggatactacgaagttcatcgtggatggtaggaattggaattttttgttgtctttaattgaggtagtttttctgaactgtaaattataatgcctttttaaaaaaagttagcaggggtcttaataaagaccttccaaaatcctgcctcaccaggttgagaattcatgaacagatgtcaggagaaggaagaatgtgactgtctagtgtctctttaacagggtgaccttgaagaaaaaaaaacctttatggattcacaggaagttacaaatatagcacagacaggtcttgtgtgtgtgcccttcacccagtttccaccagtggttatatagccatagtacaatattaaatcccaggaaattgacactggtacactgtgttatcacatcaatagatttgtgtaacctccattgcaagcaagatacacatccattttaaaaaatatatccattgtaatgtaaaagctctgaagacagggtaaaaataataattaaaactggactactgaagttgaatgtagctatctgttcccaagtttcacagaatgctagttgaagaattaaattttgaatcttatgtggatgcaaaataccaatggcaggaatgcagattttttaacgtgtattctgaaagttaactgtgccagtgatgaatccaaccagcaaattaatggcttctgtcagtgtacttgggcctttggccktagtgatttctgagaagacactggataagyaggaggaccatagtagggccaggcttcaggcagcacaggtgggtggcagtgcagcagctttggggctgatgtggctgcaccagcacagccttccttggtgcctctgcagtggtggccggaggggcgccatgcctggggggctctcccacatcagaggcaggcctccagacttgtccttggaaatgccaagatgtaaamataaacccagcacttcatcctgagttctcttccctccgctcaatagggtggcatgaaatggatgcagagaacccattacatcagcccagcccatccttaartaagctggtagcagagaacaagttcggcaagaagactggagaaggattttacaaatacaagtgatgtgcagcttctccggctctgagaagaacacctgagagcgctttccagccagtgccccgartgcctgtgggaatgctctttggtcagacattccctcacacagtacagwttaataaatgtgcattttgattgtaatctatcgaagtgattattacaccagttacagcagtaatagattctccattaagaaataattcccttttttagtctgttcatttctgtgtattttctaaacagctttacacccttggtgccttggagcaaacatgttttttgaaccttgtcatttttgtgaagaattgccwagattccttctctcatcaacgggaaagtacttcctctgagagtgcgagtgcaccatgctcactgttgctgcgtgggagagtcacaagccactggcaagcaagtggtatagtctgtgaagcactgcagcgagcagcacctggatcttgcctttataagaacattttactacctgcagctttgagtcttgccctacattttgggcatgacataagatgtgtctttattcagctcgtcgtgaagatgctgctgctgaatgggtcagcatatctctgtttgcatggtttgcaggaggtcggttttcatggtcattcagttccacagatctgaatgattactgtctgtctgtgtcttttttccatgagaaatcactgttgcaaattgcctataaattgactctactaaaataacaatgtttcagtctgaaaatttgaattgaaaaaaatgtataatataaaattgtaatacactcaaatgattataaaagtaaaagttggtaatttaggcagaagctatttctcctcttctttgacctgctgttaatttttaaagtgggagtgacggggagggaatggcaggacaaggcatttgtgtaaaacctgcctggggccgtcgctgccagatttcttaccaggaaagcagtaataagggcacagagaacaatttttaaggaacatctgtttcttctttgccaacaaagtgaagtagtgtaacgtaagcttcttttaatcattggcttaagaaagtgtcttccaagatagaattttggagttggaaagacayyagaaatcctgaggtccaatagcctcattagcagaaassttaagggatgtgcccaaagtcactagatattttgtcacatagcctagactagaactaggttttgataaaattaagtacaaaatagcccatttgaaaatctccgatccaaaatttcagacaggactctccctaaaatgggcatccttgtttggtgttctgggtcataggtctaatagtcaagagattttttttcttcattttatgactgataaaagggagcttattaattttaaaaattttgaatctataacatagtgggaaaataaatacatcggtgcatttgtaccgcacatagaacctgggtaggacacttttaggttattcttataaaatgctgcctaacgaaccaaaggaagcacctgtgaggccacccgcatttccatcgctaaaggttacccttgtggtctgacagctccctgctctctcaggctggctcttgacctttggcatgagccctgggcctaagtgggggcttcacttccttactgtctcaccagagtccccataggatgcaggcccttgtcctggaaatggcagggttctttcttgaccactgaattccaggaaagatgtaactcagcaatgcaactatcagactgccgggatgagaaggtaggagctgcagcagtctttctggctggcattttaaaatacactttaagcctaccaaatagtcaaaaggcctagcctctcaatatccttttatcgttttcaaaaaatattttccatgcaccgtgtttgggaccaggaaggaattttgaacatccttcctttagacatgggaggtgagggagtagctttttctttcccaactccatgtctctgcgttctcaggtgaacgtagctgcttgccacggagagctcttggggcggggggagggaaggtcatgtcagtcaggttctctgcttccaaatataggcccgctgctgctgtttgcttcagtctgtggttaagaactgagcctcagtgagagccccaggtgccttgcatcatcctccactgtgttttggcagcacttgttcaagagggagggtgggtcctggcagtgctgctgggcctggtgtcactgctcttggttctcctcacctccccaaacttgcctcctaaccgtcatgaatcttttatgacacttgaaagtaaagaccaagttttaggtcaagaggatactttttttttttttttgagatggagtcttgctctgtcgcccagtctggagtgcagtgttacaatcttggctcactgcaacctccacctgccaggttcaagcaattctcctgcctcagcctcccgagtaggtgggactacaggcgtgtgccatcatgcctggctaattttttatagttttaatagagacggggtttcaccattgctggccagtttggtcttgaactcctgacctcatgatttgcctgcctcagcctcccaaagtgctgggattacaggcgtgagccaccgtacttggccactttttttcctctctcctatgcttccccttagtgatatttttatttatttatttgttttttgagacggagtctcgctctgtcgcctaggctgaagtgcagtggcgcaatctcagctcactgcaacctccgcctcctgagttcaagcgattctcctgcctcagcctcccgagtagctgagattacaggcatacatcaccacgcccagctaatttttatatttttagtagagacggggtttcaccacgttggtcaggctggtctcaaactcctgacctcgtgacccacccacctcagcctcctgaagtgctgggattacaggcgtgggctactgcacccggccagtgatatttttatttacctataatacaagtgaaagtttgagattaagaagaaaaccaggcaacttatgagatgacttgctgaaaaagatggtgagcctctgatagccatcacctagacttcaattctgtttagtaaaatggagttctctgaaggatcgttttaactcaagatatctttgtaaaatgaaaatcatggccctttcatgttcttaagattcactgttaatagtagtttttctggggaaaatggttaactttttctgacatcaattgtaaagcgtatttccactttgggaacttcaatgacacagcgtgggggtaggtggaaccatgtcttggaactcggaaactactatgaacaaatccggtgttagaaaatactctcagctgggtgcagtggctcatgcctgtaatcccagcactttgggaggccgaggggggcagatcatgaggtcaggagtttgagaccagcctggtcaacatagtgaaaccctgtctctactgaaaatacaaaaaattagccaggcgttgtggcgggcacctgtaatcccagctactcagaaggctgaggcaggagaatcgcttgaacccaggaggcagaggttgcagtgagctgagatggcaccatggcactccagcctggacaacagagcaagactctgtctcaaaaataagaaaaaaaaaaaaaaaaaaaaagaaaatgactctccactgggttccgttaatagtaagtgttttgactaacacatcagctttcagaaacccatttgagattcaactagtcatcattggagaggttacagccactatgttagtcacagcttatacaacaacatacactaattatgctttctttgtgagttataccgttcacatatttgaaacaagcttttgtcttgtccccaccttgattttaatccctttaacatttcaacctaagtaactcattaagtctaccaaaagtataaggtgtggctataattttatgagactaattttcttataaacaggcattgatgctacataaatagtaatcgaaaaaatgctttgaacaatgaaatcatggctgtgctttcagtactatactttgaaagaatccatttggctgtgtaaattctattttttaaattggtctcactgtttcatcatcacagttttaatgtctattttagcattttttttcttgctaccatttgacatggcataacagactttaactcctgaaagacagagaaccctgtcattgatactgatgttattcaatgttttagtgaaaatcaccaactgtagttgctgctacaggattaaccagcacaactacttgacagcatgggctttgcaattaaaccaacttgggttctagttctcagttccactgcctttacctgtgtaacctagagaagttatttgttttctgggtatatctggtagaatgggcataaggatggaacctatgccatagggttgctggggaccaagcgaagtaggtttcaggtgttgagcacactgcctagcatctataggccaattgtgaaggaagccccagtaacctatgttcatcgggttacagatgacagccctgaacatgtgacagcagcagggagtaggcttaagattcagagcaggcctgagtcttggaaaagtgagtctcagaaattaagcagttgggctacctggcaaaaagaccagtgctggggctctgcactccaccccacagctcctctggaaggtcttcccacactttcagagaggtgctggtcggggctagtcagaaaggggttgctgtcactcaggtaggctacatgttatgtgtgagcagtagactggatgatttaagaccccagacaaacagcaggtgtgtagaagagacgttcccaagattctcctaacacatggtaattagagaagtggtggcatatgaacaggagcataatgatgcttcattctatcataatgtaattttatttttatttatttatttatttatttatttatttattttgttgagacagagtcttgctctgtaacccaggctggagtacagtggcacgatctcggctcactgcaacctctgcctcccaggttcaagcgattctcctgcctcagcctccctagtagctgggattataggcactcactagcacacctagctaattttttcatttttagtagagacggggtttcatcatgttggccaggctggtctcaaactcctgacctcaagtgatccacctgccttggcctcccaaagtgctaggattatagtggccagtagttttaaatgacattaggttactcctaaagatttattcagaacaaaattgtgggaggccctagtaggtctattaattatttagccaagggagcaataggatggcccctagggtttaaacaaattcaagctgctcttgattcatcatcaaggaggggagaggataccatagctaacttgaacatcagtttgtcaagctgggtggggtggtgcacacctgtaataccagcttcttgggaggctgaggtggaggattgtgtgagcccaggagattgagtccagcctgggcaacatagcgagaccccatctcctaaaataaattagtctgtcgaggtagaatccctttggatgacagagtggcaatggagcccttcatgatgtcaataaacttcatggagacacctcagtttcacttctacagatgcagttactggaatattctatgagaaaatgtagtctgttctcaggcaagcaggtattagaagagaaaacctcctggaataagaactctacccttgctacctgctcttgaacatccacttcaccactcagattgcaggtgtagaagacaggaaattgggatgcctccaaaactagtagggagtgaggatggcatttttgaaactgaatttcctacttgaggcagtttgagtggtttccaactgcctcattctatgtggaggttttggtatatgctgctgggaaggtagttttctggagccctttagcgtcaatattcaagttgcagggaagggtgggagtggagagaaatctatccttccaccacaccaatttgtagtaggaccaaggagggtgaaatggaaaagctctgtccaacccgaaaatctccatatctaggcagagactttatttttatttatttatttatttttgttattattatactttaagttttagggtatatgtgcacaatgtgctggttagttacatatgtatacatgtgacatcctggtgcgctgcacccactaactcgtcatctagcattaggtatatctcccagtgctatccctccccccwccccccaccccacaacagtccccagagtgtgatgttccccttcttgtgtccctgtgttctcattgttcaattcccacctatgagtgagaatatgcggtgcttggttttttgttcttgtgatagtttactgagaatgatgatttccaatttcatccatgtccctacaaaggacatgaactcatcattttttatggctgcatagtattccttggtctatatgtgccacattttcttaatccagtctatcattgttggacatttgggttggttccaagtctttgctattgtgaatagtgccgcaatcaacatacgtgtgcatgtgtctttatagcagcatgatttatagtcctttgggtatatacccagtaatgggatggctgggtccaatggtatttctagttctagatccctgaggaatcgccacactgacttccacaatggttgaactagattacagtcccaccaacagtgtaaaagtgttcctattgctccacatcctctccagcacctgttgtttcctgactttttaatgattgccattctaactggtgtgagatgatatctcattgtggttttg

SEQ ID NO: 94381 - DNA, 25896 bp, Homo sapiens
  misc_feature (1)...(25896): n = A,T,C or G
ggagtttgattccagcctgagcaatatagtgaaaccttgtctctacaaagaattttttttcttttttttcagagacagggtctcgctctgttatctagactggagtgcagtagtgtgatcatagctccctgtaacctcaaaacatttttttttttgagacagagtttcactctttttgcccaggctggagtgcagtggtgtgatctcagctcactgcaagctacacctcccaggttcaagcgattctcctgcctcaccctcccaagtagctgggattaaaagtgcctgccaccacgcccggctaattttttgtatttttagtagagacgggggttcaccatgttggccaggatgatctcaatctcttgacctcatgatccacccgccttggcctcccaaagtgctgggattacaggcatgagccgccacacccggcctcaaaacatgttttttttttaattatacaggaggcgcacacctgtaataccagctattttggaggttgaggtggaaagatgacttgagcccaggaggttgaggctgcagtgcgctatgattgcgccaatgcactccagcctcggcgacagagcaagaccccgtcacaacaacaaaaaatgagaaaatggacatttatggcaaactacttctgccccgagatttcctgtgggttctgcgtgattggctctcagggtgtgggcagctaaggttccaaagtgtactgtttaatcctagcacagcacaaatggcttgcaggagataaggcagaatctcatcagcacatcagggtaagcacccagctatcatgggctagacccatggagaagaagccgtgctctgggaacccccctcctccttcactagaggcaatgaaatgaagcagtagctcctgctctgaccttactgctcccagagtccttgtgggtactagttccagtctcagactaacagccagaagatctgccattgaagtttcagttccaaaactaatgcgatgactttgggtaagtcataaaacctcaagggtcagtttcttcatctgttaaataaaatcgacatctgccctgccagcctcacagggttgttttaagaaggagatggaataacagaaatgaaggagggaggccggctgctaccacagggcagggactatcacccactgtggcctccaacctgatggtgcctcagagtcagctggggctgcccaaacacaaaccgccgggctccacccccagggattcccatgctgaggtccgggttgaggcccagaatttccatgtctaatgagtgcccaggtggtgcttttgctgctgatccaaggaccacactttgaaaaccatgacttaggtttaggaggacgggctctggaggcaggtttgagtcctggctgtaccacttcctgtctacatgtctgaggacaagtgacttaatctttacatttcagctttctcagctatagacaatataatattgagagtgcaaattagttcaaccattgcggaaagcagcatagtgattctgcaaagaacttaaaacagaactaccatgcaacccagcaatcccatgactgggtatatacccagaggaatctaaatcgttctaccataaagacacatgcaggtgtatgttcaccacaacactattcatgatagcaaagatgtggaatcaacataaatgcccatccacagtagacttgacaaagcaaatgtggtacatttacatcgtggaataccatgaagccataaaaaaggaacgagatcatgtcctttgcagcactatggatagaggtggaggcaagctaaggcagaaacagaaaaccaaacaccgcgtgttctcacttataagtgggagctccacagcgagaacacagggatattaggaggggaacggtgggcaacggggcctacctaagggtggaggatgggaggagggagaagatccgaaaaaatacccatcgggtactaggcttattcctcagtgatgaaattatctgtacacccatcccccatgacatgagtttactcatgaaacaaacctgcacatggaccctcaaacctaaaataaaagttaacaaaaaattttcctgaccaacctcttcaggaagaggggcaatcctcgtgtcacaagcaatgccaataaagaacaggaacgccacctttttcaactcctgagagatgaatccaacgtctgaccctgcattgcatgcactctcgcccacgtcggctctcatccccacactcctcgttcctgtcaccggcctatgctgtaaacaccctagcagtcacaatcagtcacttatctgtcttatgggtctattatttcattctctgtcctgcaaccgaagctctgcgttgtcttacccatgtttagaacagctccgttcaatgatgagagtcacacaagccatctaaacttttctggtggtcacattagaaaagtaaaacagcaagaaatagttttattattattattaagatggagtctcactctgtcacccaggctggagtgcagtgggacaatctcggctcactgtaacctacacctcccgggttcaaacgattctcctgcctcagcctcccaagtagttgggattacaggcactcaccaccacacccggctgatttttgtatttttagtagaaatggggtttcaccatgttggccaggctcatctcgaactccagacctcaggtgatccacccgcctcagcctcccaaagtgctggggttacaggcatgagccactgtgcctagccactaattttaaatgtatttctttaacccaatatattcaaaatattatcagttcaacctgtaatcaatatacaaaattaacaatgtgttttaatttttttggcagtaatgaatgccatgttggcttttattatttttttttttctaattttaagttccaggatacaagtgcagaacatgtaggtgctatatagataaacatgtgtcatggtggtttgctgcacccatcaacctgttgtctaggttttaagccctgcgtgcattagctatttgtcctactgctctgcctcccctcgacccccacccctcttaaaattctttttatttttcacactgagtcttcaaagtctggtgtgtatcatacagcacatctcaatagccacatgcaggcagggcgcggtggctcacgcctctaatcccaacactttgggaggtcgaggtgggcattggacgatgcaggtctggacaagtgcctggtatattgtgggcacaattcttgaatggaccctgagaaataagcagaaatggttttgttattcctaatttacagagtataatagataatggcaatagtgacttttatttgagtttatgtcatgtgtcaggaataggctatgcatacatttattatttcatctaaaatctcatcctcaaaacgaaagccttttgcagtgggaattatcactcccatttttttttttcagtagagaaaattaagtttcaaaggagctaagtgactgagaccacatatacactcatcttctgatttctgatccagtgtttgctcaggataagaaatgtcctatatttctatgagccagagattaagataaaaaaagattttcaggagtaaccagtcaatgaaaagtcaaaataaatagttttggcagccrggcgtggtggctcatgcctgtaattccaacactttgggaggccgaggtgggcaaatcacttgaggtcaggagttcaagaccagcctcaccaacatggtgaaaacttgtctctaaaaatacaaaaatcagctgggcgtggtggcgcatgcctgtaatcccagctactcgggaggctgaggcaggagaatcgcttgaacccaggaggcagaggttgcagtgagccaagatcatgccactgcactctagcctgggcgttggagtaggacccggaaaaaaaagaaaagaaaataaagaaagaagaaaaggaaagaaaagaaagaaacaagaaaagaaagaaagaaaggagaaagaaaagagaacaaaggaagaaaagacgaaagaaggaaagaggaaggaaggaaggaaggaaggaaggaaggaaggaaggaagaaagaaggaagagagagggttttggcactgtggaaagtcatgtggatgatcctgcaagcgtcctcaggtaattccaacctaggacttctcagggaagatgagtccttgtgatacaggaccagccagtgggcacagaaaagcaagcccttggtaggtcaaccctcagatatgctgacgaggtgggggcagctgtnnnnnnnnnnnnnnnnnnnnnnnnnnnnnnnnnnnnnnnnnnnnnnnnnnnnnnnnnnnnnnnnnnnnnnnnnnnnnnnnnnnnnnnnnnnnnnnnnnnnnnnnnnnnnnnnnnnnnnnnnnnnnnnnnnnnnnnnnnnnnnnnnnnnnnnnnnnnnnnnnnnnnnnnnnnnnnnnnnnnnnnnnnnnnnnnnnnnnnnnnnnnnnnnnnnnnnnnnnnnnnnnnnnnnnnnnnnnnnnnnnnnnnnnnnnnnnnnnnnnnnnnnnnnnnnnnnnnnnnnnnnnnnnnnnnnnctaatgcctgtaatcctagcactttgggaggctgaggcaggcggatcacttgaggtcaggagttcgcaaccagccgggccaacatggtgaaactctgtttctactaaaaatacataaaaattagccaggcgtgatggcgggcgcctgtaatcccagctacttgggaggctgaggcaggagaaatgcttgaacccgggaggtggaggttgcagtgagccccaatcgtgcatcgtgccactgcactccagcctgggcgacacagcaagactctgtttaaaaaaaaaaaaaaaaaaaaaaaaagatgttcttcgatttcacagaggaacacaacttaccacgccaatgtacgcgtcgcttttgcctgggccgttccttcttcctagaatgtcctgcttctttctctttgtctaactcatgtgaatgaactttttaaaaaattagtatccttcaaaactgtatttgctcaggcgttctgatgtgaggccctcctgactctccaggtgcgggtgcttctctgctctgtgtctctcacctccaacagcttgttctgcctgcgcactatttgctgatgtgttatctccggggattctcgaatttctcaccttcatccccaaggcctgacaaaatacatggcaggtgtgcaaaaggcttgttagaagaccttaagaaaattaaagaaaagtggtttaaaaataattcgaataacaatgtttgccaatggagactttttttttttttttgagacggaatcacgctctgtcgcccagatgcaacctccacctctcgagttcgagcgcctctcctgcttcagcctcctgagtagctgggattacaggcgcaggcgaccacgcccggctaatttttgtatttttagtagagacagggtttcatcatattggccaggatggtctcgatctcctgacctggtgatccacccgccttggcctcccaaagtgctgagattacaggcgtaagccaccacgcccctccaacccatgaagacttttaaaattacttgatttgcttacagagcaaaaggtcaaatggggagaattctaaaagttaccttctcaactcagttttctcccgggtcgtggtgcttgaggcactggatatcccctggttaaacacccacgtgcagtggagcagggaggggacgcgccccttcgggggtgggcgcccaaggcaaggggaggaatgcggcttccacggcctcccctctcgccctcctttgtgcttattctaattcatgaattctaacatctttctgcccactaaaaaatgtgcattcattcatctggccacagcccttactgtagatccgcatccctggagctctcgaggagccgcggttaccgcacgtgggtgccgggcgccagggggttcaagggcttcccgcggtgacccgagcacgccggggcgtggcccccgaactgcggcctgggggcggggagagaaggggcccaacatggtccatctcgaccttcctctgccgggcccagggcttcagccccgctcccataggccccgccccatcccagacctcgcccgccttcgggatctcagccctggctccgcttcttcaagtaccgacaggaagttgacgagttcgggctcgtcaggggccgarctccgggctccgccctacgacaccgcccctccctaggccccggcccycrtcaggactccgcccagacgtgcgtcatcttcccgcgccggtgacggaagtgcggtgttgagcgccggcgkctcgcgcccacgctgggccgggagtcgaaatgcttcccggtgccgggagtgagcgatgagctggyttctgttcctggcccacagagtcgccttggccgccttgccctgccgccgcggctctcgcgggttcgggatgttctatgccgtgaggaggggccgcaagaccggggtctttctgacctggtgagtggcccgcccgccgaggcgcctccctgccggcatcggggtcgagggaggccggagcccggctaaccccggcggcgggagcctggcggtccgagtctgtgccgcgcgctgtggctgtgggtggtcgggggaccgcctcgttttcctgctcggccggcggggttccaggaggctcatggcctgggactggaacgcaccgaagacttgtttgaaatatcagaaacgtcgcgtaaaggttaggggtggcctaayaaaccctgtgtttaatcctccatctttgttgcagttaaagtgcaacaaaaagtgacacgtaatcagaacgaacccccgttaccagaagactttccgtaccagctaaattgggattggaactcagtacctaatcttcccttttaaaaaaggcaaattctaataagccagtatttgcagttggatccttgtaacaacccttggaggtgagagggattattctcactttcaggtatagttcttggggtcaggaagttcccagggcatgtaactgacagagaaaggacttgagcccagctgttctgactgtaccaccagaactcttcccactacaagataccaaagttcgttacctgtgtttccccatgcacggcagctacagtattgaggaagaagcatctcagaagttgacctttttgttgtaaagaaatggttaatatttttttcaaagaccgcagtattttgttatgctttgagtttgacgaaagccttatggtgctggtgtgctggctggctggcatacagtagaacacaggtgtagagtctgacgtgcaggataaaactataaggtgcgactctgcccttttcacgcaaaaattggtcctctatatccagtttgcatcctcagtttcagctaaccatagatcaaaaatatttggaaaaaattaaaatagaatacagttttaaaatacgcataaaaagacaatacaactatatagattgtattaggtattataaactagagatgatttaaagcatgcaagaagatgtgtgtgggttatttgcaaatacrccattttatgcaaaggacttaagcatcctctgatgttggtatctgtgatggggtggaggacttcctggaatcagtctccctcagataccaagggacaactgtatttccaaccttaagaatctcaataaaaaaggggataagttagagaaggaagaaggaaataacattgcacatcttttccaggaatgagtgcagagcacaggtggaccggtttcctgctgccagatttaagaagtttgccacagaggatgaggcctgggcctttgtcaggaaatctgcaagcccggaagtttcagaaggtagtcacctctcatatcagtgtgacattttaacctattcaaaggctttcatatgccagatggcatttgatctatatagctascctctaggcatgtagggaacctcgtgtgattgttttcattttacaaattagggaacagactgaaagcagttacaaatagtggttcatattacttacagtattagggataagccaggactcagctctcctgttccattcagccttttatgccataattccttgtctttttttaaaaaaatacttgtccagcctggccaacatgatgaaactccatctctactaaaatacaaaaattagctgggcatggtggcgcacacctgtaatcccagctactcgggaggctgagggggagaattgcttgagccnnnnnnnnnnnnnnnnnnnnnnnnnnnnnnnnnnnnnnnnnnnnnnnnnnnnnnnnnnnnnnnnnnnnnnnnnnnnnnnnnnnnnnnnnnnnnnnnnnnnnnnnnnnnnnnnnnnnnnnnnnnnnnnnnnnnnnnnnnnnnnnnnnnnnnnnnnnnnnnnnnnnnnnnnnnnnnnnnnnnnnnnnnnnnnnnnnnnnnnnnnnnnnnnnnnnnnnnnnnnnnnnnnnnnnnnnnnnnnnnnnnnnnnnnnnnnnnnnnnnnnnnnnnnnnnnnnnnnnnnnnnnnnnnnnnnnnnnnnnnnnnnnnnnnnnnnnnnnnnnnnnnnnnnnnnnnnnnnnnnnnnnnnnnnnnnnnnnnnnnnnnnnnnnnnnnnnnnnnnnnnnnnnnnnnnnnnnnnnnnnnnnnnnnnnnnnnnnnnnnnnnnnnnnnnnnnnnnnnnnnnnnnnnnnnnnnnnnnnnnnnnnnnnnnnnnnnnnnnnnnnnnnnnnnnnnnnnnnnnnnnnnnnnnnnnnnnnnnnnnnnnnnnnnnnnnnnnnnnnnnnnnnnnnnnnnnnnnnnnnnnnnnnnnnnnnnnnnnnnnnnnnnnnnnnnnnnnnnnnnnnnnnnnnnnnnnnnnnnnnnnnnnnnnnnnnnnnnnnnnnnnnnnnnnnnnnnnnnnnnnnnnnnnnnnnnnnnnnnnnnnnnnnnnnnnnnnnnnnnnnnnnnnnnnnnnnnnnnnnnnnnnnnnnnnnnnnnnnnnnnnnnnnnnnnnnnnnnnnnnnnnnnnnnnnnnnnnnnnnnnnnnnnnnnnnnnnnnnnnnnnnnnnnnnnnnnnnnnnnnnnnnnnnnnnnnnnnnnnnnnnnnnnnnnnnnnnnnnnnnnnnnnnnnnnnnnnnnnnnnnnnnnnnnnnnnnnnnnnnnnnnnnnnnnnnnnnnnnnnnnnnnnnnnnnnnnnnnnnnnnnnnnnnnnnnnnnnnnnnnnnnnnnnnnnnnnnnnnnnnnnnnnnnnnnnnnnnnnnnnnnnnnnnnnnnnnnnnnnnnnnnnnnnnnnnnnnnnnnnnnnnnnnnnnnnnnnnnnnnnnnnnnnnnnnnnnnnnnnnnnnnnnnnnnnnnnnnnnnnnnnnnnnnnnnnnnnnnnnnnnnnnnnnnnnnnnnnnnnnnnnnnnnnnnnnnnnnnnnnnnnnnnnnnnnnnnnnnnnnnnnnnnnnnnnnnnnnnnnnnnnnnnnnnnnnnnnnnnnnnnnnnnnnnnnnnnnnnnnnnnnnnnnnnnnnnnnnnnnnnnnnnnnnnnnnnnnnnnnnnnnnnnnnnnnnnnnnnnnnnnnnnnnnnnnnnnnnnnnnnnnnnnnnnnnnnnnnnnnnnnnnnnnnnnnnnnnnnnnnnnnnnnnnnnnnnnnnnnnnnnnnnnnnnnnnnnnnnnnnnnnnnnnnnnnnnnnnnnnnnnnnnnnnnnnnnnnnnnnnnnnnnnnnnnnnnnnnnnnnnnnnnnnnnnnnnnnnnnnnnnnnnnnnnnnnnnnnnnnnnnnnnnnnnnnnnnnnnnnnnnnnnnnnnnnnnnnnnnnnnnnnnnnnnnnnnnnnnnnnnnnnnnnnnnnnnnnnnnnnnnnnnnnnnnnnnnnnnnnnnnnnnnnnnnnnnnnnnnnnnnnnnnnnnnnnnnnnnnnnnnnnnnnnnnnnnnnnnnnnnnnnnnnnnnnnnnnnnnnnnnnnnnnnnnnnnnnnnnnnnnnnnnnnnnnnnnnnnnnnnnnnnnnnnnnnnnnnnnnnnnnnnnnnnnnnnnnnnnnnnnnnnnnnnnnnnnnnnnnnnnnnnnnnnnnnnnnnnnnnnnnnnnnnnnnnnnnnnnnnnnnnnnnnnnnnnnnnnnnnnnnnnnnnnnnnnnnnnnnnnnnnnnnnnnnnnnnnnnnnnnnnnnnnnnnnnnnnnnnnnnnnnnnnnnnnnnnnnnnnnnnnnnnnnnnnnnnnnnnnnnnnnnnnnnnnnnnnnnnnnnnnnnnnnnnnnnnnnnnnnnnnnnnnnnnnnnnnnnnnnnnnnnnnnnnnnnnnnnnnnnnnnnnnnnnnnnnnnnnnnnnnnnnnnnnnnnnnnnnnnnnnnnnnnnnnnnnnnnnnnnnnnnnnnnnnnnnnnnnnnnnnnnnnnnnnnnnnnnnnnnnnnnnnnnnnnnnnnnnnnnnnnnnnnnnnnnnnnnnnnnnnnnnnnnnnnnnnnnnnnnnnnnnnnnnnnnnnnnnnnnnnnnnnnnnnnnnnnnnnnnnnnnnnnnnnnnnnnnnnnnnnnnnnnnnnnnnnnnnnnnnnnnnnnnnnnnnnnnnnnnnnnnnnnnnnnnnnnnnnnnnnnnnnnnnnnnnnnnnnnnnnnnnnnnnnnnnnnnnnnnnnnnnnnnnnnnnnnnnnnnnnnnnnnnnnnnnnnnnnnnnnnnnnnnnnnnnnnnnnnnnnnnnnnnnnnnnnnnnnnnnnnnnnnnnnnnnnnnnnnnnnnnnnnnnnnnnnnnnnnnnnnnnnnnnnnnnnnnnnnnnnnnnnnnnnnnnnnnnnnnnnnnnnnnnnnnnnnnnnnnnnnnnnnnnnnnnnnnnnnnnnnnnnnnnnnnnnnnnnnnnnnnnnnnnnnnnnnnnnnnnnnnnnnnnnnnnnnnnnnnnnnnnnnnnnnnnnnnnnnnnnnnnnnnnnnnnnnnnnnnnnnnnnnnnnnnnnnnnnnnnnnnnnnnnnnnnnnnnnnnnnnnnnnnnnnnnnnnnnnnnnnnnnnnnnnnnnnnnnnnnnnnnnnnnnnnnnnnnnnnnnnnnnnnnnnnnnnnnnnnnnnnnnnnnnnnnnnnnnnnnnnnnnnnnnnnnnnnnnnnnnnnnnnnnnnnnnnnnnnnnnnnnnnnnnnnnnnnnnnnnnnnnnnnnnnnnnnnnnnnnnnnnnnnnnnnnnnnnnnnnnnnnnnnnnnnnnnnnnnnnnnnnnnnnnnnnnnnnnnnnnnnnnnnnnnnnnnnnnnnnnnnnnnnnnnnnnnnnnnnnnnnnnnnnnnnnnnnnnnnnnnnnnnnnnnnnnnnnnnnnnnnnnnnnnnnnnnnnnnnnnnnnnnnnnnnnnnnnnnnnnnnnnnnnnnnnnnnnnnnnnnnnnnnnnnnnnnnnnnnnnnnnnnnnnnnnnnnnnnnnnnnnnnnnnnnnnnnnnnnnnnnnnnnnnnnnnnnnnnnnnnnnnnnnnnnnnnnnnnnnnnnnnnnnnnnnnnnnnnnnnnnnnnnnnnnnnnnnnnnnnnnnnnnnnnnnnnnnnnnnnnnnnnnnnnnnnnnnnnnnnnnnnnnnnnnnnnnnnnnnnnnnnnnnnnnnnnnnnnnnnnnnnnnnnnnnnnnnnnnnnnnnnnnnnnnnnnnnnnnnnnnnnnnnnnnnnnnnnnnnnnnnnnnnnnnnnnnnnnnnnnnnnnnnnnnnnnnnnnnnnnnnnnnnnnnnnnnnnnnnnnnnnnnnnnnnnnnnnnnnnnnnnnnnnnnnnnnnnnnnnnnnnnnnnnnnnnnnnnnnnnnnnnnnnnnnnnnnnnnnnnnnnnnnnnnnnnnnnnnnnnnnnnnnnnnnnnnnnnnnnnnnnnnnnnnnnnnnnnnnnnnnnnnnnnnnnnnnnnnnnnnnnnnnnnnnnnnnnnnnnnnnnnnnnnnnnnnnnnnnnnnnnnnnnnnnnnnnnnnnnnnnnnnnnnnnnnnnnnnnnnnnnnnnnnnnnnnnnnnnnnnnnnnnnnnnnnnnnnnnnnnnnnnnnnnnnnnnnnnnnnnnnnnnnnnnnnnnnnnnnnnnnnnnnnnnnnnnnnnnnnnnnnnnnnnnnnnnnnnnnnnnnnnnnnnnnnnnnnnnnnnnnnnnnnnnnnnnnnnnnnnnnnnnnnnnnnnnnnnnnnnnnnnnnnnnnnnnnnnnnnnnnnnnnnnnnnnnnnnnnnnnnnnnnnnnnnnnnnnnnnnnnnnnnnnnnnnnnnnnnnnnnnnnnnnnnnnnnnnnnnnnnnnnnnnnnnnnnnnnnnnnnnnnnnnnnnnnnnnnnnnnnnnnnnnnnnnnnnnnnnnnnnnnnnnnnnnnnnnnnnnnnnnnnnnnnnnnnnnnnnnnnnnnnnnnnnnnnnnnnnnnnnnnnnnnnnnnnnnnnnnnnnnnnnnnnnnnnnnnnnnnnnnnnnnnnnnnnnnnnnnnnnnnnnnnnnnnnnnnnnnnnnnnnnnnnnnnnnnnnnnnnnnnnnnnnnnnnnnnnnnnnnnnnnnnnnnnnnnnnnnnnnnnnnnnnnnnnnnnnnnnnnnnnnnnnnnnnnnnnnnnnnnnnnnnnnnnnnnnnnntggaggtggtgtggagggggtggagatggcgtggagggggtggagatggcgtggagggggtcattccctcgtttccctcgttgtagggccacatagagagggtgtttttaagtctgatttaatgatactaaataatttactgaatgtcttcattctctagcatttcgtgttatgttcattgtttccagctcacgagtggactcttgtctttcagggcatgaaaatcaacatggacaagaatcggaggcgaaagccagcaagcgactccgtgagccactggatggagatggacatgaaagcgcagagccgtatgcaaagcacatgaagccgagcgtggagccggcgcctccagttagcagagacacgttttcctacatgggtacatcttccttgggttttcagattttaatacmacagtcaggaaaatgttatgtgtaaaaggtgtttcccacttgatggggggagtttgagctggtgtttatcatcttcattcttatgtgtaaagattatttagaaatcactaaggccattatttataatcaagtagtgcagaattaaacttttggatgttcttaggaaaacccttacatgtaaatgaacaactgtaatcttttgaaatactagtattccctgtgcatgcagtacttaaygttaagatgaaatgcgaagactccagctttttcaaataacacctcacacgcagctgcttgttataattgattagcaccagcattttaacctttcatattcaatctttggaaaacaagagattctattttatcctgagaagcaaggtagtagtgaacttttctgctacctttcactccaggaatcagttatgtatttagtgactcacagaatagaattctcctttgtgtcttttacacatatgagcagaaagtagaaataagcattaaaaaatataaatcagtatatttataggttctaatttaattcaagggaaaccagtagaaaatgttttgccaagctgtattatttatagatatgttttgcagttacgtaaaaaaagatcaaacaagtattctttatttggtgatttactagtaggaattgaagcaaagatttgtggagttgcagggagatgagccgtttccagacactgaccattgctggaggcttggtggcctggaacatggcggatagcaggtgctggctcctgagacagttcagtggctgggtgggaagcttgtagtcatgctgatacagttaagttccagctgaacggaggagccctgcccaacacccacactccccttggctctcagcccygctcctgtgaggagcacatccccatctttgccccttcgccactgctgagctcagtctgccgtccttcggacaagtacttccacttcctgcgcgtaccacctctatttgccctctcgcccagctcttttaacactgtgcaacctgacctctgatcccaccacactactgaagtgtcctggtcaccagtggcctgagaatgcccccgtcagtccttttttaccttgttctttacagcctttgtgtgtcaatcataccctctatctagagggaaagaagcaaagacgggaaccacacttaactagcagcaaatatgccagggaagaaattagaccagcactggtcaggagactgggccctctggcaggcagggtcaccrtcatgctgaggcgctgctcgtctctggaggatggctccctgggagtgaaggtgaccctgccgtggagacagcgccattgtcctctgaacccacagtgtgggatgtgaacagtagtttttactgcagcaggctctagttttacaaggtgattgccttcaccccgaacttgcctggcctgcaagatcaaaatgtaagtggattccaagcataaatgttaggtgcccccttgtaaggaatggagcatgttttcctagagagaaaacgtctgcagcgttgtaaaataccctctcggtttaaaatgctaagtcgacctagtggatttttgaggtgaatttcagtttttagtaaggtcagcccagcagcatgtacttccttttcccacaggagacttcgtcgtcgtctacactgatggctgctgctccagtaatgggcgtagaaggccgcgagcrggaatcggcgtttactgggggccrggccatcctttgtaagttaaacgaagctgagttttactgaatcatgttccacaacttgtgaaaagatgaggcgggatctgctcattgtttgattattgggaaaacctgcagataagtagctctggcaggggtggcagaggagcagctttggttcgtgttggggctaagcggcattgcttttcagaacgtgaggtacctcagctttacttcctttgctttttttttttttttttttttttttaagacacggtctcacactgttgcccaggatggagtacagtggcacaaacacagctcactgcagacttcaccttctgggctcaagcgatcctcccaccttggcctcccaaactgttgggattatgggtgtgagccactgcacctggctttggtgtttctttcttgccctggggaggagtctttttttttttttttcctgagacggagtctcactctatcgcccaggctagagtgcagtggcgcgatctcggctcactgcaagctccacttcccaggttcacgccattctccttcctmaccctcccgagtagctgggactacaggcacctgccaccaggcccagctaattttttgtatttttagtagagacggggtttcaccgtgttagccaggatggtctcgatcttctgacctcgtgatccgcccacctcggcctcccaagaggagtccttttttcagtagagatgaagtctcactatgttgcccaggytgggctcaaatttctgggctcatgcgatcctcccaccttgtcctcccaaagtgccgagatcacaggtgtgagccaccacccctggcccaaaaattgctcattcttttaggaaactctggatctcctggtgaccccaaattttaaataacttgtctaagggtttttctggttccttgatttcattttcctcttttacttcctggaggtttttagtagtttcaatctgaagtctcactctctccattcttcttcccgagttttctcctgggattctttctgctgcagccatagggcctaacccagggtccgcagagaaccagcttttacttcctttgccctagtggaacccatgagagtcagaaggtgcccaagtgtggaaacctgtgtgctgctctctgctgggagtctgttagtttgatttttatatgatgcttttatatttcaaataagaatacacactagtttatcgttatccattaagaagaatcactttgagaattcactttatacttttattttcttttgtactgttttgaaacagaaatgtaggcattagacttcctgggcggcagacaaaccaaagagcggaaattcatgtaagttatcagatacgtttaagcctctcttttttgagcattgagtatgaaattatcaaataaactaattctttttttttctacctatacatataagatatttgaagagagacgggtttaataacaattttgaaaaataggaattttgtagaaaaattctaaaaacttatttcaaatagatgtctacacaggagaattgtatgtatagtagtgtttcatacagagaatataatcagtacagaggggatgtttcaatttcgaagtacttttgaactttagtaatgtcagagttgaacattttctgtagcatgactatcgacttgtcttttcaaggcagcctgcaaagccattgaacaagcaaagactcaaaacatcaataaactggttctgtatacagacagtatgtttacgataaatggtaagctttcacrtttgatttcttctgtttttccagtaactgtgaagggaaattggtaggaggtgttgtaacagggcaggacccaaatgggaacggggggatgacattggtttgtcaggtaccgagcaaagagtgaggattttggagtctcccttctgctgctctgatgttttccacatgcttatttctttgccaggcactggagatgcagtcagaagtggaagtggctcttacttctagtctgtgtgtgtataagtcacttaagatggcgtgttgactgcttctttgggaaatgccctgaataggagcatgtaggggatgcttacgaggctggggaaggctcctgggagaaatgacatcttaagctgacagctgtaggtagaatacaagttaggkgaaagggaagagaggagggtatttcaggctgtgccaaaggccaaagcaactaaggccagctaaggaagtgaagagtcaaggatggtgactcagaatacaagtgggatcaattataagaggtaagactaaggaggtgaaaaaggcaggacactcaagattgactcaccagtgatcgtgcatttttgtaggtataactaactgggttcaaggttggaagaaaaatgggtggaagacaagtgcagggaaagaggtgatcaacaaagaggactttgtggcactggagaggcttacccaggggatggacattcagtgggtgagtatcttaaatgttcatgtcctatggccattatgaccaaataagctaagtttactagagattaatggtttatgtaagtggtttaatgacataacaatttccatgatattaatatcataatgtatattacaacgtatttgaggctgggcgtagtggctcacgcctataatcccagcactttgggaggctgaggtgggtggatcacgaggtcaggagttcaagaccagcctggccagtatggtgaaaccccatctttattaaaaaatacaaaaattagccgggcatggtggtgtgtgcctgtagtcccagctactcaggaggctgaggcaggagaatcacttgaacccaggaggcggaagttgcagtgagctgagatcgcgccactgcactccagcttgagcaacgatatgagactccaagaccccgtctcaaaaaaaaaaaaaaaatatgtgagcctgggctcagtggttcacatctgtaacccagcactttaggaggcccaaatggcctgactacttaagccaagaagttcgagaccagcctggataacatggggagactctgtttctcgaaaaaataaaaaattagccaggggtagtggcacatgcctgtagtctagttactcaggacactgaggtgggagaatgacttgagctggggaggtcgaggttgcagtgagccaagattgtaccactgtactctagcctgggcgacagagtgagaccctgtctcagaaaaacaaaacaaacccacccacatacacaaatttgattattttccttatcatacaagtaatacagttttttggtttggtttttgagacaggtctcactctgtcaccccaggctatggcgtgatctcattgcaacctctgccttctgggttcaagtgattctcgtgcctcagcctcccaagtatctgggattacaggcatatgccaccacgcctggctaatttttgtatttttagtagcgatggagttttgtcatgttacccaggctggtcttgaactcttgatctcaaacattccacctgccttggcctctcaaagtgctgggattacatttgttttgtgtcacttcctatatgtttttgttttatgacaaaaaggtttacaactaaatcaataatcatgtcaaacttttttttattgttttgagatggagtctcgcactgttgcccaggctggagtgcagtggcgcaatctcggctcgctgcaaccacaagtaatacaattctagtgagagtgtcactaggcatagaatacacaggcagtgtggtttgagggatgttctacaatccttatattttgttaagaacacgaagtaacacccaacctgggcacatggcattactatgacagctgtatgtcaccctgttcatttctttggaatgcatcataatgttaaataaaactatcagtgtattttgtttcaaacaatagtaaggttgtatgattaaagccttggtaatagaacttttattccaagatggaagcactttttaaaatcatagatcatgtttattaaaaagtttttttcaagcaatagagaacaaattacactgcagccactgtctcaaccctgccttgttctgccttcctggaaccactgataatagtttggtagcctgatgtgtaaatttgctttggcaacataaatgtaaacagtggttaaataagtacattatttctgacagcactgcaagggaagcgtgtgtgtgtgttgcatacatatccgtccacccatctgtacatacatgtgttttgcctggaaagcttatcaagtcccattgataagtggggaggaaatagcaacatgaacggtaaaatccaatttgtgaaaaaacaaaatggaatgttcgtaaatcacatccattgcgtaaacgcatgaagaatggacagcgtgctgttgaggatcatgtctggggagaggagcgttgaagttgagcttatgctgtgcagtctgttctgaatggttttttatgatgacaatatagtcatgtgttgcttatgtaaagatgagtaaaaataaaaggaaaacatttatcttaacagatgcatgttcctggtcattcgggatttataggcaatgaagaagctgacagattagccagagaaggagctaaacaatcggaagactgagccatgtgactttagtccttgggagaacttgagccagcggctgtcttgctgcctgtacttactggtgtggaaaatagcctgcaggtaggaccattgcagtgatgggcagatgcgtctttcacacggaatcaggcacagtggccttctgtgacatgtgtttataaaaaatggttaagtatataataaattgaacatctttgagattggagaattatgtgagatttccacattatgtttactgggttcaatactgtccttgcttgttttattgcaggcaagcaaggcaaatggcctaaaatgctgtggcttatattttgataagaaatcaaaaaaccattggttaaaagatgcaactcagaagtctggaagtattctgaaagcatccatttaccgtccagttgacaggtttgagtctcctgcttgtataggtgacttgtgcccatgggtacattaaaggaacatgctgcccagggcctgggcggacagctcagtgggcaggatgtgtgctgggtctcagccccatgtgcctgcttgctgggcagttagtatagggcaaagcctgcctgcggcgaccctggctgctaggccattctctaggaacagctgcgactcataaagaccaagaagcataaataaactttcaaaaatttatttggctctttcgttaaaaactgtgcaaattaaaaaaaaaaaaaaaaaagtaagacaccggctgggcacagtggctcacttctgtaatcctagcactttgggaggccaaggcgggcagatcacttgaggtcaggagtttgagaccagcttggccaacatgacgaaaccctgtctctactaaaattacaaaaattatccaggtgtggtggcacgggcttgtagtcccagctacttgggaggctgaggcacaagaatcacttgaacccaggcggcagaggttgcagtgagccaagattgcaccactgcactccatcctgggcaacagagtgagactctgtctcaaaaaaaaaaaaaagtagtaaaagtttgacatgattatttatttagttttaaacctttttattataaaaacatacaggaagtgacacaaaacaaatgtatagcttattgaatgattatgattgtaaggtgaataacctttgtgtccaccacctggtgaagaaatagtactttgccagataccccaggaggctctcccaagtgcccctccagccacagccctcttcttctccccctccttgccccaacaagtaatcctgacttttacagaaatgactttcttggttttttgatggcagtttagtcttgtctgcttttttttgtttatttttttatctacttcagtgtccatttgcagtcccgtcggcctcactgttttccctgccgtttatctgttgaagagcctgggctgtttgtcccatggcttcccacagtgtagattttgctgaccacgtggtcatggtgtagttcagcatggtcctctatgtttcctgcacattggcagctgggtccagaggcttgatgagcctcaaatttgatccctttggcaggagaacaggcggttaggagctttcctcaggaaagtaccatgttgacggcagctgatgctcagtgccaagatccattaattatttggggttgcaaaatggtggtattctcattctgtcgttttgcttgcctttattagctggaatggttttctaagaaagtgttttcttttttatacttatctggttacccagtggtacagttcatataggaagggcaggataaatgcttgattctttgctcttgtacactaagtttttaagataatgcattagttgtctgtcaaggaaggtgagtggtgaagggtttttacatatatacaagaattcatgggctgggcatggtgtcttatgcctgtaatcccagcactttgggaggctgaggctggaggatcacatgaacccaggagtttgagactagtctgggcaacatagtgacaccctgtctctacagaaaattaaaataaaatcaggtgggtgtggtagtgcctgcctgttgtcccagctattctggaggctgagatgggaggatcgcttgggcccaggaggtcgaggatgcgtgagctgtgaccatgccaccacattccagcctgggcgacagcaagtccttgtcttaaaaaaaaaaaagaatttgtggagttaagcatacttggtgggtttcaatccgttgtgatttttatctttatttagctcagactagcttattcggtcagtgagagggagcctcttcagcttggctcttgctttcttttgataagtgtgcacatgtgtgcatacatgtgtgcacagaccacacgcacagtcattgatagctccctgcagcctggcatgtcaagatgctctaggcccaatttatagagcttctgctccaaacctgtcttaaaagaaaaactttagacaagttagcagtttaattgagcagaaaatagtttcttcagctgggtagcactcaggaccaaaagtggttcagaacgttctcctgtgcgttgtgtgcaggctgtatttatttatagccacaggaagggaaagacacatgtacatggccagactgactgcaggtcagcctccacctcacataggcatgttttgggagccttcagcatgtgattggtgagactctgctgcttgttacagaagtgtactctcaagtcaggtcccagtttgcttatacattaagtgaggttataagtcactatgtacagaggcagttttaggccaaacttaattccgtttaacacttggaatccattatttttcccagagtctctggtagagatggtatttcagatccagtttaggatgctcattgctattgcgttggtcattatttctagatttttggacggagctttaaaaaaatacaaacattgcacacacatatttaaaggaagaatattttctgagcctatattgatattcccaatacaaattcagggtcctggggcctttacatagcctcctctatatgatgtctgtgtctcctgcactcggaatcctgcttctcaagacacaggacaatggcatggaatatccatcccttaatcactcacttgttttattcctctttagcatttagcatttaaaaaaaatactaataccatagcattaattgtgatgatgaaaacagcactgtgtctacgttgtcagaaaaattgctcctttttaccaccattgactcatttctgtgtgttcaggtctcataaccagtctatagtcagtgtcatcttggggacagtattccttgagtttctgatgttgaattcagttttgctggatacgaaattcttggcccagattttctttgagtatcttgttttattctgttttcttccagcataaagtgatgcatgaaaagcctgatgaatcttgttttcttcccctgacagtcatacgctgtttttccttagatgcccaaaggattttttcctttttctgtcaagtcggccgttttattcgaatgtgtcatgtgttggtattggttgtcctggtccatatttgcaagcgtatggtgtgctctttctatgtgtacttcatatctgttattttaannnnnnnnnnnnnnnnnnnnnnnnnnnnnnnnnnnnnnnnnnnnnnnnnnnnnnnnnnnnnnnnnnnnnnnnnnnnnnnnnnnnnnnnnnnnnnnnnnnnnnnnnnnnnnnnnnnnnnnnnnnnnnnnnnnnnnnnnnnnnnnnnnnnnnnnnnnnnnnnnnnnnnnnnnnnnnnnnnnnnnnnnnnnnnnnnnnnnnnnnnnnnnnnnnnnnnnnnnnnnnnnnnnnnnnnnnnnnnnnnnnnnnnnnnnnnnnnnnnnnnnnnnnnnnnnnnnnnnnnnnnnnnnnnnnnnnnnnnnnnnnnnnnnnnnnnnnntctttctttgtttctttttgagttttaaaagttgttattgtaccacttttgttttgttttgttatttaaaataggaacagtgtctcactgtgttgcccaggctggtcttaaactcctggcctcaagcgatcctccttccttggcctcccaaagtgctgggattacaggtgtgagccaccaaagccggccccaccttgctttttaaaacagctctgttgaggtgtaactgacaggtaatgaactgcacatacgtgaagtgaccgatgcatttgcctgtgaagctgtcgccagaacatgtccatcaccaccaacagcagtttcacaccccggtctaaaccgtccctcgtgtcctccatgttcaggcaaccactggtctgctccctctcactaaaggttaatttatatattctagaattttatctgagtggaatcgcagagcaagtactgtggggggaggtgcttctactcagcataattattttggcattcacccattttgtgtacatcaataatccacattttgtattgcatggatataccacagtttatttatttacctgttgaccgatatttcgattatttccaatttctaaataaaaataaagcaaataaagctgccgtgaacatttatatcctcgtctttgtcttctgtttctcttgggtaaatgccttggaatggaatgcttggtcatatggcaggtgtgtgctctttttttctttttttttttttggagatggagcctcannnnnnnnnnnnnnnnnnnnnnnnnnnnnnnnnnnnnnnnnnnnnnnnnnnnnnnnnnnnnnnnnnnnnnnnnnnnnnnnnnnnnnnnnnnnnnnnnnnnnnnnnnnnnnnnnnnnnnccgagtagctgggactacaggtgcccgccactacacccggctaatttttttgtatttttagtagaggtggggtttcactgtgttagtcaggatggtctcaatctcctgacctcgtgatccgcatgcctcggcctcccaaagtgctgggattacagtgtgagcccagccagctggtgtgtgctttttaagaaactgtgaaacttttccaagtgtgaactttacactttacattccctccagtcaggcaggagagttccagttcactccacatccttgtcaacacttgtcacctcattctgttacaaatgtccataagttttttggttttgctgtttagtagttctgtttttaggtggggatttgagaagattcaaaaagcatgctcctgctgctgcctctgtcttctgagaatctgtgatttaaaaaaaaaaaaattgaaccagaattggaaatagatgaaaagttgtgcctttagaaactttacggtctgtgggattttcacaacacagatgatgttggctgggcgcagtggctcacgcctgtagtcccagcactttgggaagctgaagcaagtggatcacgaggtcaggcgttcaagaccaggctgaccaagatggtaaaaccccatctctactaaaaatacaaaaattacccaggcgcggtggcaggtgcctgtaatcccagctactcgggaggctgaggcaggagaattgcttgaacccaggcggcagaggttgcagtgagccaagattgtgccactgcactccagcctgggcaatagagtgagactctgtctcaaaacaaaaaacaaaagtgatgtcagtacagcagaaagtgcatgaagccggagggaaggaaaggtccaaccacttttaaagaggaatcttaaatttttagggggcaattttttttttattaaaagaaaatatattactgagaatcaaaaaatcagctgcattttttatatctttagaaacttaacaatgatatataattgcatcttcatcagctccaaatcaaaatatttgagtgactgtcatatcagattgtgctacatattgtggaatatataagctttcaactggtgctgctttaataggatgttcgtgccgcacaaatagaggccgttgaagaaatgttctttgtgcagaactcccctcctggtgtctgccggtactggagcgtcacggtgtcaccccattgctgaagcctgaaggtagccactctgccatcttgtaggacaggcacaaaagtgcacgaagccggaggtcaaacaaaacgagaaagaaaaagccctcctggctggtggacagcttgggtaactgtaaataggaaccaatgaaagctgcactcctgatttcaggtgatgttcatttcaagttgagcaagtctgggccacagatgctgtggctgaaaaggagggcctcggggtagatttctggtctttttcctaattctaatattctagtagttctggagcaagaaggaataggtcactcaactaaagccccttttttaataacgtgatgagctgacattcagaactcaggatgtcatcagaacaaaacacgtagcaatgatcgtggtggtcgtggttcctcagttcgtaaacactcaggggtaacatggggagggccggctgcatctgcctgcattgtgtctcctggcacacagaaggcgttgactatgctggccagctcgttcaagcagctttggttcttaattgcccattgagagacaggaattggcacaaggtgactctgatattgtgttgacataagtatttgtcaaagaacaactttcatcaaaatacgcccccaaattaagattctttggtgatacgggaagccgccagtatatggtggtagggttttggacaaagacaaatatgaatgaagtgggaaacagggcaagtggaccgctgtc

SEQ ID NO: 94382 - DNA, 113080 bp, Homo sapiens
  misc_feature (1)...(113080): n = A,T,C or G
accatgcctggctaattcttgtacttttagtagagaagggatttcaccatgttggccaggctggtctcaaactgttggcctcaagtgatccacccgcctcagcctcccaaagtgttgggattacaggtgtgagccacagcacccagcctagctttaattcttatttaggtaagttctgattaatgcaactaaaaaagaaaaattagggccaagggcagtggctcaaacctgtaatcccaggctgatgcaggaggattacttaaagacaggagtttgagactagcctgggcaaaatagtgagacctcatctccccagaaagatttttaaaatgagctgggctgcagtgagctatgattgtaccactgcactccagcctgggtgacagagtgagaccccatctctaaaaaacaaaaacaaaagaaagctcaacggaggaactggcttcataaaaagaatatcagggaaaggtagtaagggtatttcttactgtttttggttttttgttttttgtttttttttttttgaaatagagtcttactctgtcacccgggctggaattcagtggcgtgatcttggctccacctccagggttcaaacaattctcctgcctcagcctcacgagtagctggaccacaggcgtgcaccatcacaccagctaatttttgtatttttagtagagacagggtttcgccatgtgagccaggctagtctcaaactcccgacctcaggtgatccacccgccttggcctcccaagtgctgggattacaggcgtgagccaccacacctggccttactggcttacttctttggattcacctaataaataaaaattaaatttgggggcatgggtgagaggattctttcctatgttctcagctcctccaccagtaggggctcagtaaagccctgtgttgtggaaaatgacaggtagggaaccaaaaggtgattaaagatctggctcttagagtaattcttttgttccctgaaggtgattgtttgacttatgtttcttgtcctcattattattctttctaatactcgaattttatttgttaagggagaaaaaaggcttaaaacaaagcctcattatcctcatctggataatgwtggcattgtgagactatgcaatttcttgctttgtttggcttaaagaacctctatatgtgcgtgaaataaatgccaatttaacgttttagatttctgctacaaggctggggcagctggaatcatccagcagttcctcctttatgctggtttgtggccattctcgttccaagagaagacaaacttgcatttcaaaattaaactctgaaatttaaaaataaaagcaggaaaaaaaaaaaaaccaaaactttcctaggccagaaggaatgatttaaattttcggagagctccttggcgtttcaagggtagtgataaaccattggaatttactttgatgtttcagctctagcacagcaccccctcagcctccccaggcctcctcctccatcccctgtgtctgactgggtagttactgctctggggcctggaacccttccagtctcattcccctgtttgtgtatctgaatatctctatgtctttagatcttcttcatgctgcctctgttgtcctgtctccctctcccaaagtctgtttgtctgtcttgttgccccccyggccccgtgctttttaaatttggctcctgctttgtggcactgtcttgaatacacaggtttgactgctggttgacatttatttatttgtttgtttgtttattttgagatggagtcttgctctgttacccaggctggagtgcaatggcaagctctcagttcactgcagcctctgcctcccgggtgcaagcgattctacggcctcagcctctggagtagctgggattacaggcctgtgccaccacacccggccaaatttttttttctttttttctttttttctttttttctttttttactgagacggcgtctcgctctgtcacacaggctggagtgcagtggcccgatctcggctcaccacaacctccgccacccgggttcaagtgattctcatgcctcagcctcccgagtagctgggactacaggcggttgccaccacacccagctaattttttgtatttttagtagagatagggtttcgccatgttggtcaggctggtctcaaactcctgacctcaggtgatccacctgcctcggccccccaaagtgctgggattacaggcctgagccaccgcacccggcctatttttttttctttcttttttttagatggagttttgctcttgttgcctaggctggagtgcaatggcgtgatctcggctcaccacaacctctgtctcccgagttaaagtgattctcctgcctcagcctcctgagtagctgggattacaggcatgcgccaccatggctggctaattttgtatttttagtagagacggggtttctccatgttggtcaggctggtctcgaactcaggtgatccgcccgccttggcctcccaaagtgctgggattataggcatgcaccaccatgcctggcctattttttctttctgagacagggtctccctctgtcacccaggctggagtgcattggagcaatctgggttcactgcaacctctgcctcctgggtttaagtgatgctttcaccccagcttcctgaatagctggcactacaggcacttgctaccatactcagctaatttttaaaatttttttgcagagacaaggactcattatattgcccaggctgatctcaaactcctgggctttgtgatcctcccaccttgacctcctaaagtgctgggattataggcatgaactactgcacctggcctcactttttttttttaatggctaactagacttcacaatgtgttccccacactagggttgtcactgagaagtataaggagcaaaaaaaggtgaaaagagaaggatgaggaggaaacttaatattatacaaagctcctgggaatactggagagcccctttcccgggggcacttcgaggaggaacaggttgccgctgcagaggaaggaacatctgggttccatgacttggcaacaggctctccttgagggtcactcaccgtcacaggctctctctgcactggagatccggccttctggaggctggcagggaggacgtgctgaagcaggaagggctcagctttgcaccaggcagatgtcctttggaatcctggctctgctgcttacagcagtgtgacttcgcaggcaaatcgtttaacctctctaaatccagatagcctcatttgtaagaaatgagcaatgctacctcctgtgtggagtagcaaggattaaatgatgtgttgtaaaacaccaaatagacccgggctcataataggagttcagacagtgcgattttcctccctcctcctttcatggtggtctttaacttgtatttattctgaagtttgttaaggctgttgggaactcagaacacatttactcataaaaaccagtagccctgggctttgtgaggtctgacccccaacccctgcctaactcaccatccccattctcttcccatcaccctcattcagggacttgactttcaagacatggtgggttcttctgctgtcttccaaatacccccttgggttccccacccataagcttttgctccttcaccccagaatctcagacctttgcttagaactgtccatcaaatcaatatccaggtgaaatccaaattctagctcctccatctcccagtgttatgcagaactgctttctttctcgtctgaattcttattctactttatctgaccgagtagtaatatgagctttataataaaaatcacaacatattgccttttgtggctgttactgtggggagtgtcacatattcttatatccctcacactgttcaataaccactttctgtgggataaataataatagctgcatttgttgcatgcacactatgccaggcaatgtgctatggcctttatctacctttcttcatttaatttccacgacaaggttaaaagaatgtatatgaccccagtattctgggtggagctaagggtcagatggagtaagtcactttctcaaggtcaagtcggcagaaactgaaggagcaaggattccaacccagcaatgcgggactcccagctctgtgctctttctacttcccaggaaacggagcctaagttagcaacaacaaaccgaagtcgaggactgaggacatatgcaacccccggtttgggtgcaacctttatcaatatcctaaactgacagatgacgtagaggcagccgtttcgctgactagggaaggtagcccaagaaagctaagatgctagaatccaaatttaaggtctacgagacgctgcagaaaacatttacagtcactagagggctctctctcccttaagcaaaaagcgcagcaccgcccgcgcgcggtagtctcggaaccccgccgccgggaggccgctggcagctccacgccacctccctgaagcccagtccattttgcctacatccctgtccgggcaagccctggagaatccatagggcagtgccccaagctggagcagttttcacagccacatcccgggctgcactgggttagggatgctttgaggttcctctgggggctccctgctctctgcttaccaagcaggcgggagttgggaaggggagaaggagtgcagactcaggggtggggtaatccagaaatgcatccctcaaaggccagcctggcctggtccaggccctaagctctctggggaaggacggcagggaaccccgccttggcgggctctgcgggtcctgcgcccgggtagattttgctgagatggggagaggggaccccctccacgcccccggagtagtgaacaccattttgtttgaaagtatcctgcaaagagaaccacctcacgaggccatggctgccaggggactcctctccccaccggatcgccggggagcccggggagggagggattctgcagctgcagcttggaggtccttgatgctgcattttaacgcgcatcgcaacgcctttggagtgacattaagtgcaaagaggcaaatgactaatccaaactattattacaactgcagaaaataacacagatcaatggcaaaggcttgaaccgggattagctagggaggtgggacaaaccggggatgatccttcctctccttttttagatttgtttattttggtaaattatgtatgtatttaaacatgaagaaacaggtgaagcgaatgtaaattgggttataaataatttccaaaggcttcgctgtcccttgacagaagccagaaataagacaggcactgggcctgagcgctctggacagggaagcacccgcgtggcgctgggcaaaatcttctcagtggagagaacgcactccgggttcgagacctccccgggtgcagatgcgaactgcggtggccccaagtggccgtccactttgttcatgagaacagttttcctataacgcccacccggccctttgcatcccgcaatcccgcgggcgtcggagcgggtcttggcgcgaaccaggcggcctcggcggggtcctgcggcggagggcagcgcggccgcagcccgggagaggcggccgcggcattgtttcagcccctggggtgggatccagctgggggaggggaggcggggtgtcctccggaaccgcccccggccctccctggggacccgtgcctcagcgcgtccaggctttgtggtgtcctgagtcgccatggaaacccgagggaacgcggagccgggtgctaggggggtcggtgagttctccggccgcgccctccgtccgctctcggaccccggccctgcagcagggcctgccgggagttgtagtccccaggcggcggcggcgcgcggcgccaaggatgcgggacgccgcctgtccccgcctccccttaacctgctagctgaggtggggagcggcgggaggagccggccgcgcggtgattggcggaggccgctcccagcccccgacacgcgcccctcccccgctccccactctggactcccgcgctgggcgcgctgaggcggcccccgagcgagcgcgcgtgcagccgccgccgccccgagcacccgcagctccggcgccgcggcgagacggagacggaccgagccacgggcccccgcggccgcagcatctcggaggagtgggtgatggcaggggggtcggtgggcttacccctcccgggctaggacatcctcctctcccccttctgtttctgcgtgaggcgcacaaaagggcggggagccgggtgagcctggggcccggccgcaggggacgcggcgggaggtgtggtttggggttgggaggtggccatcggggctaagccggggcgctcttggggtcctctttgtacgcccgcgaagcgccgtgccgggccttgctcatagtaagcgtttaatgcgtgctcgcggggttgcaaagccctggggtgaggaggcggctcggccgaggggtttcgcgcctagcacgcagtgggccgctttcctagccgggcgcggtgcagtggaccgctggagggctgggcgggggcgcctctggccgggggccagtcctgccggtcccaggatctgcgctgtccccggtcccacacaccacccagatacacaccctccgtccttctcgcctccgagctgggatctgcccagcctggacccgacccggcggtctgttccaccgcccggctaacggagcggacgcctgcagaggactcgcccgccgcctccgagcctcccgcctgagccacaaaggcctcctgcggctgcccagcccggagcgggcgccgagccgggtccctcggctggagcccagcgcgggagcccgccttgcagcatcgatctcagcgggcaccgacgtcgacgccccgggcctggggacggggctgtagtctgagctggagagaagccgggagagggcgaggggaggcctcggttgagaaaagatggggatggggaaggctggggagctgggttaggacaggtagtgggtctcggggagcagggagtgggaactagggtttgaggaggaaagagaaggggcgggggcgggtccgaagaacgagggaaggagctcggtgcaggtggcgcccggcgaggctggttctgctgaagaatggggaggggaggagggatgcaggcgggtggaggccgcctgggtttgaggagggaggacgggagcgaggagaagacccgcgctgtgcgggggaggggggcctcctgggaaggggagcctcycgaggagggaggggcaagcagctgagaggcggtctcgggcccgaggatcctcagctccaggcgcggggccccgcggcccaggtggccggctgggcgtggccctcggaccggggttagggacccaggatggcagatccgggaccgggctgggctggcttggtgaggagctttgtctccaggcttgaaaccagccggtagcgactcgcttagggttttgtgatcttccgcggcgcccacggcacgcccttttctcgaggagctgaaaggctttgcccagcagcaggtgctgccagggaggcggatctcccttcggggagacccggagaacaatagccgaccctggtgtccatccgacgacaaaccagggccacccaggacgcgagggtgcagttttctggtgctgggaatactccctgcggaacctccgggcacgtgctggctttggggttttatgggggcctggccacgccgggaatcccgtgtgggaggcgctcccccggcctgggggcctgcagacagccacccccccactccggctcgggtgccttctggtgcagcgccgccgcccgccccgcgctgtccacccgctgccgagacgcggcgtggttagcggcgcggagctgccgggcggcgacgcaggtgccaaagactggaggtcgcctcggtgcagcgcgggttcccccgagcagcggctttgtctgccgaggcggccgtagtctaggggctgcagctgtgctttctcagggggagccgtaagggctggtgcggattgtggtcaaattgcggagaagcgggtggaaatgatcccgcaagggtgaggctctaggtttgggagccgctgctaggggtccagtgcttttctttgccagtgaccacacccaagccagtgcgtctcttgcagacttcgcccatattgtctgctgacctaagactggggtagctctgtgataggcgctgcttgcccgtgggaaagcagatgaaccgaatggaagcttaaaacaggctttcagcagggctttccacgcactcagcctctcgcccgccgtctaaacaccttgcaagtcaccgctgcagcgccttgacatgtgaagtgacacccaaagccagaattctgtgttgcactgttgctttgataactggttagatgacaagttaaaggtgaatctttagcataaagttatcattttaaattgccattcattaaaaaaaaaggcaggaatgtttttgttcccagactgggcgatacttggcattgtagaactcattgatgccacttacatttgccactaagttaactgagaacctgttggttctcttaacccagccttgaaatctcaggatttgctttcttaacaagattagtgtgtaaggtgaaggactgtgctgtggctgttggcttttgcccaggacagatgatagctgtcaaagtgaaggcytcttgtctgagtgtcctttctggccatagggagtcagcagtaggctatgtcttgctggttttaaaggatggtgttttgaggaggtgcctcacagaatttacaaaactgatctggaaggactagctggaacattgctcattggttgtttttaactatattttaactgaattatatatatgtatatattaatatgtatatacacacatayatatatacacatactatattttactaaattatatatgcatgtgtgtatttatgcatacacacaaacatggattcagagtacataaatactaggaatctcaatattagaaacctagaaatctgacagtgaaggttttttcttgtaagagagctccaatgggaaacatgttttcatattattacccaaagggaacaatttcaggaaggagtgttttgttggcttcttttttgtaataattttatggatttttaaaaggatgtaatcttcttaaagcactctgtgaacatccattgcagtctgttcctcatggcagggaatccatagacaaggaatgccggtatgaccagcctgtttttacagggatcttggagagaaagcagcctccctctcccaccttctgctggtgatgctccagtaaaacacctggaagacagaactcagaaaggggagaggcaggtggccccagagaaggactttgtgtccccagaattccggggtgccattcttgagcttggggacctaggctaggtacacaaagatgttcatgggacgtgaaggcctggctgttgtcagcgtaacctctctaggtgcaaacattagcagggttgttgcattattcttaatgcttctatctctggaaagagttccacagcaaggcaagtttacacagttggccaaaatcaggtctcaggacttggcgtaaacttcatttgtggcacttccacgtctcttctcctgccatagctatctgagaatttccccttaatagcttctctgacccaggattctgtatgatcctgcattagctccacgggactataagccaaaggacagcatractataggcaggtctctggggtaaaagtaaattgtggccaggcacagtggatcacgcctgtaatcccaacactttgggaggctgagacaggaggatcacttgaggtcaggagttcgagaccagcctggccaacatggtgaaactccatctctactaaaaatacaaaaaaattagcctgacgtggtggcgcacacctgtagtcccagctacttgggaggaggctgaggtggagaatcrcttgaacctgggaggccgaggttgcagtgagctgagatcgtgccactgcactccagcctgggcaacagagtgagactctatctcaaaaaaaaaaatgtgaattgtgtgttcagatcattttcttggggcatagaaaaatattgagagccagagaagttggacaagagtatctgagacccagtctatcttcctggtgtgaaaatttaccagtttctgatagaatctgatyttgtgtatcttttttgttttctgaggtataaaaacatattccagaaaagtcttctaagacttaattcacaggaatcctgtagaacaagatatctttgtcaacatgaagtcctgtagggaaaacttggtgtaatatgggagcaaataagaataaatgtgttttatcatttttccaataagcaggtgtttgatttcattgcactgctggtgcataaatgagaaataatttcaaaatcgctttgccttgcttttttttatgtgaagatgaaaggttgaaataccataacatgaatcttttgtgagctttggtatttatgtataaaagtgggcacaaattatacacttgaacaaaagaaattcagggaggaacatggtgtatgatttgttctacttcagtctttgaaacttgtttcatttaaaataagctgatttaaccattgattgaacccgagcttgccaagcactcccatcaatcacagccctgttctgtacttgttccctcgcctccctcctccctcgtcacaatccaggctcagcggtagcgtgyacaggagggagagccagaaagcctgggttcagatttcaccttggccactttctgtttatctgtgcaatgaggatggttgtattaggttggtgcagaagtaattgctgtttttgccattacttttaatgacaaaaactgccgtgacttctgcaccaacttaacagtatctacatctggggttgttctgaggcttacatgtgttaatggttagcactgagagcagcatctggcatcttgtaagtgctcagtaaaagttatcatcaccatcagcagcagcatcatattctccctctaaaatgtgtgtccacaaaaacaacactttgattccccatttaatctttcatcccaaggggccatggcaagttgctgtagggattaacagtgggaacacaaggaatgattaggactcctttctaaaactcccacccttgcaaatagtaggaatagctctctgtggagtctgtttcctggcagcctctttaagctcagctgtttttagcagctgagaacttggagaattaagagtgttccagaagtgctgtgacctcagctttgctgcatcattcctttgagtggggttaggctggcgtggctggtgaggagctgttgtcccaaggctatgtaattcttggtgtggggaagagtcatcatgtttggttgatggcaaattattgggaataaagaaaactcaggttttccagctaagaaatacagaattttgtgcaacttggaaccacagttatttatttcacaaacactttcaaagcactctgtgccaggggtggttctgattactatgcattaggttactgttattatcctcattttacaaatgaggcaacaaaagtaaaaaggacacccagatggggacatggcagagccaggccttgaactcaaggggtttgattaccatctgtatcagttctccaggataactggagttctccagaaaaacagaaaatcagttctccagaaaaacaaaaccaataggattggtttatgcaattggagaggctggcaagtcccatatctgtagggaaggctggcagacyggaaactaggcaggagctcatggtgcactctttacttagaatttcttctttctcagggaaaactcagtttttctcttaaggccttttaactaatcatatgaggcccacccacattatcaaggaaaaatctcctttccttaaagtcaaccacccagcctgggaaacatagggaaactccatctctacaaaagttaaaaaaaattagccaggtggggtggcacatgcctgtggtcccagctacttgagagggtgatgtcagaggattgcttgggccttggaggtcaaggctgcagtgagctgtgattacaccactgcacttcagcctgagcaacagagcaagactctctcaaaaattaaaaaaaaaataaagtcaactgattatagatgttaaccacatctacaaaataccttcacagcaacatttagatgaatcttttattggataatggtactatagcctagcaaagttgacacaaagaactaactaggccaggcacagtagctcacacctgtaatcccagcattttgggaggtcgaggcaggaagatcacttgaggtcaggagttcgagaccagcctggtcaatatggcgaaaccctgtctctactaaaaatacaaaaattagccaggcatggtggcatatacctgtagccccagctactcaggaggctgaagcacaagaatcacttgaactgggaaggtggaggttgcagtgagccaagatcacaccattgcactgtagcctgggtgacagagtaagactgtttcaaaaaaacaaaaaaccacaacaacaaaaaaagaaagaaaccctaaccataaaaggatccatgcctttaaacagtacctcaagctgagaaccttatgagttgggtgtgagattcacagttaactaaataatttagcaataggctatcccattacaaaatgctgcaccttaccttgtttaaaatagaatttggacctcttttctcgtccaggtggcttctagcccagaatattgctcagagtaaccattcaacagataatattgaaagaatgactgaatggttttaggtgatattttacaggattttccagctactgagacctctggctccccatttaaattttttttctttttctttttctttttcttttcctttctttttgagatggagtcttactctgtcgcccatgctggagttcagtggtgcgatctctgctcactgcaacctctgcctcccggttcaagcaattctcctgcctcagcttcccgagtagctggaattacaggcatgcaccaccacacccagctaatttttgtatttttagtagagacggggtttcaccatgttggccaggctggtctggaactcttggcctcaggtgatccgcccgcctcagcttcccaaagtgctgggatcacaggcgtgagccactgcgcctggcctcccttttaaattagaaatcatctggcccatgctgggcgcggtggctcatgcctgaaatcccagcactttgggagcctgaggcgggtgggtcataaagtcaggagttcgagaccagcctggtcaatatggtgaaaccccgtctctactaaaaatacaaaaatttagctgggcgtggtggcaggtgcctgtagtcccagctactcaggaggctgaggtagaagaatcgcttgaacccaggaggcagaggctgcagtgagcccagatcgcggcactgcactccagcctgggtgacagagccagactccatctcaaaaaaaaaatcatctggcccaagtaagattgagtttttgtgaatgactagattcttttggaaagaaaggagaacttctgcattctgaattgtgcacgtgtcactccctactacctaacatctgtccactttcattggtttggcaaaggggttgaggtctgttgctgcctggactccctgtgaatgtgtgtctcccacatgttagtagtgcccggtactcaatcacaccatctttgtgtcactccagtgtccatttctaagctgcccctttgttgatttcaaatccgccatgggctgactcgaaattctcacgccttgggtctttattctcccttcttttgtctggtcctgtccctccctttgtccttctgcagagcaagatccactattgatacagaagccgcctcctttctaattttttacttcggatttctgaccttgtagattgatatgtttgttctgttataaaattcaaaaacaacccccaattttttcatttaatatctttttgctcttgtttccagcatacgtgaaacactttcaaccttaatgaagttacttaaattgttttaagtttgccgtattgtcaagtggcaatacacatacatgaaacagtcacttttggggggtacagtggctgagggtgcattttaaaaaaaactagtaaagtataacagataaactgagaagtgtacaaaccataagtgtatagcttgatgagacatacccatgtaatctgcaccaaattaagaaacagaaaattggagtctctgagcctactatggctcagaagcctgcctgattcaaaatcttattatttaaaaaagggaaaaaaagaaagaaacagaattatcagtactcaaggagagtctctagttacttagtattcttcctccatatcctgactgcttatacacagatcaatcagctttgcctatttttgaatttttacaaatggaatcatgtagtggatattctctcaccaggggcttcttgtgctcaaggttatatttgcgagatttctcttactgttgtatctaatttgcttatttttttcattgctatatagcatcccattgtatgtatgtaccaaatgtgtcagttatgttgctaatggtatttggatagtttccggtttggggctttcatggacagtgctgctgtgaacattctagtaggtgtttctgttgggtatatatatacctaggagtgaaattactgggtcagggatacacacatgttctgttttagtaaattgtgccaaatgctaagattaatggagaaattaaaaaaaaaatcctctgaagtatacaatgcagctgtttaaaccaaaatcctaaagactggcacaatattatggctggatcagaggttgacttccaactcttattcttcagcaaaaagtagaactttaagctatatctctgactccacagtaatctatcagttaaaaaaattatatatattatatatacatatataatatatgtaataaatattatatatgtatatataatatatattatactagttttcaagaattgtccacaaataaccaattgattggctgaaatgaacacttttaaactaagcggtgtacgtctaccttagtcttgctactgcagttttcttaactcatgtttcttgaggaaaagatgaaaatcatattataaatgcaacattggtccagatatcattccagagatgtcctgacagccttgggcaagattaacaagtgctttttattgttaactaatttatatttcttgtattgggtcaaatagcaattttgaattgtgtgatttctgtggcttaaaaaaagtctcagccaggcgtggtggctcacgcctgtaatcccagcacttttcgggcacaaggtggacagatcacctgaggtcaggagttcgagaccagcctggccaacatatagcgaaaccccgtctctactaaaaaacacaaaacttagctgggcgtggtggtgcacaccagtagttccagctacttgggaagctgaggcaggagaatcgcttgaacccgggaggtggagtttgcagtgagccgagattgctccactgccctccagcctgggcgacagaacaagattctgtctcaaaaaaaaaaaagaaaaaaaatcccacaaaagtgtcagcttggaatcacagagttcagatttcttatttggccagacaggatattgatttctaataatggccagaattcttatttcttataataatttcagatttcctataatggccagacaggacactgccttttttaaatttagaaatagaattatgacatgtatcttattttctgtaggtttctggaaaaacttaaaatagatgtgatttttacagttggattataatggaaagaacctctgcaactaatgaaaaaagtaaagataaggcacaacaatatgagcactaaccttcagcctgtcgcatctcatgttcatggccagtatcgtcatgtggcccaggagagatggcagtgatgggcatggccagtgtgcataaaggacagtggttgaggcataattataggatggtggtaatgaaacacgagcagccagaggagcctgccaaggcagtcatgaactcctaacttggctggtttttgccttatgtgatccattcacagcccaaattgttcctgagaaagattttttttagcatgtggtctgccatgtttggtatttgtctttatacaaacaagtgaatgagatcagacttaacattttttttttttttttttttgagacggagtctctctctgtcacccaggctggagtgcagaggcgcgatctcggctcactgcaagctccgcctcctgggttcacaccattctcctgcctcagcctcctgagtagctgggactacaggcacgcgccaccaagcccggctaattttttgtagttttagtaaagacggagtttcaccgtgttagccaggatggtcttgatctcctgacctcgtgatctgcccgcctcggcctcccaaagtgctgggattacaggcgtgagccaccgcacccagcccagacttaacatttctttaaaacctcgacttactgcttaaactctgagtcccttaagcacttaaatatttcatatttcatatcttttataatataggatttaattttttttttttttggagacaaggtctcactctgtcacccaggctagagtgcagtggcatgattggggcagcctcgatttcccaggctcaagcaatcctctcacctcaccctcccaagtagctgggaccacaggtgcaggtggatgccaccacacccagctatttttttttttttttttccgtagagatagggtctccctatgttgcccaggctggtcttgaactgctggtctcaagcaatccccccgccttggcctcctacagtgctgggattacagacatccaccaccacacctggcctaattttgtactttaaaatatataaatctaatactccaatatttaatcaattataaaccacccatagacaattttgtttgcctagctaatgtaattttggctgattccattcaagcctttgtccatatgtttacataaatttttacagagttgttaccatggcatggaaattatttcatattctgttctttcatcaaaacttttccatgtctctatctaatttacaaattgaagcttttaaatggcagtcttcagttccgttggaatgtactagattccatttttttaattcattttgttttcatatgttattagattctatttatgcatttacttattgatgaacattaaggttatgttcaagtttttaattattttagatagtacaaccacaaaaatcctcattcgtatctttgtgaacatcacatatatcattttcatacctagctgataatatgtttttgagaatagagattgtgttttttttttttccaaatgtttttggcatagggggtacaattctatctatagtacctgatagttttcacattaagagaaatgtataaatacctgttaattcctttatttcaggaccaacttcacaaagtttcctgatcagcaaatactttctaatcagccttaattggcaagttggtcattgaagaatttgtgtgaaagtaggaataaaattgtgtgagctactcagtcattaacaggaataatttggaggacaaaagattccaagtgaagctgatttttatcaattaattctataaaattgtgctgtctcagtggcagatagcacctgatgttggccrttatgacagaaattaaatggtcttggtgttgcagagagatgattcggttatgagacgcacccattgctaagtttgagtatctggtaacagagtgcaaatagccagaaatggaaatgaatgttagtgctgcctggcaagggagagagaggtttactgtctgataactgtgcacttaacttgccttgggctgttgtttgagatgggcttgaacctcctctcagacctgcacctatttcctgagtgcctgcaacgggcagtgcgatttccaggaaggagctagtgcatgggagagaaatggggttggaatcctgactgttacttcctaggcacgagagatcttgggtaaagtcattttatctcctcaagcctcagtttccttgtgaactaaagggatgctaatatcgtcctcacaggcttctagaggactaaagtgaaaacgtgcactgagtctggtgggagtgtggtaagtgctaagtggagctaatggtattgtccagatgctaaattaggtgctttgtgacatataaatgtatataaaaacaatcaaagggacatgattgtcaaatggacacaggctggacaatatgacaattggagaatgtaaacttctccctcacataaggagaagtttagcacaacgcctctcccctcctgtgtctgtcaaatgagaagatgcagactggatgctgtcctgactgctttgatgtccygtgacagacaccctgtgttgctgctgagctgtcacaattcttcattggtgaaaactggcagatttgcagtttgacactatctatcaaaattaaaactgcacattccttttaacccagcagtaccactgctagcaatttttcctaaagatatacaagcacatgtgcttgatgaaaaataggaagggctgttattgcagcactatttgtactaggaaaaaaytagacatgacctatcattggagaatgaatggaatgcactatgacacgtccttacaaaggaataccatacagccattacaaagaataaggcaggtatttctgttctgatgtagaacaatctctaatatatatcattgaatgggaggaaaacaatgcagaacaatatttaatgcgtgccaccctttctgtaatacattatgtaatgtgaaatatatacttaaatatgcatagaccatccatggaaggaaacacaacaaaacctatgatgttgcttgtctctggaggggtcagggaggagctgggaaaactcacaatttacatggctttaaatgtttatcatgtctatgttttacctgtctaaacagtaataataatttgtcacccgtggctggctctggctcaccctgtcagagactcaacaagacttgaggagggtgaagttcttgggcccatgtggatggcttatgttcccaaacggacccccagatgcaggcctccgaaataagacacaagcatacagagttgggctttcaggcttactgaacagacagactgtgtttttttgactgcccattcaaacaagaaaggctctgagatcaggaagtaggtatgacccattattgctgactatcaaatagcttttccaatatttcccctttgagtcttttttattcagaggaaaacttggttggaactgtaggacacagaagatgagaagcactaactgggcattgtgaaccttcccacaggttcacaatgtgtgtgatgtgtgtgtctgctcatcccttcatcccttccttcaggcagcaagtgcttgatgaatacctgcactgggccaggtgtcatcataggatattgggtctaaaagaactttagagaacgtttagtcatttcacagaggaggaacccacagggcactttagctttcagtgagtggtatcggtgcagagagaatggtgatttttgccttctttggtctcggatgatgggttaggaagcctctggatgctcctatagaattggcttcctcatgtagagcattcatttcattttgccttgtgtttcaattacttgtggacatgttttctctctaaggacgtgaagacagattcatgccatcccccggccatgatctctaactcctggtgttcacactcttatgtaatcctctatctttgaatgtggcaggacctgtgacctgcttctaactaataggatacaacaggggtgatgggaatgtcctttcccttattatgttatataataccttatcttgctagcaaactccttttggagactctttttgcttgatgaagtaagtggctattttgggaaagcccacttggcaagaaattggtggcttctaggagctgagggtgtcctctagctgagagcctgcaaccatgtggaaatgaattctgccaacaatgtgactgagtgtggaaataagttctcccccaggcaggtctccagatgaaaacatagctcatccagcatcttgattgcagccttgtgaggctctaagcagaggacccagggctcctgacccacagagtgtgaggaaataagcttgtgttgttttaagccactaaatttgtgatcatttgttacacagcatagaaaactaatacagggctctcttgtggcacttggcgcaaggcccctcagcaagttggttatcaatgaatatgttgagctgaatttatttctctttcttttcgtgaatgtatctcacaataattgcctgaagtgctctcacttgggtggtcatataatttatatttcaaagcagagcactttggagagtgattattatttgctattaatgatctacttgggtctatagggataaactgggtctatgccaggcatactgggaggtatggtcccccaagctatgataatctcatcatttattgtccacgttttcctggctcattttgccccaggaagccattgcatgtttgttgattatttttcttctgggtctgcactcttccttccccctccccatccctacctgctccctggcttctgcctggatgttggcagagagccgctgtgtgcctgactgtgacaaggctggtggaagtcaccgggatgccaggcacatccagcctctgtgtggaggtccagcagagtggggcagctgtattgactaagttggtgggaagggaggctgggacggagctgtgcagaggaatttactagaagcagttgcaggagtkatcagcaccccattacatggccattttcaatgtgtacagcctattccagaagctgtttctgcctgcccctggtgtttttgttgggttttgttcaggtggaggggaggggacttgttgaggtgccctccccttggaatcccctttttggaatagaccctgtagcatctgacacatgcactctgagggcctctctccaacacagcgggaggagaggctccctttcccccaccacccacctccataattatcttcctcagaatccatatggggagcccagtcccttcccacatgtcaccagaatgtcccttcactttttcactgagccaaccacttgcattgcccctggcccaccccttcctccaatgttcagctgtgtggagccatactagccctggcactcttggccacagctctgacatgggccccaggccrttggcatcctccccctttaagctggctcagtttcagctgctgaccaggagtgtgggacagtcttgacctgccccccaggcatgtacctattttcttgacttgtggaccaggctggagtttccattcctttcctatcactgcttctcaaatcttgcccagaatggtaaaggaaaaggagctcatacccctgggagcttgtgggctgggcctgcagcaccctggtacaagttggaaatatctttgaagcctgcttgaacagctttattgagtattgagatacaactttcataccatagagttcacccatactaagtgtgcaatgcaatggtttctagtgtgttcacagagttgtgtagtcatcaccatagtctaaatttaccacatttttgccaccccaaaagaaactccatacgcattagcagtcactctctgtttcttccactaccatctcttccccaaccctccagcccctggcaaccactaatctacgtattgtctctagggattggctgattctaaacatttcatatacatagaatcgtacaatatgtggccttttgtgactgttgaagccacattttttaatcttaagaaaattaatgcactgtctgcactctagttcacagtatttccttttcgttttaatagatacaaggaatttcagaaattacatatagttagaccgggtgcagtggctcacacttgtaatcatagcactttgagaggccaaggtgggtggatcattagagcccaggagtttgagaccagcctggacaacatgacaaaaccctatctctttcaaaaaaatacaaaaattagccaagtgtagtggtgcgcgcctgtagtcccagctacttgggaagctaaggtggaaggatcacttgaggcctggaggcggaggtttcagtgggcccagatcgctccactgcactccagcctgggcaatgaatccagaccctgtctcataaaagaaaagaaattacacacagtttaaatgtttagccccacaagagtgctccaggaagaaagaagtgccttactcatgccacacccctggggccccagtctgaaaggggctatgcctcaacaatgctgacagcatccagatggctttccatccagagcaggtgcagatcccaaagtaggattatttgagtagatgatgggaaaggtggggaagatgattaacattctctaagcatctgccactagccaggcaccatctaagtaccacggaaaggaaaaggtggatggaggtgctggtcttgaagaagtctcagtcactttctgggtgtagattgtgcaactgtcagtaaagtgacagagaatgactaacgtgaaccatcctggccattaggatgcagcagagatcttcactgatgagtgttggactggatttgggaagaagacgctaggcagagggatgagtgtgaagctgcaggaagggccaggcacttggagagggacctacttggctggcctgtgagagcagggaggcttgggcagcaggggagagggggacagacgcccaaggtggccggggtcaactaagcacatccgaactcccctgtttccacctcttcctgactcttcgcctttggggtctatgtgctgaggggagtccaaggctgctggtctaaagaagggggcccaagagggtcagaaatgaggagaccttgtcttcatctacatccgttcacagaccccctcgttgccctgagcctccagaccaccctcagcaatttttctttcctaattaaaatcagtgacaatacaatgatgagttttgaaaatacatttagtgtttctgtatatttaaataagaaaactgtgtgcataaatgcaatgtgtttttttcctccttctgattttgtattaaaataacatctcttgttccttctttctttggaaacctttgttcacatccttcatgctccaaatagccaacaaatagcacagaaagcatggtctttcctcctaactgtagagtcctctgttctttgttaagatgtggagatagggttttgtgttcttttttttttttttttttttttttttaagacgaagtcttgctctgtcacccaggctggagtgcagtggcgcgatctcagctcactgcaacctccgcctcccaggttcaagcaattctcctgcctcagcctcccgagtagctgggattacaggcatgcaccaccacgcccagctaattttttgtgtagagacagggtttcaccatattgaccaggacggtcttgatctcctgacctcgtgatccttccgtcttggcctcccaaggtgctagtattacaagaatgagccaccacacctggcctgtgtccatttttaaatgcatggtgagcttgaagtcatcagagcccactttattgtataaacattttatcataataggtgtggcccattagaaagaccttatgggtgaagagagagtcaaaaggctggaaaagatagctcatggcttttttgtgtgtgctttaaactcctcagttgtaagcaatgaattgggacatttacagagacctatgccaagtatcaacacagatgtcaacacagatatctgtaacacacagcccttgccccccaccagcaattacagactaaaatctaacagatagagacctgcagttcttgaaggcaaggattctgtaacactcattttgaaccccaccatcagggacagtgaggggcacccggtgggtgtttgtctgcatggtgagtgaagtgacatatgagttggccagatgaaggataaatgccctgtgaacagcatagcccctaaatgagaattcagagtaaaggcaggaaagagaatgtctaggagttaagcctgggtttagagcttgcccttccacacttactaataatctgtgtgatatcaagcaaattacctaacgcttctgaaccccactggcctcattcactgcagtgttgctgtgaggataagaaakgaaatacataaaacatctagtcctgtgcatgacacataatagaggctcagtaaatttgactgggtgagtatagttttcccctgattttattaacaatacatattcactgtggaaaatgtaaatgatatcgtaaggaagaaaacaagacacctgaaatcccacaaccctaaaatagccaccattagcagtttggtgaccacctttcatgcatctcattatgcaaacacacacacacacacacacacacacaatgttcattgtaattgttattttttctttctttgttaaaaaatgaggcttagaagaattgtaatgttcccaatacaaagaaaagataaagtttgaggtgatggatatcccaattaccctgatttgatcattacacattatatacatacatcataatatcacatgaaccccccaaatatgtacaactatgatatatccataaaagtaataataaaataaacttaaaaattcttcttctttttttttttttttttgagacagagtctcactctgttgcccaggctggagtgcagtggcatgatctcggctcactgcaacctccgtctcccgggttcaagtgattctcctgcctcagcctcctcagtagctgagattacaggtgtgtgccaccacgcccagctaattcttttgtatttttagtagagacggggtttcaccatgttggccaggctggtctcgaactcctgacctcaaatgattcgcatgcctcggcctcccaaaatgctgggattacaggtgtgagccaccgagcctggactaaaaattaatgagactctttgtctcatcatctcctactaaacaccacccgttcacccttaggtaaccaacataaactggggtgtttccacccacagtttaccctatacacatcaatgtatataaatatatgtacataggtaaatatcttttgtccttgttcatcttaactaaatgggatccgatttaacgttatgtctgtgtgtgggtgtccagggtacatgcattggatttacattttggtaaaatacatcatctctgcaattttccttatcactaatcttggaagagactgtaggccaactgatataaatctttttaaaattgcataatatcccatggcatggataatgctacaatttagtctgccattctctattgatggacattcggtttgttcccaattgtttgtttttttttttgtttgttttttttttttttgagacggagtctcgctctgtcgcccaggctggagtgcrgtggcgggatctcggctcactgcaagctccgcctcccgggttcacgccattctcctgcctcagcctcccaagtagctgggactacaggcgcccgccactacgcccggctaattttttgtatttttagtagagacggggtttcaccgttttagccgggatggtctcgatctcctgacctcgtgatccgcccgcctcggcctcccaaagtgctgggattacaggcgtgagccaccgcgcccggcccccaattgtttgtttttgccctgccaacagtgctgcagtggacagcttggtgcctgtctcctcatgttctgttgtttttatttctatggagagagtcctaggggtgaggtgctgggtcagaggtccttttacaatgttaatagagccttttcagactttttcagaagggtgcaataattcacgtttccaccagccatgtatggattctcctcaccaccactcccaatttgcacccctcctcccacaagacctgccaatgacaaggtatcacgcttgaatttttgccatctgatggatgtaaagtgatacctcattgttacttcctgtatttgcatttccttgactactgcagaggctgaacatcatctcatatgttgttggttatttagctttgttcttctgtgtatcacttactgatgtcctatgcccatctttctcttggttgtttgtctttttccaatcaatatgttaagagctccttgctgtcatatgcgctgcacatgttttctcagactctttatcatttatctattgatttatttctatagtatctttcatttcttgataaaaatttaaacatttttatcaagtcggaattgtgtctttgtgtgtgtgtgtggcctctgagtttgcagactgagttaaaagcgatcccctactccttggtggtacgcagtctcccaggttgtcttctagtctttttattgttttatgttttacatttaaataaattccagatggattacagattttgatatatgctgtaaggtagggagccaatttaattttcttccagatgaataaccagttgtgcccacatcattcattgcataagtcattttccccactgaattgaaatatcacttctgttggatttaattgaaatctgctaccaagcactctattctgctctccttatctgttgataccatacagttttaactacggtgatttcatagagcatattgtaatatctactaaggaagcccttcatcttccccacactattcctttttataattttctcaactcctctcaattccattattatctatttcaaaagaaacacattgggtattcacttctatatactaatttggagaaaattgacattttacgatattatgtcttcctgtctaagcatatatttgtttcattctgcttggatcctattttttatactttgagaagttctttaggattctatgcctttcttggtttgttttttgagacagggtcttgctgtcttgcccaggccgaagtgtagtagcgcagtcacagctcactgcagcctcaacctcctgggctcaagcgatcctcctacctcagcctcckgagtagctgggactatgggtgcacgccaccatgcctagctaatttttgtattttttgaagagacagggtttcaccatgttgcccaggtggatttcgagctcctaggctcaagaaatccacccaccttggcctcccaaagtgatgtgattacaggcgtgagccactatgcatggccagcctttcttagttttctttcttttttgtttgtaaagctgtattgaggtgtaatttacatactataacattacttgctttaagtgtataatttgccgatgattagatttttacagttgtgtaaccatcatatagtctaattttagaaaatgtccatcaccccacacagacactttgaggccatttgcagacactccccattcccacccccagccctaggcagccactgctcaaaayagatcaaaatagagaaaatactctatatatagatattccctttctgcgtcattcttagtgttttattctttacaatgtttttcactgttgtgaatagaacattttttcctcctatttcttgctagctgtttgctataaaaaatactgattttgttatatttatcttataatccattatcttaccacttttcttaggttttcttattatacaactataacataatgtatcggccggacgcggtggctcacacctgtaatcccagcactttgggaggctgaggtgggcggatcacgaagtcaggagatcgagaccatcctggctaacacggtgaaatgccgtctctactaaaaatacaaaaaatcagccgggcgtggtcacaggcgcctgtagtcccagctacttgggaggctgaggtaggagaattgcttgaacctgggaggcggaggttgcagtgagctgagatcgcgccactgcactccagcctgggtgacagagcaagacttcgtctcaaaacaaacaaacaaaaacataatgtatcttctttttccatgtttattctgaggattaattttctatcttactgcgttttctggcaacttgtaaaattgtttaataatagaggtcaggggaggcatccatgttctgttcctaattataatgactgacttttgtgctttactcattagaatgatatttgctgttggtttttggtaacgtgtctttattacacttgagtcgttttgtcctgttccatggttcttagaatttttattgggaatggcatttcatcagatgtcttcaacttttatttattttgattggtttttctccgttgatttgtggatgtaaagaatgatgctgctaacttccatgatgaattgtccttggcttatggaataaacccagacaggtcaaactgtattatccttttggtacactgcaaattgtttacaactgtagtttgtgtcttttgtatctatgttcatgaggtttgtccaagggcttactattttagtactaccattattaggctttgatattagggttatattggttttataaaatgaattggccatgcacatggctgtaatcccagcactttgggaggctgaaggattgcttggagcccaggaggttgaggctgcagtgagctatgatccgccactgcactccagcctgagcgacatagtaagaaagactctgtctcaaaaaaaaaaaaaaaaaaattaaaatgagttcaggagcttgtcatcaaactgtcattttttgacaactcttgatggactggcagaggcagggaaagtcaaaacaacaaggttgagaggtagctatccttccattctgtttgtcttttaagcctgctgtgtagtagttaatagttaatacatttccttaattattggctagagctgctctacacattgacttaaccactagccacatgtctgtttaaattaaaatgaaataaaatttamaattcagttcctcagtcatacgaaccacctttcaggtgcccagtagccacatgtagctagtagctgccacgctaaacaacaaatcaggggtcagcagaccatgttcagtggagttcttgtacggcctggtgagctaagaatggttgtcaccattttaagagattactttaaaaaaaatgtgacagagcctgtgactgtggcccccagagcttaacctattcactctctggccttttacagaaaaaatctggtggtccctgattgagaacattgtctcctaacttgagttgcttacttatcccttcccatcatttttataatggaacaccatctgtatgactgtttacctaatatttttctttaaatagatttacttaaatttttgaaagaaacattatatcagcatcataaatagaaatatttacttacttttttaacttaaatttttgaaagaaagattacattattattattattattgtttgagatggagtcttgctctgtcgcccaggttggagtgcagtggtgccatcttggctcactgcagcctctgcctctcaggttcaagcagttctctgcctcagcctcccgagtagctgggattacagttgcgcaccaccacacccagctaatttttgtatttttagtagagacgggcttcaccatgttggctgggctggtcttgaactcctggcttcaagtgatccacccgcctcggccttccaaagtgctgggattacagatgtgagccaccacacccagccagaaacattacttaattttttgaaagaaacattatttcttacatttttacttgaagttttgaaatttacttaaatttattttacttaaatttttgaaagaaacattatatcaacatcgtaaatagaaacatttgccataaatagataactagaaaaataaatacaatgaaagccaacagtattattaaattccaattacaaactagaccttggtctttcctttgctaaaaagasagattagtaagtatgaagtattagaagatacacacccaccagctgagatattttccttgatgtaatcagacatgtagaaagagaactggaaagggaactgcctcctcactcataattcagtgtcatttaagtccgggcacgtgtacctcctgaaatcacttgtacacgtgttctaaactttggagcactgggctgaggagagaggagagcagggagcatgagtctggctcagatgatggctggagttgcgggtgcctaagtagggcaacagtagttagacaccttccttaccactgccagctaaaggatgcacaagacatcatttgaattctctttgttgtgaaggttagagcaccagatgtaaatttataattggactctgtcattccacagaacactccacagaagtgtcatcactaagtaaaaaagttaatgggccaggcgcggtggctcacgcctctaatcccagcactttgagaggccgaggtgggcggatcacgagggcaggagttcaagaacagcctgcccaacatggtgaaaccccgtctctactaaaaatacaaaattcagctgggtgtggtggtgcgtgcctgtaatcccagctactcaggaggctgaggcatgagaattgcttgaacccaggaggcggaggttgcagtgagccaagatcatgccactgtactccagcctggcagagcgtgactctgtctcaaaaaaaaaaaaattaataatattttcccagcttttattgatgtttactctatattaaaaatggcgtgagccaagatcatgcaactgcactccagcctgggcaacarcgagactctgtctcaaaaaaataaaaaaacaaaaaacggccgttggaaaaatatttccgtaccttctgcaaaactgcagtcaaatatatatttattttccttaaatagtgattccataaattccttctagaatttttatttacatgtagaacagacttactatctctaaaatatttagactgaaacctctttttaatgtttcctggtgggtgaatcagagccttcctttaatccaacaagggtttccctttcctaaaccatttccccttttgtttgaactgctaggaagcttagtgctaaatgcaattcctactatattatatgtttttttacttcttttcaacaatccacttttaaatgcatttttgttgtttttaaatcaacattgttgaggtataatttatatacaataaacacaacaattttttgatgtatatttcagagttttgacatttttatttgcctatgtaatcactaccacaatcaagatatggaatatttctattatcccaaaaagtgcctctttctagtcaatcccccttcctctccaccaccacctccgctcgtgctccccctcacccccctggcaatcagtgatctactgtccctatagatcagtgcctctcaggcgacatatagcaatgtctggagacatttttggttgtcacaactgggcaggtactactggtatgtagtggggagaggccaggaatgctgttaaacatctacagtgcactggatagctcccaggacaaaatattaactggccaaaaacttcaatagtgccaagattgaggaaccctgctatagatacagttggggtatgcaaatgatggtctgcaggcgaaatccaggcttgtcacctgtttctgtatggtgcataagctacacatggttttcacatgtttaaatggttgaacaaatcaaaagaaaaagaatatctcctgacaaatattctgttacatctataaatggattagacgatgtccacccacactggtgaggggtggatcttctttactcggtctactgactcaactgctaatctcttccagaaacaccctcacagacacactcagaaaaaatgtgtcttaacagctatctgggcatcccttagcccagacaaattgacacataaaattaaccattatacaccattctactgggcatagagtggtatttcattgtggttttaatttgcatttccctgataaccaattatgttgagcattttttttatgtgcttatttactacttgtatcttttttgtagatacaaatagtgtctcttcaagtgtctcttcaaatcttttgctcatttttttaattgcattgtattattgagttgtaagaattatctttatattctggatataagtcctttatcagatctatgtgttgcaaatgttttatcccagtctatggcttgctttttcattttcttaacaggatcttatgaagaacacaagttttaaatttcgataaaagtttcatttaacaattttatcttttagggttcatgctttttatgtccwaacccaagatcctaaagactttctcctatattttttcctaggagttcataggttagcatctatgattaggtctatgatccatttaagtccacttttttccccaaatggatatccatttgttctagcatcatttgttgaaagactactctttcccgcattgaattaccttggtacgtttgtcaaaaatcaaatgatcatayatatatgtaggtctatttctagaatctctattctgtatcatccacatattcatctatcttacagcaataccacactgtcttgataactgtagctttacagtatgtcttgaaataaggttttaaaaaagcaggaggtgtctgacttcatgtggcattttccaggtgtcccaggaggcccagcctttgcagggagacctgcgttctgggaggtggtgagaggtgtggctgctgatctctgggtttgattgattccacctttgttcttttccaaaattggtttgcctgttctaggtcgtacatattttatataaatttaatatgagcttatcaatatccacaaaaaggcctattaggattttgattgagggtgtgttgaatctgtagatcagattggaaagaatggacatcttaacaatatctgttcttgcaatctagaaacatgatatattacatttatttagttctctaatttctttcaacaatgttgtagagttttcattgtacaagttttgcacctattttgttaaattcatcctgttttctaatccctttataaatgagataaatatgttttaatattataagctgcttcattcctccagttctcagaaaagcaacggatcacttgattaactgcaacagaataaggcagattgggaaggaactaggactggagtgggtggagggtggtraagggacagctcatcacagacactggagaacctgcattccagtgggcgaaatacccatgacggcagagacagcagccattgggtaacccaagtgggcatgtggggtgaaaacaggcaggagagcacagtggtgggagtgcaggcacaggtagtgtggggaagcaagcagctggtgtcagaagagtgtgccaacaggtgggggaccacaggtgggcaggccttgactccctgaggaaggtgatgggcaaccacaaagaagggtgtgtcagcctactgggaaagagatatgaggccctttgcacacaggcttgggctcagggagtcagtatctggcgtggagtcctgggcctgccctcagcaacagaggagttggagcttagagtcagggcttgtccactgtcaggcatcccaacctggaggctcagtatgttggactctacacctgccttctgggtttggttcttggcctgggctggtggtggctgggggtgggaaagaggctaccagggactaggaaccaaggagatctggccagcctttcagggaatagatgggggataaattgtatgtccttataaaaataatttgggtgtctgtcatcagttccaattccacctctcctagcaagagcaggtaaacatgaaaaagaggaaatgctggcattccagatgaattagacrggcaggcaacccaaattctattactcccatttacttgctttcaagagatgtagacgtattcatctcttttatcggtaggtatgcagcaggtgctccacagtcaagcatcaatctcagaggaaaggcccatttcctctttttctttaggtgaatgaatttatctgcactttttcagactcaaccatcaggaaaagccttttgaaccccaaataatcatttgcttcatgtttccattcattcatcaaaggaaggtagcagccaagtaggccaggttacagagggtgttctgctcccattttgtagccatttgagaagatgctgccttgtccagggccctggtgaacagaatggaggaagggggccattgactacccctcctggaggtagccccatcacttgcactcttcagtgaagatgatgccctcactgggtgcgtcccagtgcacggtggagtgggggtgcctctcactgagatgggggccactggaggacgaacctggtggagatagagcatgataagcttggttttagatgggatgggttagaagggccagcaagatatcaaagtagagagatccaattggctgtagatgtccagattaatggttttggggtttgtttttgtttttgttttttgagacagagttttgctcgtcacccaggctggagcgcaatggtatgatcttggctcactgcagcctccatctcccaggttcaagagattctcctgcctccgcctcccgagtacctgggagtacaggtgcctgccaccacgcctggctaacttttgtatttttagtggagacagggtttcaccctattggccaggctggtctcgaactcctgacctcaggtgatccgcccacctcggcctcccaaagcgctggtattacaggcgtgagccaccgcgcccggccatgatgtccagrttaatggttgttaaagaaatatacaagagatgttagcttgctagtggctttgcctgacctggcacaaacatcctcagagtgtagtccggtgtaactaccccattcaccagtgctgttactgattccacagccacttttttttttttttttttttttgagaacgaagtctcgctcttgtcccctggctggagtgcaatggcgtgatcttggctccctgcaacctccgcctcccaggttcaagcgattctcttgcctcagcctcccgagtagctgggattataggcgcctgccaccaagcccggctaatttttgtatttttagtagaaacggggtttcaccatgttggccaggctggctggaactcctgacctcaggtgatctgccggcctccgcctcccaaagtgctgggattacaggcatgagccaccgcgcctggcccatagccactttattataacaatatttttatttctatttatttatttatttttttaaggccaaggaattaagtgactgtatttagaacagaaggtattccatgaataacatcaaaacaatgtggacactaagagaatacatgtaactcatggatgcaggggacgcacattgtctgcattcctgttttctgtgcctactacatgtgctccaccccacacctgctgagtacatgctgggaagatcatgtcaacccttggagcagctagtgtttaatcatctcctgctagcgcctcatgttttacattttggcactgtcatgcagatactcccctttccccctaaataagacactgtcacacaatatcttttaactcatctgtatttgtataacaatatttttaaaattatatagtaccaagagattgagttccactgtaattctcctgtgggaaaactgcagttaatagtttcatatatatatgaaatctcactcatataaatacacatatagataaacataccttgggttctggttttgtcctgtaaactactttcttcactcataacctcccatgtcaatacttagagatctacagaatccttttcaatggctgcacagccctctattgtgtgaatataccattatttatttaaacagtcctcctattgtcagactttaagctggatctcaaaatatttgttattataaacaacagtgttaccaaacaccctcgtactacatctttgtacaactgttcaattatttccttaggaggaattcttagacatgaaatgcacattttaagttttcatgcagatgttcagatttccttctggtgagaacatactaatttgaaccctgttaacaacatataagaatgcgtgctttttacatttgctttggacattgttctgtgtgctattatgaatagtgaaaaatgtaatctcattgttttcatttgcatttatttaattattaataaaggtgaacatcttttcatttgcctattagctatttatgtccctcctccccttrtgggttacctattcttatcctttgcctatttttttattgtagtatttttttgtcttttaggatttagaagcgctattacatataaatattaatccttggttatatgatacacacctgtcataccagtttttatttgtctttattaaaagtaatttgtggtatcttttgctgtatcataatttttcactattgtatagtctaaattactctgattttttatggtttccggctttggattatgataaaaagaaaagcctaactcaatcaaaggttataaacatatccttctatgtttttttctagcattttatacttttctctccttttctaatgtagaatgcaaatgtactgatgctacttctttgcttgccatgctagccagccctgccactgcactcagcatcttgtccatactcttggcacgccatgtcccaccaggccttgaaggattcagccgctgtccactttccaccctcatgcatccaatgcaccagccatcctgagtgcaccaagctagcttgcgccacacagcttctgtctggaacatccttgcctgacttcttccttgacccctggtgaactcctaagcaaccatccagactcacctccaaggcacttgtgagaagcagtcctccagcccagtcagtgtgaagtgcttccccaccctttctggtaccggcagcccttccagctccttgtctcctattgaaatgttggttgatgcatatccttccactaccaacttgtgagctccatgagagttggttgagtatctggcacccagtacagtaaccctgcctccatgatctgatttgcattttagcaagctcaatctgctaatagtgtggaggccggggaccaaccagaagtatccatgtaatggtgaggtcatagtccagtaaatgataagggcctgacttcagcaatgggtttggagaaagaggacagaggagaaattgatttagtaggtagaaccaacagtgttttgtttgagaagtttcctggacattcaatacatgagaaaataaaaacattagcccagtgcatggtggctcatgactgtaatcccagcactttgggagcctgaggtgggcagatcacttgaggccaggagtttgagaccagcctggacagcatagcaaaaccctatctctatttgaaaaaaaaaaaaaaaaaaaaagcccattagcatggtccagaccttttgattgtttggaattacgtctgcttctcttctcttgtgacttggcctagttatcacctccacgtcattatctatcaagtgaagttagcatatggacctccaaggccagctgtgcagtgatttccgtgtgtgacgagctctcccagccccggacacatgcagtcagtgagtgctggttctctgctctcctccacctcattaccttgggtggtggggtcagttgccatcttccaactgatctaaaggattcctagagagagatggtgaaatcagctcttattattgtgtttccacaaaccacagatgtgccctggacagctagtccctgcctagacacctgtccacacctgctttctgctctgctcacctatgctgccactcgtttgttgttgttgttgttgttragacagggtctcactctgttgcccaggctggagtgcagtggcatgatcatggctcactgcagcctcgacctcccaggctcaagtgatcctcctgcctcagcctcctgagcagctgggtctacaggcacgcaccaccacacccagctaacttttgattttttgtagagacagagtctcactacgctgcccaggctggtctcaaacttctggtctcaagtgatcctcctgcctcagcctccccaagtgctgggattacaggcagagccatcactgtgccaggcccatgctgccactgctagtgtcattcccactctgttttcctttccctccagggaacctcccagcattcagccctttctcagctctgctccttccttttctgttctgtgggcaccacccagttaacccactgcacccccatgcctggcttggcataatcactgccctccctgtctccagtcaacccaggccagggtaaggaagcagaaaggccagtccccaactcacagttgcatcctatgaccacacttggatcctgctcccgctgtgccagggcaccctgggagccatgtgtctcattcagagcctcgacctcttgctctgcacccctgatttatgttctgtctctccaagctgcatcctcatcccagcttcctctctcagccccaaggtagccagtctgtctgccattctcagcccacccttgcctacctccgcctcccctcttttctccatgccagagaacacctgctttgctcctctcccccagcccttgaccaaacacccacaaccagcacagaactctcttttgagaagacttctttcccatcactcacagctcagagtccgttcctgtggctgacgctgtaaatgcaagctgctttctcaccgccatctccgtggttcttacaacttccccaacccaagccttctttcagccaacattgaatgagtcccctctatgtgccaaaccctcagaggacaaaataaggcataggcttggctttcaaaaagcttcagtctgttgggcatgaattccaacccacagttttctcagccataacgtggggataataatgtttcatttcctcacagggctgctgtaagattgctaggaaatcgtgtgtgagctcttgagatgatgtggtgctgatggtgttgacacctacttgacagckgggaaaacgggcctgggaggacgtgcccatagtcgcatggcacagccaaggtcactgccctcacctgtgctcaccctgcggcccaccccatttcctcctcacctcccctctgtgcccgtctcatcctcactcactcccattcatttccctctaaaacagggccctgaaatccagaygcgatcagcctagtggtatcactgccccagaagaagggaagttggtcattttcacccccagacgtttctgtaagcctcctgagagtgcccactggcctgccacccctgtggcacagtgcttcctgcctgcccccgggagtctcaggatcaaggtcacagtggctcacccaccttgctgctcatctcctcaaagctgggttccattagtcatgaatttccatgggcactgatgagatttgcttctcaggcttaggaattctggactggtgtaaaaatgtctgtctcagtgatggaggtgtcaggtccgtaagaaagacagccggcaggagcaggcacaggaggaaggctgcttttgattgggcagaagcattattggcttaaagtcagaggcaggtaaagcaacttcttttgggagagagagcctgggaacacattttaagtacaagtatctggtgcctctttgaaggggtcttacgactcagaaataaagggaatgccttgtacccttttgaaatcttgtttaatttcaagagttgaaataaaggaagccaggcacggtggctcacacctgtaatcccagcactttgggaggccgaggcaggtggatcacgaggtcaggagatcaagaccatcctggctaacacggtgaaaccccatctctactaaaaatacaaaaaattacctgggcatggtggtgggcacctgcagtctcagctactcgggaggctgaggcaggagaatggcgtgaacgcgggaggcagagcttgcagtgagccgagatcacaccactgcactccagcctgggtgatagagcgagactccatctcaaaaaaaaaaaaaaaaaaaaaagaaagaaaggaaattggtttgtcccagacaagggcaggacttcctgaaaataagagggaaagttttccaccttatttcaattttttttcaaacaatataaaagtacttgcatgattttaaagtacaatatttacttatttatttattcattgagacaaggtctcactctgtcacccaggctggagttcagtggcatgatcacagctcactgcagtcccgacctccttggctcaagcaatcctcctgccttagccttctgactagctgggactacaggcgcacaccaccatgcccagcttattgtgtgtgtgtgtgtctgtgtgtgtgtgtgtgtgtgtgtgtgtatgtgtgtgtagacagggtgtcactatgttgcccaggctgttctcaaactcctaggcaattgctcaagcaatactcctgcctcagcctcccaaagtgctgagattacaggcataagcaccacgcccagcacaatatttatttttaattataagagcaatgttggcagagagtggtggctcatgcctataatcccagcactttgggaggccaaggtgggtggatcacttgaggtcaggagttcaagactagcctgggcaacatggtgaaaccccatctctactaaaaatacaaaaattattttgtaaattagccagaggtggtggggtgcacctataattccagctactcaggaggctgaggtgggagaatcacttgaacccaggaggcagaggttgcagtgagccgatcgtgccactgcactccagcctgggtgacagagcgagactatcttaaaaaaaaaaaaaaaaaaaaagcaatgtaacatatagaaagtctggaaaattaggggggcagaaatcccttgttatcccacaacagaaactattgtttattctcttctgatctgctttgagtccatattttgattgtaagcatatttgacatgtatttgtatgtttttttaaagttttaaatgtttgatgagatatatacagaaacatgcagaaaatatatgtgcagtttaaagaataattaatagcaaatgccttcataattcccaccatgtaagaagctccccctaccatgggcccctccctccctgccagatagataaccactgccagagcaataacccctatcttgagttttctgattatcatttccttgtttttgttttgccatggttttagcactagatgcctacgtactataattcccatttgcctgtttttgatggttatgtgaatggaatcataccgtatttgctcttattgtttgtttgtttgtttttgtttgtttttgaggcagagtctcactctgtcactcaggctggagcacagtggtgcgatcttggctcactgcaacctccgatccccgggttcaagcaattctcccacctcagccttccaaatagctgggattacaggcacgcaccatcatgcctggctaatttttgtatttttagtagagatggggtttcaccatgttggccaggctggtcttgaacccctgacctcaagtgatccacccacttcagcctcccaaagtgctgagattacaggcatgagccactgcacccagcctcatatttactctgttatgtctgctccttcccctcaactattgtttgcaagatgctgtwtatggctgtagtcagttcatactaattttcagcttaaaagagaagaaagtagttttatattctcattcaatttctaccctgaatctaggtttcatcaggtagcccgggtttgtggtcctttcatggttaagaaaatacatcctttcctcctgttttccccagcccacacctgaggtctccagctgagaagagccccygccccgtttcctggcagtgggtgtgagccctcttccagcatttggcccttgttctaggaagcagccactccaggagctgctggagacccttgagctgcagctgccatccttccaggggagatgatggaattatttctggggcctggagacagctggcaagagcacgggaagcacagcagggctgagttatctgccaggagtcggtgccgggtgggcsaggtgctggtggtggtgtggtgcctcctctggtcacagacgcttgtccttccccagctaaagccccaatcgggagtcaggagtccttgtctcccatgtgtacacctgtctgtccttcttccaggacctgcgggagctgggcttatggaagtgggatttactcacacttacttttgagggtcctcagcctgcccaggcctcaagtaatgaagcctcctggcctcagggagtcagccaacacttacaaggagccaggcttcagcttgaacgcccaagactggtgctgtgcacacttgggctgggaggtgcacgtgaacacacatcaacgcacagctaagcttgtcctatcycwcacacacacacacacacacacacacacacacacamtcagctctggcttctgacaactgccccttagctcttctgtgcctttgaactaatctcactgaacaagtggtcagcagctcccatttcttaccaccctctcacagctaatcctttgcaatgtagcttttgccctctgcacactgatggtccttgttcattaagtccagccacgtggggccgggccaactcagatgaactcatgggattaaaacctcttacttgatcttagcctgttaagaaatcatccctgtggatttatatacaccttcccagaagctatttgtttcattcaactcctgcttgcttggggcccaagcttgatctgtacttgtgtcagtttcttttaaaaaccgtctcaggaggccgggcatggtggctcatgcctgtaatcccagcactttgggaggctgaggcaggcggatcacctgaagtcaggagttaagagaccagcctgacccacatggtgaaaccccatctctattaaaaatacaaaatcagctgggcgtggtggcaggtacctgtaatcccagctactcgggaggctgaggcaggggaattgcttgaacctgggaggtggaggttgcagtgagctcggatcgtgccattgcactccagcctgggtgacagagcaagactctgtctcaaaaaacaaaacaaaataaaaaaaaacctgtctcaggagcaagcccttgttaaccatattcacacccatgacgctggccaatgcagatggtatttccctccccgtacccactcctgcactcggaagaggatgttctggtgctgggctcttacctatagtcttgcccactccctgacctacttgttccgattctaccttctctccagtgcagtgacaaaggtggtagcagttttccagatgtggatgcttcatgatctggtgcagatggtccccaggtacaaacgccccagtccagccctcccccaaaatggcacctgccatctataggcttgatcctgccccgcccctgggttaatggaaaaagggcctggtgggacattcagagacctcctcactagccaatttggtatggaaatatgtttgtggctgtggacaaggacccagggtgtctcatggtggatgtaacattagacagagactctctctagcctctgactgctctgcctgatcagtccttcctgtgccagtcccaggccattcaggttctccactagcctttggagatggctgaggcccagatggaagaaaggggacctgcccttctgctctcctcagttccttgccccagggttgggttctacttccagaatccctcaaaacattttgcacaaaactcccaggtaatccaaatcaggaccacctctcagagcagtcttcctggatgtcgaccctggcctgggttggataggaatctgggaagagtctgaggtttctggatggggtgactggggacaggggagttggttttggacaggttgagtgtgtgctgcctgtggaacccagtagaatggtccagtgggcattcggatggtattaaaatsstccygctccctcattagctagactttcagtttcctgtttgcttcagaaagtagagaactgggggttgtgaaaagctcagtcactgagcaggtaaagtttgattggatgtcgggagaagtagtcacggagtggaaacagctgtgaccttttcttttttgcttgtcacctaattgctattagtcattaattcatataaactagatacctttgagaagtaggacatggtcagatgaatgaggtgtggagacttaaacagtaatgacatgctgagttcacaggtctctgtgtcattatgacctgccttacatgtaggtcataaatattttatttctgtctaaataaattataaaaaatgcacttaatgatattaagctgcagctacttacctgaaaaggaacaaaatatcgcctctgaagtaactactaattatacaattttgcaaactaataaatattattttaaatctactcaatagttgataaatcaattatgaattaatcataaaattattctgtgctttaatattagttaagtttttactgtttactacttagccatttagttttttaaacttaaatttattaacttaaaccctcagcatttcccactcatctcaaactcccctttggtttttgtgttctgttgaacctttgatttggcatgtttcaactcaaagagaatcccttccctgagtgacccmagggtgccttatgtgccagcatcctccacaactccattttaagaatggctctcccattgagaaggctgcaaaatgccagcctactctttctctctcctttgtgctgatcagaagaaaaatagccataggtttccattttcctttccacacaactgtcgtgtattgccttttgatcctttagcaaatgttacctgcttggagcaagggaaaatcatgccagcccgcctgtatcctctgtgacctgagctgacctcacctgccccttgaggtgctacccaggttgccattaggcttggcttagatgccacagatccttcatgtcacatgacagtgtttttgatataacagtcttgtgtgtttttgatatcacagtgaccagttatctgtaaaatcatacgtttttctgtggattctatcaaaagaggaaatgtgagtcttaaactaatgctttctaaaaagaggaaatgcatgtctgaaaccaataccttccaagttccctttaaggtctttatgcaggaagggtcccccttgcaccatcctggccccaagttcctgtgccaagctccagaggcccccagcatcctccagctgagttgttggcaggggcagccgtgcaggccagactgtgcaggctctccttgtctcacacctccccgcaggcccaggggagctggggaaggcgatgacagaagcaggcaattccaaaacacagtgttgggcttggcatttctttggcaggactaaaactgtgtaccttataggagtgtatggtgtgtgcatttcatgatcaagaagcagcagctgccataactttgtccactcagcaagatgcttcctatgcagttctgcattggaactactccacaaaagtaaaaatggggggcatggaaggaaggatttttctgttttcccacaagacagtggttggatagcaataattgttactattttaaacatggagaggctttctcatgaaagactgcactccctagttacagtattgtcccctccccaccatcccacttccaccccaagttctctatcccagcttgcacatcaccttaacgcgaacccatgaatggttcaggaacataatgccacaggatcagaatcctcttggaggagacaagctgtgtataactggataaatctaggattcgggatatccaaagatagccaccatcttgctgtggaaggcatcattacttccctgaataaactgtaaacatcataagatccctgtgcttgcagtgtgacaccttcccwttagtcctgggctggttcccttcagttcaaggtcactgttgacaaagtccagggattggagtgaaaattggaagtaaacttaatagtctatgcagctctagaattccatacttctgattctttctttctctttctttctttttccttccttccttccctttcttttctttctttctttctttctttctttctttctttctttctttctttctttctttctttctgtctttctttctgtctttctttctttctttcatctctgtctcccaggctggagtgcagtagtagtgcaatctgggcccactgcaatctctgcctcccaggttcaagtgattctccttcctcagcctcccgagtagctgggattacaggtgcgtggcaccatgcccagctaatttttgtatttttggtagggacgggggtttcactatattatccaggatggtctcaaatttctgacctcaggtgatccacccacctcgacctcccaaagtgctgggattacaggtgtgagcgagccaccgtgctcagccacgatttattctttctaatggcatttaactgtctggattttttcccattctgcctgagatgacagacacatgtttttgaattctgttgtttgcatagataaaataactggatgatcaaagtttttggcgaaacatatgggcatatgggatatagccagaagtctttaaaggaggtgacatttattttaaggcccagttgttacttayrttgctcatttctgtctagtgtgatgtcttagtttaggctgctttaacaaaactaccgtagactgggtggtttaaacaacagaaatttattcctcacagttctgaaggctgggaagtccaagatcaagttgaagctgagggttgctgttgagggctctcttcccggcttacagatggacgccttcttgctatgccctcacatgtcagagagagagatatctctctcctgtctcttcttctaaggacactattcccattcatgagggttcacaaaggcctcccaaaggccccacctccaaatactgtcacacaggagattaggcttcgacatatgaatgggacacaaacattccattcattgcatgtagtgagccagagggccagatattgactctgtctgctacacaattattgtgttttggaataaactaggtgacttgaagcatcaacaatcggtaaaactaatgctggccttctggagagcttatacttcttttttttttttgagacggagtcttgctctgttgcccaggctggagtgcagtggtgcgatctcagctcactgcaagcgctgcctcccgggttcacgccattctcctgcctcagcctcccgagtagctgggactacaggcgccagccaccacgcccggctaatttttttgtatttttagtagacacacagtttcatcgtgttagccaggatggtctcaatctcctgacctcatgatccacctgcctcagcctcccaaagtgctgggattacaggcgtgagccaccgcgcccggcctggagagcttatacttctttctgaccacaacctctgacaagaatgttacctggatttactgcctcaattggagcagagggaagagagtccctttatggtgcttaagaacctgcatagcgtagggaaaaaaaaaaaaagcctgtatcacaacaattgccctcaaatctcttcccttctgggcgactttcctgagaggtccagagtatccaccccactcacccaccctctgcctgactccttcactatgttcatacacatgtgcacacacagacagcctgtgctgcagagacagaccagcaacgtcctccctttgttgagttcagcaaagactagcagggaaagctgtaagaataaggtgctaatgaggttactggggaaggtgagcagcatgatgagtgtccacagtccacagcgaggcgggattggacggggttagcatcttggggacttaggctacttggaagggtaggaatgtttgggaaggatactggtgcaataggcttcctaccatcaccatgcagctagtcttacccattccagctctggtctctgtaacatggggaaagatacccagtttagaccagtatctgtcaagttcactgttaggtctttaggcaagaagtgtcccctttacacttcagtcacctattaaagcaattatttgcatctctcttgctccgcagactgagtttcttaagagcagggcctgtggttttttcagagttgtctccagtggaaaggagtgaagttatagaacactttagtgcacacaaatgtyctaaacttttaagattttaaaaatttaaaaaagatattctccaaaagcaccctgggtagggagcatgttaggcaactgtgctacgatattatccaaacaagccagtgcgggcttagaggtcccaagaccttgggaaccctgaggctgaagccctgcaggctgctcygacagcagcccacgtggaaagctggaattcagcacaattgggcctggaggctgggccatcactcacactgcggtgtctctactgagctgctttagatctggggtccagctcacccctccttctgtatggctcaaggctagatgcttgtattagtctgctcaggctgtcataacaaaataccacagactgggtggcttaaactacaggaatttattttctcacagttctggaggctggaagtccaagatcagggtgcaggcgggtcgggttgtggtgagctctctcctcccggctggtcaatagctgccttctcactgtgtcctcacacggcctttcttctgttcctgtgcctgagagagaaagcgagctctctggtgtctcctaaccaggacactaatcctagcagatcacggccctgccctatgacctcatttaacccttaaaactttctaagaggccccatctccaaatacagccacactggggttaaggcttcagcatatgaattagaggggacacatacatctagtccataataactctagagacgaactgtctggctttcaatctctgctctgttacaaactagttgtgggaccttaaggacgttcttttaacttttctaagcttcaggttcttcttggtaaaaatgggggcaatgatggtacctatctccaggcattgtaaggattaaatcagatgatgcacacaatgggcatagcgaagggcccagtatatagtcagtgtctagtaattattagttagcattattaatagagtcctttaagttctgagaatgagttttctagatggtagtcctaggagagcagtctatcctggatttccaggaccagcccaggcctgcgtgaatgggattcctgggccagagaggttccagggctccccagtgttctgcaagggagccaagcctcttcagagcctcgttagcctccggagacttccaactaggaagtggaaaaaaataggccgaggtggtggcagcccaagggttctagagaaggggagtagtcagccccatctattcctccctcacccatctcctttcaaaaaggatggcagagggaggaactgagccagctgggtctgaatgaagggtcacgttggattccttctggcttctttttagttaataaataaataaataactttttttttttagacagagtctcgctctgttgcccaggctggagtatagtggcatgatcttggctcactgcaacatttgcctccttggttcaagtaattcttctgcctcagtttcctgagtagctgggaccacaggcatgcactaccacgcccagctaatttttgtaattttagtagagatggagttttatcatgttggccaagctggtctcgaactcctgacctcaagtgatcygccggcctcagcctcccaaagtgctgggattacaggcatgagccactgagcctggcctaaaaaaaggcttttgaacatatattttcagattatatgttcctcctccaatttattatgtaaaatttgaaaaatacagaaacctgtgaaggacataaaactcacctggaaaccttctacccagagttaattcccttaagtcagatagacctaaatctgaagcccatccctccccctggatttttatgacctttaatgggctacttgttattttcaaaacctctgtttattccttaaagtgaggctaacacttcctgccttgttcccactttgtggaggttgctgtgtgaatgcatgtaaagtgccaggcacagggtgtttatttactgagagctcttacttctattgaagatgatgtccttggctttcgattctagcatcaaagctcagacaagaattctcagtaagctattatcacastgctctttcaggttctccaacctccaagcatgtgttacgagcaygtaagcaaacccatcttgtcatttataacattgacataacgattatgcagcaatttttccagcataagtattcctagttttcctcttaccttaaagctgctttaaaaggtgaggattaagccagacatggtggcatgcacctgtagtctcagttactcaagaggctgaagctggaggattgcttgagcccaggagttcaagttcagcctgggcaatgacatagagaactaaaaaaaaaaaacaaaaacaaaaaaacaaacaaaaacaaaaaacaatttaaggtgaggattatatctttgcatagagcattgggtttgtttgagagagagagagagagagagagagagagagagagagaatgcatctcagacttctgggcttcctgtggccagagtggctctatccaccacctaagaaccaaagccattttcttattattgcatatgaaattaaaactccagtttttaggttttaggacaaaagatcccttgacatgtgttcagcttcaccccagctccagacaataggcttgtggctgtggctgtcccctcttccctagtctctccagtccaactccccacggcctctctgccctgtcgccttccactctaggggagcagggcctcttctccccagaggtcagaatgataccctgcagggagcagatgttcctggagtacagttgtcactcccagccacctgctttgtttcccagcactccctcaggcagcagcccccaagggccatgctttccttacagcaggagaacctggtggttgaggctccatataagctttcttgtttgttgttgagattccatgcacttgagcctggccaacttggcaaaaaataaaccaactgtttccaggagaacaggctatgatctccaaatatctgacatgtgcccttacaagaggtactcctttaatagatccccaaggccttttcatcctgggacacagccttcccagaacttccctggtgacagacaaagttaaatgatgaggatgagagaaaatatgttgctccctttgttctattcaccgtaattagctgtgttaggaaaattgagccttatcctggacatagagttgcaaaatatccctgaaaacaaacatggaattggtctactactcattgctttaaaccattttgattgtgttagagtgcaacaagtagatggggctatttattcgtttattcaccagttttgagtattctgtactggatgctgaggatggggagcgggcggagacaaagatgactgataggactgtctttgaggaccctactccataggtggagagagaatctagtgccgtgaaggcaatggatctagtgaaggcacaaagagagtcagagaaaacttttcagaagaggggacaattgggccctgaagaacgagaaatttactgcgtataaaagtgggctttattttacctcaaggacacactgcaatggcgtaatctccttcctgctggtcagagtttgtcctatattttctaagcctgaatgtaaatattttctgttcagatatctaagggtcaagagagttgcatatccttattattattataaatccttattagaatttatattataaatataaatataacaattttatatacttataattatataattataattcatattataaatataaatccttattattatagataattccttacttattttggatattaaccaaagtgtgccccctggatggaaattttaagcaactcaccatgaccacagctatctgagttgccctcagcactggccccatttcctatgtgcaccccatttcacttctcaggtccctgcagtggctcccccacatcttcacactcttctcaaatccactcattctgtaccactcccacgagctctcagcccccagctttgcagagcagagagaatgcaaactcgcttatatgcctgtctcttctgcatctgcacatcacctcctcctacaagcctttgactttaacctctctgtatctctttcctctttggcaaggtgggcataataataccttccccacaggattgttggagggatctaatcaagcaagccatgtaaattgacaagtgagggccttgtttgttgaggccttctgttaatgatggttgccattattctatgctacctccttcgggagctcacatcaaaaatagtcccttgatctcttagacctttaatctctcccttggctccttcttcactccctgaaaaatattagtcctaaaattgatactttccctcagccatgctccttgggccgtttctaggctttctttactcacagagatcttgacgactgtatacacagtctccacaaacttgccttcagtcagagttcatcaaagtctcactgatttccaaagcagaggtcaagatcttctgtggtccttgcccccacttcactgcatggctccatttaatgctaagggaagggagctctacagaggagggagtagtcagtggtgtcatatgtggttacttgatgcataatccattttgagttcatttttatataagattttaggtttaaattaaggctgggtttttggcctatgaatatccaacaccaattgttgaaaagactgtcctcccttcattgaattgcttttgcacctttgtcaaaaatcagttgaccatagttgtcaagatcatgcagtcttgattactatagctatgtaatatgtcttggaatcaagtagactgattcctctgactttattcttctttgtggagtttgctttagctgttctagttcctttgccagtccacatacattttgacaataatatgcaaaagatttgtgctgggattttaataggaattgcattaaacatgtatgtcaatttggggagaattgacaccatgttgagtcttccaatccatgaacatggtatgtctctccacttacttagattgtctttgatttctttcattggcattttgtagttttcagcatacaagtcctatgtgtgttttttctttttttatattgacagataaaattgtatgtatttgttgtgtgcaacatgatgttttgaagcacatacgcattgtggaatgactaaatccagttaattaatagatgaattacctcatataatgagaggttagaacacttgatagccatactcaaagcatttttcaagaatacaatgttattattaactatagtcaccatgttgtacaatagagctcttaaacttatttaactgaaattttgtatcttttcaccaacatttccccaactcccctttaccccaactactccagccactgataaccaccattctgttctctatttctttttctttttttttttttttttttttttgagatggcgtctcgctgtgtcgcccaggctgaagggcagtggcatgatctcggcttactgcaacctctgcctccccggtttaagcaattctctacctcagcctcccgagtagctgggattacaagcacccaccaccacgcccggctagttcttgtayttttagtagagacggggtttcactatcttgggcaggctggtcttgaactcctgacctcatgactcacccacctcggcctcccaaagtgctgggattacaagcatgagccaccgcacccagcctctgttctctatttctatggatcaacttttttaggttccacgtaggagtgagagcatgtggtatttgtctttctgtgcttggcttattttacttaacctgatgttctccagatttatccaagttattacacatgacaggacctcccccttttttatggctgagcagtattctattgtgtgtatatacatctttttcatccattcatccattgatgggcacttaggttgattccatatattggctattgtgaataatgctgcagcaaacaaggaaatgcagatatcccttcgacatctgatttcatttcccttggatatatacccagtagtgggattgctggaccatatagtagttctatttttaagtttttaaggattctgtatactgttttccataatggctatactaatttacattcccaccaacagtgtacaagagttcccttttctccacatccttgccaacacttatctttcatctttttgataatagtcattctaacaggtgtgtggtgataatctcattgtggttttaacttgtacttttctgatgattagtgatgttgagcactttttgataaatctattggccatttgtatgtcttctgagaaatgtctattcaggttctgtgcacatttttaaattgagttgttttcttgctgttgggctctttcaattccttatttattytggatattaacctcttgtsagatgtatagtttgcaaatattttctcccattttgtaggttttctcttcactctgttgattgtttccttcgctatgtagaaactttttagtttgacgcaatcccatttgtctatctttacttttgttgtctgtgcctatacatgttttcttggatttatgcctatttcactttttctggtgacaccaggtgtgcattgctagtgtacagaaaaaaagtagccttttgtatattgatcttgtaacttgtggccttgcttatttgttctaggagattttttttggtaggtttcttggaattttttatgtagatcatcatgtcatctgcaacgagggacagttttgttttttccttttcaatctatatgctgtttatttcattttctttccttatagtgctggctagaataacctacgttgcctagcactggcaaaagtagacatccttgcctctgctgtagaggaaagtatttagcctttcaccattaaatctgatgttagctgtaggtttttttgtaggtgttctttatcaagttgaggaagctaccctctctccctacttttctgagagtttttatcatgaatgggtgttgaattttgtcaaatgctttttctgcatcagttgatacgattttatgatttttcttccttagtttataaagatggtggattacactgattgtttttcaaatattgaaccagccttgcattttttgaataaaccccatttgtgtggtgtctaattctttttaaatgttgctgaattctgtttgcaaatattttgtcaagaattttttatatctatattcacgagagatattgctctgtagttttctttctgtagtgtctttgtctggtttttggtataaggctaataccggcttcataaaatgaattgggaagggtttccttctcttctgttttctggatgaggtcagtattaattcttctttaaatgtttgaaaaagttctccagcttttgaaaactgttgatgctgtggacccaatctggcccaaataaatctgcatctctgggggtggggcttgggcatacatagttgtccaaagctactcaggtgagcttcatgtgcaaccagctgtggagctaagtgttggttgtggacttcttgaagccaaaataggagcatgaaggaagcagaatccatctgaggaatgtcatgaattaaacagctgtgagatttggagagttcagctctgagacacacccccagaggctctggtgttttcaggataccgtgcagtgtaagggagacatttgttgtataagacatgtgggttcgacttggctacttgataaccataaattccttagcaatttcagctttctcatctgtaaaatgccttgggttgttttggggatagtagagatatgagaaatgagatatgagagatagaaaatgagatagtagatgtgaaagtgctttggagctcacatagcattttgggaaagtaaaacatgatgtttctgtaggccccagcttctcccttactgcagctgtgtcctgattcctaataagtccctctgggaagccagtgggaggcttgtgactcccgctggctgtaggggaaagttcctcctcttctctgctcacttaccctgaccatggaatttgggctttgataggagggatgggaaactggaaacagtgagaagggactttgaccttgaccatgctcaccttcttgtaggaacatgcttgccaactcagccagcgtgaggatcctcatcaagggaggcaaggtggtgaacgatgactgcacccacgaggctgacgtctacatcgagaatggcatcatccagcaggtgggccgcgagctcatgatccctggcggggccaaggtgattgatgccacaggaaaactggtgatccctggtggcatcgacaccagcacccacttccaccagaccttcatgaatgccacgtgcgtggacgacttctaccatgggaccaaggtaatgctcctgtttgccaaaggtggcttcctctttggcttttttattctgcttctagggctgctccagactagactcatgtgagccaggtgctcccagtgtattgctggcaggagaagggtgtgtcagggccactgtggcaactacaatagggatttccrgcttaacgtcacagatttccatgattatagaaaaggaggcgtttaggctggttttgctaatcagatcatttacccaagtacccaggctgagaactgattttatttgtatatctttatgtcatgtaatacaaacctagaggaagagaataagctggtgtttgttattaagtaggggagtgggtttgtctgatgggcttctttatgtatgataaactgaattaaattcccaaagactgaaagacaaatttgcttcttctagaggatgagacagcttctattacctctcctagcttgcttgttatttttaaaaacaaccagaaaattgctggtggtgggctctcttttcagagtgagttaccatggacaatatttaacagttactgagctggacctgagctactgtaagttcctgaatgccaagtacaaaaattcagaagaaaaattaggaggaaactacattctgcaaaaagagccatgaatgggcttttttacccttcccgtgtgctccaacacctctgtcattgctgtcatccctcttccttgtgattttctatctcatgctggcctctccccggacatcagactgtgagctccttgagagcaaggcctggccattttcctctgctttcccagagcctggactgacctggaactagagtagctgtcccgtaagtgtgcaggcagaggctgggcctggcacagcttgatggaccagccccacctcaagcagatggcccttaaggtctccttgaggacaggcccccttcccaatccaggggctgcagaccagacccttggaaggctgggctatgaggagtcacagtagccattgcccgactgtgccaaggcaaggatgctccctggcttaaccctctggcatcagggctacacctgctcactctagccaagtccagggaagagaggtggtaggccractctccttgctttctcctctgagaattctcccgggccctgcaactgatgttttgattatgaaatggggagccccatcctcataaattcaggatcctcttgcagggtgcctggtgacagtcgggacctttctcaagtgagtgagcatatccagctcaccatcctcaggcactgagccaggccaggcctgcggttattgttgtcattttcactgaagtataccatatatacagagaagtgcagaaattgtaagtacacagaattaccccattgaatacacttgtaagcagctcccaagtcaagacaccaaactttaccagcacccagaagctcctccagtcacaggttcccatcagggataaccactatcctgacttctaataggattttttaaataacagcttaatcgagatataatttacatatcatacaattcatgtatttaaagtgtgtaagtcagtggttttggtatatttatcacagcttggttttgtctatgtagatgaaatgaagcagtatgtaccttcgcattggcttcttttgctcaaaaattcataaattcattcactttcattgcttaatactattccactgtgtaatataccacatagcaattatctctctgtcagtggccatttaggtcattgcttgtttgaggctattacaaacattgtcactatgaacatgttcttgtacacatcttcagcaaacatgtctgtacacattttgttgggcacatactcccgggaatggaattgcagggcccatagggtacacttaggttcagctttaataggtaatgccaaatagttttccagactggttgtaacaatttatgctcccagcagtagtgtaagagaggccacagtatttaacactgacatcaccagtccattctggggtccattctgtagcatgctcagggcttgcactaaaaaatgcaccttcctagttactgtccctgtttggaggagtcctttaggccagggtcagatgccacactgtcactatgctgtctaccagcctcgcggtgggcagactggcctcctttgtctcattttccacattgtcatctgctagggcctcattagccaagagcgactggttttcccctgagaaccatcagctctttacagctgatgaagagctctgcacacgtgtctttatgcaaggtggtgagtaactcttgatcttttctgcttctcatccacgcaagcagctgcctccaaaaaacatctaaaggcccctgtgtgacgaaaggccccagatctcccatttctacaggttcaggctgcctcaggagccccagtccatgtcaggccctagttgtagggaatttaagagaccacagaccccaggcgaccctggcagctggtatcacttaaactgacactttgttatatccatgccctaagaaagattgtaactgtccttgtgccccagccctcacattaagcctctgtcgtggtggcctcgttctacctggactccattagtagatcctgcccagagtcctgaaattcctgcccttgacccctccactccacaccaagatttcccctttatgttgtggctcctgcagccgaatggtgtagcttcccagtttctgaaaatctcccgcggagagtaaatgctctcctactgaaacgctgatggggacgggtggatttaattattcacaccgcctgtggcacccatgcagaggccgcgcaccctgatggaccgccgctgacctacttagtatgctctaagaaaggttgattcactttaagcatctgggtttataatagaacagtaatcccaaggaaaatctcacccgaacgattagccaagaaagaaggagagatcaagttgcatctttttgttcttgtcagacagatagcggggccctgaaccctgcacacaacaccccacccccgccccgccccaccccagctagcgtctgcttgttgatttggcagcagcagcagctggactaggaaaacaaaacagttgaaagcctggcctttccgagaacatctgggcctccattgtacttgacctccagggatttctctccagtacttctttagcccacgcctcgctggccccagcctctgaaagaggctgtggcaggctctgcctggctcccctgctcacagcctggtcacttgaccctcctccctgccccaggcagcacccccacaacaccccaccacctgcaggccccgccctccccaggcccagaactagggtttccagacggtgccaggaccacctgctggctaacaatacagacctcattccaaaaaggaggttatctccgtggggtggcagggggagagggagtgaggagggagagtcagtgacaccaactgtgttcagaaggaccagaattttagtctggttgtggggtctcatattattattattctgcttaagtagatgttgcacttagtctctttcatatgtatctagtattacagagtaaagaatgttcttacaggctcttgagctccacccaccaatggctctccagggccaggtgaaaatatcagaatcaggtttttaaaactacaagcattcataagcaaatcaggtatgtggcaaaataaaaataaatataggtaccagcccctcactaagatattgatagcgaggacagacacgtgcaactgaacaagcttcctatgtgccttttctgcctccctatccctacaaacatattttaaggaccgctgtctaggccagtgattttcaccctttggaagcaaattacatcagaactgtcagagacgtgtgaaccagagcagctccatcttaaataggggctgggtaaaatgaggctaagacctattcggctgcattcccagatggttaaggcattctaagtcacaagatgagacaggaggtcggcacaggatacaggtcataaagacctggctgatacaatagcttgtggtaaagaagccggccaggtcccaccaaaaccaagagggccacaagaagtgaccccttgtcatcctcactgctacactcccagcagtgccatgacagttaacaaatgccctggcaacatcaggaagtcaccctagatggtctaaaaaaaaggaggcacgaataatccaccccttgtttagcatatcatcaagaaatgactgtaaaaatgggcaaccagcagccctggagctgctctgtctatggagtagccattcttttattcctctactttcttttttttttttttcttttttgaaatgaagtctcacactgtcacccaggctggagtgcaatggcgagatctcagctcactgcaacctctgtckcctgggttcacacgattctcatgcctcagcctcctgagtagctgagattacaggtgcacaccaccacatctggctaattttttgtatttttagtagagaatggggtttcgctatgttgaccagactggtctcaaactcctgacctcgtgatccacccgcttcggcctcccaaatattcctctactttcttaagaaacttgcttttgctttgcactgtaaaatggtcctgaattctttcttgcacaaaatcaaaaaccctctcttggggtctggatagggacccctttcctggaacaaaaccacttggggaatttttgaaagatccagtgtccagtccccagcccagcccagcccagttgactctaggtctgtgtcctccccatcatccctggtgattctgaggaactttgaggggtttgagtggcacaggctgtactcctgttgcccatccgaccctcaccttgtgagccagggctgacatccgaatcccctgggtctgccttggggaagcttgggcctgtcttgttttgaccttgctggtctttcttatttgcaccttgctggtctttcttatttgcttctttctattcacattgcaacaccccctagttgggctcccaaaccccagcccggggcccagagcttctgtgcttgttaagttccctaacccggtgtcctgacctcctgtctgtacctatggcaatcgtcagtgagagagaagttggcagtagcagagatgccatcaaacagaagtcagtccacttggggctggccctcttccgtgagggtccagagactccctcttgtctgtgccagaggctatctcgtcccagagacagcttcccaccaactcaaaattagcattggggtatcttacagtcaacctgtgggggaagccaaatcctaatcaagagtgcttgtgcagcatgggatcggcctaggggacagccagtctcgcaggctagggtggcctgccacccctcacccccatggaggatcctgcccctccctgccctcccactgcagagttctggaccccatctggtagggccctgaggtatgtgccgctaggacataaataaattccttttggtgcccagccttgccaacttcctcaccaaggatcctgtttgtccgcttggcaggttgcttttgctacttttgtcttcaaaatgcgctctcgtggaatgaagcctataaatgtggctcacttcctttcttctytttcttcaactccagtattctgtttctggtaaattctggccaaaatttctttcccgtctttaagctctgcaatgacacttcctgctcatggggatccagactcatatggtcttgcttattcattgatattctcaagttttcttatctctccatccctgcgagaagttgggtgacaccttagaaatcatctagtcccacccacccattgataggagacccagagaggatgcatgaacgtgccaggcgctgtggctcatgccactaatcccagcactttgggaggccaagcggggaagatcacttgagcccaggagtttgagagcagcctgggcaacatggcaaaaccccatctctacaaaaaatacaaaaattagccaggcgtggtggtgtacgcttgtagtcccagctactcagtaggctgagtggggaggatcatctgagcccaggaaagttgaggctgcagtgagctgtgattgcaccactgcaccccagcctgggtgacagagtgagaccctgtctcaaaacaaaaacaaaaacaggagtttgaggttgcatgagtagcccacatcccagggccagttggaccagaaggcaggtttctcagcctttcaccaccctgttcaaggcctcctgagacctcgggactgaacaatcacccctttcagcctgtggcctcttggttggctgtatgcaaatatttctcttgctattctgtggccccaaattttgctggaccagatgagggtgtctcagaatggatttgcatcaggcaggcagctgagcgaggtctctgcctgcccaagacagtagctttatgaaatgctgctcctccctgcaggaataactgatgtcagcgccttagagctaaacagtttttactatgtataaatggtgtttgtaaggattagatgagatgatgcatgacaaatgcttcacatagtccctgtcacagaatacatatacaataaatgctagtccccaggctgggactacctgcttccaccccaggctcttttcttccagttccttgagaaaagatccaccgactttggcttcacaatgaaattgctccactgtgcaccgagtgcccatgctacctgtgtccctgggcttggccagcaggcaccctggcaggccttctctgggaatcggccctcacctcccagctcgttttccatgctcgttcttcctgctgccctaccacccctccggcctagctgtgggggctgggattggcatagctgggctcctctctccactttcttctgtgactcaccygtaggctgtaaagagccctgtgaaggcttcatgaagtgacttcccctcccctgccacctggaggacatccctctaccccctccatcggtacttagtctgcttgtagagggtatattagttttctgctgtgtaactaattgcctcaagttcagcaatttaaaacacccatttattaactcacagttctgtaggtagaaatctgggcacagcatgactaggtcttcggctcagagcctcgcaagccgccatccaggtgtcaatgggctgcattctcatctggagtccagggttctctgccaagctcrtgtagttgtggcagaattccatttcttggagttcaaggactgaggtccctgtttccttgttggctgtcagcctggggcggatctcagtgcctggaggctgccagcaccctttgccacctgccccttccatcttcaaagccagcaacagactcacctcaagtctctctcctgtttcaaatctctgactagaatctctttcaccaagaaaaaaacccatatcttttttttttttttttgagacagagtcttgctctgtcaccaggctggactgcagtggcacgatctcagctcactgcaacctccacttcccaggttcaagagattctcctgcctcagcctcctgagtagctgggagtacaggcgcctgccaccacgcccagctaatttttgtattcttagtagagatgaggtttcaccatgttggccaggatggtctctatctcttgacctcgtgatctgcctgcctcggcctccmaaagggctgggattacaggcgttagccaccgtgcctggccaacccatacctttatgagctcacctgattagcccagacccactgaggataatctcctgccatggaatataacctaatcatgggtacgttttcccatcttattcacaagatccctcccacactcagtgagatgcagttatacaggggtgtgggccactgggagtcatcttagaattctgcctaccacagggagtcacatgcaaaaacatggctatcctatagacattttgccctagtacatctccactccacctattttgcttaaactacctaaatcataatttatttatttattttagagatagaatctggccctgtcacccaggctggagcgtagtggcatgatcatagctcactgtggcgtcaaccacctgggctcaagccatmctcccacctcagcctcctgagtagctgggactgcaggcacatgccactgtgcccagctaagttttttatttttattttttgtagagaccggatcttgctatgttgcccaggctggtcttgaattcttggcttcaagcgatcctcctgcctcagcctcccaaagtgttaggattacaggcgtcagccatcatgctcagcttacttaaacctttttaaaactccacatttacatttttatttatttatttatttattwtatttttttgagatggagtcttgctctgtcacccaggctggagtgcagtggtgcaatcttggctcactgcaacctccrcctcctgggttcaagcaattcccctgtctcagcctcccaagtaactgggaatacaggcgcccgccaccatgcccagctaattttgtatttttagtagagacggagtttctccatgttggtcaggctagtctcgaactcctgacctcaagtgatccataagcctcagcctcccaaagtgctgggattacaggcatgagctactgcgcccagcccacatttacatttttaaaataaaaaatcaccttggccccccttcatctcayggctctctctatgcctgatgtcgtgtccctgcaatggctccctgttgtctaagacatcaagtttggatgtatggatcttccccctgggcaacccctgatctgaccttgccctcccatcgacccatcatggccagctgctccccacacgcacccatccatcaggaagatgccctccatggacaccccatgctgcctgttgccatctctctccacccctgcacagagcccctccttcaaggcgaacagcctctcgtggcactcctcctccagctaacccagctccaggatgtcactttcttctcgccagctgaaataacttgtcatcctagggctttcaaattgtttcccatgttaagtttgtttctcaacaagattgaagaccctttgaggagcagagaccacgatttaacttgtgactagccacagagcccgcgtagccctaacggtgtagtcgacatccaagaaatggatgtcagcatggagtgggagttatcagcacagactggggctatgaatgctggagttcggatttcagctccacatttgcttgctatgtcaygtgggcaagttaatctctctgttcctccattgtcgtatgtctttaaaagtgctaattgagttattatttgtaaagaacttaaaagaatacttggtgcttattaagcattatgtgaatgtttgttaaataartaaatagatcatgttgatcaaagtcagatcccttaaaaatccatttgtacgagcatacatataaaacagttaagcatcaaataggaactgaaagaactggatttcattcctagcgttcgaatttctgtgtgtgttttagatttcaaacagagtctgatagtaatagtgataaattctagataattttctgtcttctctctttctcttaaaggcagaaatagccagcaataaactctgcaggcatcaggagctatttaaaggtgtcctgcttcaaaccagctacttgcttaacaaaaccttgctggcaactttcattctacgtgtacattaattggtaggccaaaatgtaggccaggttgatccttcttagaactgatgtgaatgaggagatctatcgtttcttataaatttgtatctctggtattgggaaaaaacctcctatggtgaccaagcagctcctcaacttctagaatagtgtttgcaaagaatttatcaatgcagattattgcatttttaaaacctttgattcagaataaaataaatacaccctctgtgattgaggccaagtgtcttggcaatctttcgtgcttagtacaagaagctttgctttatgctgtcatccactggaatttataaaaggaaaaaaggaagaagaaaaatatatactgtatgtgcacttcaatgatacatattgcacatgaatgccatttttctgtcttcttccatttttctcccttcttcctctttttcttttcttaaattaagcttgtatcttttttaatatttcaagaaatatttgaatatggccttttctcaattggaaatakctgttctcccaaacctcacagaggttacctttgaagttgccatatttgtgttgaaaataagggacatatcttggttcatttacaggtagaaatttgcgtaggtgccagatcatctcccctggatagtttcagcctcattgttcccttgggtgattactgcagccagccacatttttctctccttctgatgcttttttgtttcttgttgactaaaactgaagccctataaggatctttaattagtaactaaacgaatataaaactgtgggccaactactgtaagaacgttctcactgaccattgtttctcactcatattgcacacacatcacacacaccatctcacattcacactcgctctcacacacacaattttagagctggaagtaccattagagattaataaatactacccctaattcataaataattttcctgtttagacttaaacgatccacagtattctcaattaatattttaaaataaaattaaacaaggcggggctcagtggctcggtggctcacgcctgtaatcccaaagctttgggaggccaaggcaagaggatcacttgaggccaggagtttaagaccagcctaggcaacatagtgaaaccccatctctacaaaaaatacaaaaattagccaagcatgatggtgtgtacctatagacctagctactagggaggctgaggcaggaggagtttgagctcacttgagctcagaagtttgaggctgcagtgagctatgatcatgccactgcactccagtgacagaacaagaccctgtctaaaaacaaaaaaaaaattggtaaatgttagtgaactccactgttgggaagaatatgtctagaaagaggagaacatgattaggtaacctgggaagccacctttaaaaaaaaaaggtataattaatgtttgataagctgcacattttaaagtatacagtttgatacattttgacatatacatacatcawgaagccatcacaatataataaacatatccaccattcctgaaagtttctttgtgttcctgtaattttcccccagctctcaccccaggttaccactattttatgtcactatagattagtttgcattttctactatttctatataaatggagcaatgcgatatgyattcctttttttgtctggtttctttcgctcagtagtattaagtttttggctgttaaagataaagctactgtgaacattcatatacatatatttgtgtggacataggcttttatttcccttgggtaattacccggaagtggaatgtgtctgttttatggtaggtctacatttagctttttaagaaattgccacctggtttccaaagtggttgtaacaatttttttttccccatcagtagtgactccatatcattcccaccacttgttgtggtcagtctttttaattttagccgttctaataggtgtgtagtggtatctcagtgtggttacaatgtgcatttccttagtgactagtgttgaatgtctttacatgtgcctatatgccttctatatgttttcagtgaagtgtctgctcacaccttttacccatgttttagtaagttgttggcttttaaaaatctgaatataagagttgttttctttttttctttcttcttcttctttttttttttttttttttagtagagacagggtttcaccagttggccaggctggtcctgaatgattgacctcagttgatctgcccgccccagcctcccaaagtgctgggattacaggtgtgagccaccacacccagcccaaaagttgtttatatagtctaattacaagccatttattagatatatgttttgcaaatttttctcccagtctgttacttactttttcattttcttaagtgttttttgaagagcagtagtttttaattttgaagtccaatttatcgatttttttatttctacttcatgctttttgtgctataatcaagaaattttttcagaatccaaggtctctaagattttcccctatgttttcttttagaagtttgtaattttagcttttacagttcagtctatgatctgttttaagttaatttttatacatggtatgtgktatctatgttcagtttttttttttttttttttgcaaatggctatccaattgttccagagccatttgttgaaaagattatcccttgtcaaaaatcaattgaccatacatgtrccagcctatttgtggactcttctcttcttttgatctgtttgtctatttttacaccaataccacagtctcttaattattgtaactttacagtaagtcttgaaagcgggcagtgtatgtcttccaactctgttctttttcaaagttgtatgactattttatgtccttggaagcaaatagtttagtgcaggctgcaaatcaaaaacatagagaaacgaatgcattaaccaagcacttgatcaacattctcagtccttaacatggtccctttctgttggctaaaagtcaggaattttctttaaaattttctcaagttatttggagggaaaaatctatgacatgattataaatattgatgtaaatatattgtcttcgtatcatccatgtctaatttaaagtaaattacaatgacatcaaggggaagagcgcatgcttcctcttgccttagatttagagttggtggagaagaggggtaggctgggggctcctgaaaggactagattgggattaaacttttcctggactgaatctaaccactgaaccatcgcccctctccctttccctcagtcaggtttccattctttacagaatcctttgttaccgtcaggcctgggctggagcttctcttttctggtttagtgccttgattctcacactgccaggcaaaacacactccaggacttaggtttaggagggcactttggctctcaatctcaaagccctagacttagtggccatcaaagaatatatttttcccaccaggtggaaaatacagtgctcaaaatggggtgtgttcagcccctgaggggatctgggaccacagaccccgagctggtgcgtggcagcacatggttctcacaggacctgaggttaggcgtccattccccaacccctctgcaatcgggatgcccctgagctgtcaggtccagacctcaggcccacccatcagagcacttccacacccattcatcacttattttgatctttgaaggcccctcgggcagatcttatcatccttcctttgcaggcagaaagcagcgtcccagagaggtgaaataacttgccaagctaataagggcagggcaggcctgtctgccgcccattgactcacagcccccgttcctggaaaccacatttccagggcggcctctcgtcagctttatggcactgtcacaccttagctttgggactaaaatgagggtcttgccacgttgaggcagctgaaggatggagaaagcggagttacatgtgtcttattgctctctggcatccgtgggtagcctggatgtttaataaacatcatcatggcctgctggcctgtaaacgtccctttttggggttagaaggggttttgctaaggatgtgggtgacaaagggcctctcagtgtgcctctgtttcagagcggctctccggaagctggcagccacattccctatgccacacagctcctctgaggagcctctccagtctccatggaaaccgcatgtcgggagccagccggctccgtactgtggctttgtattaaacacaatgaatttaaattggatgctcggcagtgaagataatcattctggattagagagaagcctggagctcctcatttcatcattttacatgttggcacaattctcagttttcgccctgtaattcaagcccaagccgcacttacccctctgtttctaagctgcagttaggtccgatttcacttgggtttttctccattctttgaggaatcttggagctggggagcccctccgtcaggccagggctactccagcattgtgtaaaggaaatcagggggctctagagtctggctatgtgattttctcaggccccagttttcttatctgtaaaatgagaggagtaacccctcccctagagttattttaaaaagtatttattgtgtaaacatgcaacataaaatttaccgttttgactgtttttaagcgtatggttctgtggcatgaagtacattcgcattgttgtgcaaccatcaccactgcccacctccaaaacgttttcatcttccccactggctctctattgatgagggtgaatgaataagaagttcccattaaacagtgattccccattcctccctcccctagtccctggcaatcaccatcttattttctgtctctgaatttgactactccaggtccctcatatcaatggaatcattctgtatttgttgttttgtgactggattgtttcacttagcataaggtcctcaagattcattcatgttgcagcgggtgtcagaatgtccttcctttttaaggctgaataatactccattgtatgtagataaccacattttgcttctccattcatctgtctatggatacctaggttgctaccaccttttagctgctgtgaatgctatgaacatgggtgtacaaatacctatttgagttcctgctttccattacagagtcattttgagaatcaagtaagataataaatattaacaacattgcacatagtaggctgtcagtaaatgttaatttctttcctgaaagtgtgttaaacccaggagctaatgccacagtggcctgatgacttcagtgagagtgatgtcacttttgctagcaggctgcttctgtatccctgggactcgctgatctgccatgtctgggaattcacccaattcattccagggcttaaaggaaatgtcttcagcatggaaatgtgcttcgtgtctcaccataaaaaccatgcatgcttttacatttctctcaccagtgggtgttcatgtatttctagttccaaaatgtaaaaaaaaaaaaaaaaaagtgttagagctgatatatatactaacttatcagtgttctattttaagtacaccctctgggagaccctgaagccagggagggatcgcccaggctgggaggttctgtgccgagttactatttcagcagcagcatcagaccggtttccagtattacagaagaatctgggatacggagtaaaaatacctggatcgcagccttggctggtctctcaaaaactgagaagatgaccatgtctgtttcacatggctgtgaagattagatgggagagtacctcgctgcgctgatgcaggaggcagaaagggaccaggtctttgggctggtctgtacccttccggtagattctctctgtgtctagtttcatccaagagccttctataagggagcgcccccttgctgctttgaagccctccaggggtgagaattgcagacctcggaaccatctttccctggggggtcctctagtctttcyaggcattgctggggcagccctggagccagtgcccctttgtacttaggaatttgtgacagaagggaaggaggggcaggggcttttgcacagcctcctgacccatgcatgacctggctgctccctacagcttaccaatcaggcctgttctttattgatgaggctgaagggaggaggggaagcagggatttcacacagaatcacagacctttctctcacttctcagcagtggctgctggcagtgtggggtgcacctgggatctgtccacctgttaagcaggagccagggcaggctgaaatcagggcttcctgaacagatgtgttctttgtccctgggacaagaaaggtccctgggctactcacctacggggagcaggaactcaggactcccagggagggcctgcatcttaacctctaaggggagctcacctcttcttgaagccagtgagcccaggaagtttctgtgccttggtaagaggctttgcttggcttccataaccccatacccccgggcttcctcctacttctttgcaattccttcccagtctccttcctggtcttgtcttaatcttgatgctctcctatgctgtggcctctcagggtcctattccagagtgtctcttcctcttacccaccctctcctcctgtgtaatctgttactgatgactcccatttacagctgcagcccagccacctctgtgcacctccctactggacattgtgccttggatgccccaaagcctaacctaacacgctccgtgtcctccatacaaccccactcctcttccagggatacctcctgcagggaatggtaccccatccacccaagccaggcctacttactaaagaccaggggactcctcagggacacagccagaaaccaaatccaggtctgtcaggctccagagttcaggcttctcccaccattgccctgcctccatggaccatcggagaattgaactgcatttctaacaaaccgartaatgcaaatgtcgctctgagctccaaaccaaactcagcatgccctgggaccccttcccattctgtggctgtgctggacttctgcctggacccctttgtcggccatccctgacccctgggctcccagcccctcagctcttccagagtgctttctgtgccccagctcctggttcagagtgggcccattacaacagcatggtaacttcagccaagccctgttactgcctctctggttgactctgcggtgcattttccaaatggttttcctaagcctcaccttggctcagaccaacactcctgatttccccmaaaaccttccatctgggattttggttttatttcctgttctgctaagaagtctgggacaaaggacctgtgcttcctcagctctcctctcagtctcctctgatcacctccatctttagccacccctctcctgaatgaatgggaagaaggtccctccagcctaatagatgagaatatgagccctcagtttcctcatctgaacaatgaggataataatggcccctatttgggggagaattaaactgggcacaggaagtgtttgatgatgttaattattagcaattttcatcaacacttgaatgtctcttaatcagctctayctccatgtgtctaaaaattcccttccccctaaatttgattttctctctcctgatgccattttttcagtcacccaagcataaaacctcccccgttatttattttcacctcctcgtctgtcatcaaagcttgctgcttcttccaagaaacatgaatcacatatgtctcttccaacccaggctccagtcaggtccatcatcccaacactgcccttgagcttgtacactacagccagagtaatgttgcaaagtccagtgttcatgttcttcctctgcccagagcctgcttgtggctgcacgtggcttacagcagagatcaagtgcatcccagctcccccgacagcctcccatcctgggccagacatgtccagggatggcagtgtggcctgactcctcyctgcaaatgtgctcctaaacttcacactccctaaactccctcactaccaccacctccacccacacaagttgacaaactttgccgatgtgatggaatcagattaatcaaagtccccacagtttggtcctaatcagacctgcctcagcccgaacctcagcctgttctctgtcttccaactgtgcccccgactttgctacaccatttcctaccttggagcatcctggcctggtcaagtcatgcctatccaccactcacagccttcctatcctaacatgacctttccttccactgggctgcttttgcacttgctgctctccatccgcatcgaggaatactatctcttgctgccttgtagtctcatagtattttgaagtcatttctgttaaaactgaacttttctcctttcctgtttcccagctggactctaagctccttaagatgmttacatttcttcttctggagcatctgatacacataatagagggcacatagtctgcgcattagtgctacctacaaattatgcttcttgttcctcatgaatatttactgggctcctactatgtgcaggcactgggctaggtgycttatatgctgtatgtcatttaattctcatagtaactccatgagggaggtattactatctccgttttacaaatggagaaacggagctcaaggagattaagtaacttgctgaagatcttacaactaataagtgayggagctggaatttaaacgtagatctgcctgcctgaatgtctgattcttgtcaggatactatagtgagagcaaagtamggtcaggaagtgggaccatgccctggatgatgtggtaaaggctgtagacccagaaggtaggagtggaaagtaaaaggaagtttaggagtgcaatcaattaaaaatgtgctatttagggaaaaacctgtcagcttcaggatgagctcaacaggctgcaaattatcagtcaagataaggcctgagggctgtttgtagccagagggacagagagtggggcctcggagaacaaatcatgcatctctcggatgccctggaagaggctgttttcttaagaagtatttgacagaaggtgctggggttgggtgtggggttggggggtggtgcaaagaggatggagtgggggtcagcatgcaagctgcctggaaggggatcatcagagaaagggccaagtggtcaggtgtcctcagcaaccccccacccatgtgaattagctgagttgacaatgaagcccagtgtaaggcctgatccccctacatcaggccagcgcaggtgataagctgatggctggactggccacataatttgcagggcctagtgcaaaaggaaaatatgagactccttgtttaaaaattattaagaatttccagatggtgacagcagaacattaaaacaagcacggaatggccaggctcagtgactcatgcctgtaatcccagcactttgaaaggccgaggcagacagatcacctgaggtcaggagttcgagaccagcctggccaacatggtgaaatcccgtctttactaaaaatacaaaaaataagccaggcatgatggcacacgcctgtagttccagctacttgggaggctggggcacgagaatctcttgaacctgggaggcggaggtttcagtagctgagatcatgccactgcactccagcctgggtgacagagcaagagtctgtctcaaaaaaaaaaaaaaaaaaaaaaaaaagcaagtgcagagcccttctaaatgtagggccttgtgcagctgcatgggcgacatgcccatggagctgggtgggcctggacagtgggcttgtgatttgaatgggaaaggtgtttcctgcgtgccaggcatggttccaggtaccatacatgcatcacctcacttgatgaaatgcttggaccctttttgggggttgttcacatcccatggtgatgttcagagcttgctttccagagggccaataagtagccaacagaacgctgaaggtgaaggaggttaccatgagcaatagagaaactaccgagctggttattttttttttttcctctggwacttcgggaggatgkgaataaaagatggaagataattttaatgtgaaaagaaaaggaagtggttcagcaatcccaagagaggcagatccatccgaacaaatgatagcttttccagcagcattaagagctgcagacatgtttgcaytgtgcttaccmgtttacagagcacatccactcgtcatttgattcttagtgcagtattgttccctctataaagattcagtwggccttaatctatatacataccagtaatagtagatcctgcttttctgattccagtcacctcctcaaacatacaccccttttccatgcatattttcgtatgaagatatgctctaggaagtctctccccttcctcaatgaaaaattccatgaattggctgtagcccaagtgccttctcaatagcagagcgcaaagtttgtgccttgaccaggttcttggccttgaagcaagagaaccaaatcttgtgggcagggttgctggggagcaattgctacaggaaattcagcaaaacatattggagcggcagggcagtcctgtagaagatggtaagagagtgamtcttcaaaggtctttgtcctgataaagctggaagtgaccaacgcattgttctctccaatgccgtgatgtcagcaaataaatcttatctgaagggccacaagtatctgaaatgtctttccaacttgctgagcaggaccctggtcaatatggagacccccatgagccccacrgtggtctgatgaacttctgaagtataaagatggtgtttataaaaggtttagactgagttctagtacaggttcctgcgccttgccaagtgtatgcctggaaactgtgtcataaaatggattaccattaaatatactgagttttcttagggaacaaatgagcatcaaataaatccagctttacccagtagtatgttataaatgtcaaaaacaaaataatagcgacactttgaaattgtaaaatgatgtttcatattcttccaaataatatacaatggtgcagtgtctgttggttaaacaaatgatcctaatgtctctgttaatttaatagtgagagatgtcaggataaaaacaaatttccacctatacaatgggaaatgcttggctggacagatttttttaaacatttatatttttaaaaataagggcttgggttgataaatgggcacttttggtcagccaccaggctcaaggaggctgttgtgagatcggctgttccatgatcaggtctggaatagttggagatgaggatgttctacaaagctgcaattctgcttcctggcagtgtccacctagaatgaggtctctgctcatatgcgttcaagaatgctcaagcactgtgtgaagttgtaaatgtccatgaacttggaaatgcattcatacatggaggcatgtttatacaatgaatcaattaaaaggaatgaaataaatctacataaataaatcttaaagataatattgagtacatgaaagcaagttgcaaaagaatatagacagtatgatagatattatttgtataatttttttaattgtataaattttgtataaatttttaaatgttatgtgtttacatagtaaaagcataaaaacatagatgagaggaatgtatgccatcttcagggaagagagggatgggaataggatggagggctttagttgtatcagaaatatttcatttctttttttwwaaaaaaagcatctgaggtaaacatggcaaaaatgttaacatctgttaagtttgagtagtggaaatatgggtatatgttttattattttctgtattttactctgtttgaaatatttcataactttaaaatattttaaacacattaagaatggctaaaattttaaatactgcagttttaacttcctccaaatttattytgaagtgtacattataaaactcatatattctgttaaattttggagaagtagaaaaaataaattcctcagaatctcatcactcaaaaataaccattgttggccaggcgtggtggctcacgtcgataaccgcagcattttgggagactgaggcatgcagatcacttgaggtcaagaggtcaagaccagtctggccaacatggtgaaacaccatctgtactgaaaatacaaaattaaccgggcattatggcaggtgcctgtaatctcagctactcaggaggctgaggcaggagaatcacttgaactcgggaggcggaggttgcagtgagccaagattgcaccactgcactccagcctgggccacagagcaagactgtgtctcaaacaaacaaaccattgttaatattttggtctatttccttgcatttttatttcttgtgtggggagtatgtgtgtttaaacatggttccaagcattttgaatcaagtctttttcactcattacagtataaaactttttccgtgttttgacagccttcgtgaacatcatttttttaaatataaagtttcacatttaatttggtcatgaattcataaatacataagtattttgtacaccatgtgcttccttgtattgtttgtattataacacattttaaatagggacctttgacagggcagaagcatgaaaggacaccaaccacgagcaacacactatactatggctgtcctgtgtcacatgctatttggcccggggatatagcaaaacctaacgtaactaaacaaaaaaaaccccaattatttcatgttgtcaggaagcttaccttaaaagaatagctcggcctggcgtggtggctcacgcctgtaatcccagcactttgggaggtcgaggtggatcacctgaggtcaggagttcgagaccagcctgaccaacatggtgaaaccccgtctctagtgaacatcatttttattggcttccattaaagatcttctgcagcgtacttaaccaacaccattttttgtgtaaaaagtcatgagcattcagcaatcacatgttcttaaacatcatccttttgaaagcctcgggaacacaattgggctgtgccttgctgccgatttctacaaggctgttttgtgggggatgacactaaaaaggtctgtcacatctgtgataccactttcctgtgaaaacagagcttgtcagcattcatcctgtgggttggaatggtacatattcaaaaagccaactctatgtatgtcttgcctaagaggaaacaagtgcttgaacatcagtgtgtggtgtgggcttgcgagcctgcagctgggggagagtttgctgatccagtgaaactcttgtttcgaggccttggggtaacagcggtaataattattccagatacttatgtgcatgcccctcccagctcatagatgctctcacatccattgccacctgaccctctggggacccctgagaagtaaggtgcaggtcagggggcacgtggctgctcctagattacaaccaacacgtgggaaagtcaagaccacctcctatgcttccaactccttcctgaactattttcagttcctgtccttagacccaggcaaaaggggcctcttcccagggctctggactttagggtcctcttcgggccctccaacaacttgtacccctgccccataggtctggggattgtgtctacccagaccccactcacccattcctaaactacactctgggtccctagaattccctgagaaacagccctgagcattccagagcctacaaaaccccgaatctctcctcctgggggacagaccaccaatgtgtgcataccaggctcaaggacagcatttttgcagaaggtggacagagcttaggtctgcaggctgcaggatcaattcaggataggcgcgtgtgggctgggggcaggcacagaggctgaggccaactatccctgaagtgtagctcagaattttaaggaacttgaggattctaagggccaggcccttttggcctttatgaagatgtatttgacagagtaggaggatagagtatattctgtgtaatggttttttagcttgatctaacttttgagtgtttagagaatcagcacatgatcctccttttctcctcttgccctgggacccacagtatgaggactggtcctggctcttttatctcactgtgctgtttccaggttcctcttttcctatccaagcctgcagaggtactgtgggagtgcaaaggaaagcaatctagagccacagaaaaatgaaacaatttagtgtgtaaagctcaatatacacccccacgtgcacgtgtaaaagcaagagatgcatttcaggacaaaatagagtacaaccacctgctgtgaggatgaatcagcctggcacgatccagcaaaatcggaaatagaagcctgctagtaaagctacaatctgcactgctctccttctcccggttcctctgccgcccccatcacagctcctgcaggtgccacagaactaccaccctctgttggttgctttaagctgtgcaagcagtcaaaccactgagttccccaggacgactgggaacattctcgctggcccagcctgcgtcatggaacatcaaggttgtgagagttttcattttaattgctgttgggccactgagctaattttttttcagtcccttattccccagcaatatttttcatttgtgatcaaggatttaactgaatagagaagcatgaaaccattaagacaatttcatggagctctttttctcccctacagaaaacagataaacacctaaattctggctgggtgcagtggttcatgcctgcagtcccagcactttgcgaggccaaggtgggaggatcacttgagcccaggagtttgaggctgcagtgtgctatgattgcaccactgtactccagcctgggcaacagagtgagacccagtctcaaacaaaaacaaaaacctaagttctgagtaactaaacacacatgttaggacaacacttttaccacatctgttccataagcaatgttttacttaaccttcacaactacccaacaaggaagccaccctattgtgtaggtaaagactttgcatccagagaagttaagtaacctggcagaggttattccaaccatgagggagcagagcagggacttgaacgtggagccgtgaagcactgtaaggactcaaaccatttctcaccagaaaaagagtcactttgtcttagagccctcacaaagactctcatgttatgggactctcaattatttaatttaattaatttatttattttgagacagtttcacccttgttgcccaggctggagtgcaatgccgcattcttggctcactgcgacctccacctcccaggttcaagcaattctcctgcctcagcctcccaagtagttgtgattacaggcacccaccatcacacccagctaatttctgtatttttgtagagacggggcttcaccatgttggccaggctcatcttgaactcttgacctcaagtgatccacccacctcagcctcccaaagtactaggattacaggtgtgagccactgcacccactctcacttattttaattctattttaagttttgtttgggaacaacacattagcctgaaatagcctttgatcgatgctagttttggaacttcacagaagtcccctgatgaaattcacttttaaaaagttgagtgggggaatctctaatacagatttagtcatttttcctgggggttcactctatgattgcgagtgaggctttttaacaatttctttttaaagtggtatcttgcggagttgtgaataggatccgttttcactgataaatcacacatgcatctaaaaaatgcctgtctcaaacaagatagatgaaaatgaagcccctatgcttagaaaaactgaagacaaagaccctgaggttgaagatgcgtgcaaaatgtttgaacaaaattgcttcatgaaatttgagagcataaaacaaaacaatatatccaaattaacattttctrtatcgtggttcaaatatacgtgtgtaactaagtaaatgatataaacagacatttgattatgccatcaatattatgttattatatgatacaacactatattatgttatatattacatgcagacatttgatcatgttatctatagagtcaattggctaaaaatcgtttggggagagaatctcctcattgggaagataggccttaggtcgggtgacccacgatgtggtttttccagcgcgccaagctgaaaccctggcggaggaagaagcaggtttggggacccgtggtcatgatgaaggtcgcgctggctctcgcacctccacatggctctttacagtttcccaaacctcgctgcccttggtcctcacagcctcttgtgaggcagggcctgtctttgaatggaccatgaggaccatgtctcaccacatcattgactcgggggcaggcagggctgtgacgagactgccttttcccgtcttcccaggcagcactcgtcggaggcaccaccatgatcatcggccacgtcctgcccgacaaggagacctcccttgtggacgcttatgagaagtgccgaggtctggccgaccccaaggtctgctgtgattacgccctccacgtggggatcacctggtgggcacccaaggtaacagtgctggtgggatcccagaagaaggcacaagtggtcttgtaggcagaggggctggttggggtgcaktgcctcctgcttgtgtggggcacccctcccactaccatcctagctccccacaatgccaaaagaaaacacacttgggattccataaggggagcggatgggcttgtgctgcttaacttaatgagccattttccggcaggcacagagaggccaaggccagagcccaggccttggggatgcagtttcattgctctgaccatgaggctcttaccgtctcgtgtgaatgtagggcaccactgacaggtcatgggcagtgctgctgagaagaggcctgagcagggctcaggtgcagagggtcatatcccatatcctatgtgtactgagagtccaccacactgcgctgaggtctccgaactgaggctcccatcctgcctcagtactgtctggaatgaaaggaatgtggtatgcttttttcctactgggggcccagcttctgctctgagaagcatcgaggctgtcctggtctgtgactgaggctggcrccccctgagcctttctcagttcagcctctgtgcctcctttgtgtctgtgcccctggcctctggctttcctgtcctccccctgcccaggccccagggtcagagtccagactcctctccccggattcccacttccttgctcttcctaatctacaggcatttcgatttggctttgtttctggggtttttctgcttttttgcccagggtagcagtctggatattcattctttcatcaattatttattaagccccatgtaccagtactttggtgggtgccccagaatcataaaaataataagcattattagttttaccaactcaggaactgcctcttcattttccgtcaaaaacccacttgtaactgctgctaatcagagtgtatattcagggcagcttgaatctgtgctcccaggtggacatcctcaagctttgagctcgaataaactctgttcttaatcataaaaagaaaaaagaagttttatgaagttcttcagttgcaggccctggtataaagggcctaacacccttctcagatgataacctaaagcctcactatatttctgccctcgggtcttagccttgagctgggggctcacccggtttcttcattatttctgacctggcacttatagaagacctcctcccggttctgggccagaggtgcagatcacgctgaatgtcagccattccttatctcaaatgggggtctcctttttggacactctcctgggtgagaggcctctacctctgagccactctctacttcccctggagctggcctagaatagagggtcttctcaggttcccagcagcacagaagccaggccaaccctccctaatttcctggagcttatggtgactttcatgcatcaggaatttaaaattctgttttataataatcaawtaaatgtttctaattatagatgtgaaaaatagaaaagaaaggaagtacataatccagtaacccccagcaccatccctgctgttaaacttctttctttcccatcttttttcatccatgctttcacagagtagctattttgcataggtgtgagcattttctattttgccatgaagttcatgaaccagcaatataatggccacttaatattctaccaagtggatgaacctgaacttattttcctgttatcaggccaatgttgcttccatgtttttcctagtacaaataatgttaggaatatcctaactctcataactttgttcatgtttagctttgttcctaaatttggttttcccaggacctctggatttttagcattagtatgccttctttgtaatgccaggcaacagcccacagaaattaaaatcattattcctatgtttaccattaaggctggtttggagacagacataggggacaggcctaagtgataggagaaacgtgcctataaggtaacaatgtggctcctaaactgtgtcgtgttgacaattttcacagtacttccgcatccatctactcaggtggcctcacagcagcctgtggggtgggaggaaagtgagatagagaggtgtggggggtcaaccgacagactgagctggggcaggccccacatctcccccatgctgggccggtgcctgccagtcggcctcttgggtgtctgccctcacgcagcattgcccttctacttgttctccaggtgaaagcagaaatggagacactggtgagggagaagggtgtcaactcgttccagatgttcatgacctacaaggacctgtacatgcttcgagacagtgagctgtaccaagtgttgcacgcttgcaaggacattggggcaatcgcccgcgtccatgctgaaaatggggagcttgtggccgaggcaagtctgcagccaagaatattggatggagggacaccagtggagacagttagttctcaggggattcctgaccacccgtcactgatcccacaggattcagacaaaatcagttgttaaagtgtgaggtgtggacaccccagctgtcagatcttggtcagaaaatccaaactttactactgtctgtaaaaaacaaatctctttttatggttcaaaaaggcttctaagtcgtaggtgatgatgtcttaattctaatgatatgagatttaaattccattatagcagagaatttggagcacctctcagacatatttttaatgagatttgatatacagaataaataagaatccgcttcccatttggcctcttcagaggatctgagacattaaagagatctattcatggcaccaggaaggataagcctctggtgcattctcctaggtcttggggtaagggctagcctagcagttgctggaagctagagcttagtctcgatttccagagagggaattctgagtttgaaatcagtaaagagtgcttgtctttggtgtcccaggcctgttgctagttataatacttaactgtatttttaaragaacaagatatgttcagtcattatgaagtgagaatcaggagagccccactgcatgggcggcctgtgcatgctctgccttctttagaagacgaacactgcagaagtgagaaaagaagcaagcctattgaaacaggcggtgtctagcatatttcactgtcccttgggttcagtattttcttacacrgtgtctctgtgattctctccattttctttctcttgctgttatccagggtgctaaggaggcactggatttggggatcacaggcccagaaggaatcgagatcagccgtccagaggaggtgagaaacacttcctgtagcctttgtcagcgtctctcatgtagattgacagaatcttccaggatggaggagacatcaaacatacaaattagccaggcacaagggctcatgtctgtaatcccaacatttgggaggctgaggtgggtggatggcttgaacccargaatttaagaccagcctgggcaacatggtgaaactccgtctctactaaaaatacaaaaaaaattagctgggcatagtggtgcatgcctgtagtcccagctaactacttgggaggctgaggcaggaggatcacctgagcccaggaggttgaggctgcagtgagccgtgatgatgccactgcaatccagccaaggtgatagagtrtatatatatatatataywcacacacacatacatatatatacgcacacacacgcacacacatacgtgtgtgcgtgtgtgtgtgtgtgtatagcatcattttctccacgggtgaaatttccatttgattctgatttcaaggatctaggggagacaatgtcagcacacctggggttgctgtgcccaaaactgaatcaagagacaaaagacagactgaaaaggccttcaggtgttagaagaaatttcaaactataaactctgcctttgggggatgacattcctttgagyatctgaggaatactttggaccaggggtcaccaacccccaggtcatgaaccggtacaggaccgcagagcaggaggtgrgcagcgggccagctgagagccccctgggctccacctcctgtctgatcagtggtggccttagattctcatagaagtgtgaagcctattgtgaactgcacatgcgagggatctaggttgcacgctccttatgagaatctaactaatgcctgatgatctgaggtggaacagtttctttctttattttattttatttattttgagatggagtctcgctcttgttgcccaggctgtagtgcaatggcgcaatctcggctcactgcaacctctgcatcccgggttcaagccattctcctgcctcagcctcccaagtagttggaattacaggcatgcaccgccacacccagctaattttgtatgtttagtagagacggggtttcaccatgctggtcaggctggtttcgaactcctgacctcaagtgatccacccacctcagcctcccaaagtgctgggattacaggcgtgagccaccgtgcccagccctgaggtggaacagtttcatcctgaaaccatccctccccatttcccaccaccactgccccatccctgtcctggtctgtggaaaaatcgtgttccacgaaaccggtccctggtgccaaaatggttggggactgccgctttggaccctttccaccaaaaacaggagacacatacaagtctatgctcctccccctcattacctgctgagatggtcattcaaagctgttttccgcctgccctctggctttatccctgtgcacagttttgcatggcattgacacaaatcccctacagtccccctgctaaagaattctgctctagagggaccacattagacraataacgcattcctgccctattaccctgtttacacattctctactgttttagaagagggggagaaacttctcatttcttcaaagcctaaaaatgcagatgggtggttggttatccatgagggattgagggggaggcctygagggacaaggagcaggacacaggatgtggtggcactgccattacccagaaaccaagttggcccacgagtgggtccgctgaggagtgccccctcactgccctgatcagtgcctgtgtttcagagcccttgaatatakgtcctgtttggcacttctgaattggtagagaaacacacaccagattcgactgaaacacagagggtatgcctgtgagaacaggagagrrsaaggggtggacacacacactagactttctttgttacttaatacaagggaaagagcaaggctttggctgtggtcgtaataccaataattatcaccrccattatctattggttaaaggtgggagggccctgggtctatgccaggggagatgttgctccccaggggaaatttgacaatatctagagatatttttgcttgtcccaacctggggggcagggcggatgctacaggcatctagcgagcagaagccagtgatactgctaaacatcctacaatgcgcagacacccccaccataaagaattacgcaactcggctgggtgcagtggctcacacctgtaatcccagcactgggaggctgcggcaggaggattgcttgagccccggagtttatgaccagcctgggcaataaagggagaccccctccatctctgcaaaaactttttaaaaattagccaagcatgggccgggcatggtggctcacacctgtaatcccagcactttgggaggccaaggcaggcagatcacgaggtcaggagatcgagaccatcctggctaacatggtgaaatcctgtctctactaaaaatacaaaaaattagtcgggcatggtggtgggcgcctgtagtcccagctactcgggaggctggggcaggagaatggtgtgaacccaggaggcggagcttgcagtgagccaagattgcgccactgcactccagcctgggcgacagagcaagactccgtctgggaaaaaaaaaaaaaattagccaagcatggtagcgcatgcctgtagtcccagctgctcaggagtctgaggtgggaggatcgcttgagccctagaggtggaggctgcagtgggccatgatcatgccactgcactccagcctgggagacagagtgagaccctatctaaaaaaaaaaaaaaaatatatatatatatatatgtgtgtgtgtgtgtgtgtgtgtgtgtgtgtgtgtatatatatatatatatatatatatatgaattatacaactcaaatgccaatagtaccatgcgcagaaaccctaatctaggctaatttccggagtcaaatcagccactatttctcctttgctgcagttctgaggtggctatggagagaatacaccagaaaacaaggagagacatgaccttgggtttttatttacttttgtttccttgccttttaattaagccccaagtagcatccagcaagggcgtgcctggtattgtaagacctagaattctccctcactgtgagccaaggtagttggaggttagtgcctctgcccgggctttgccccgagccaacccctatgggtgcagttgctccatgaaggggagagtatggtgtgggtatccttggaggagatggtgaagtttggtttcctcctgtcctttgtttctaacagctggaagctgaagccactcatcgtgttatcaccattgcaaacagggtaagtcccccgatgtccactgtgggattagaaaccaaccttggccaggcacggtgctgatgtctgtaatcccagcactttgggaggccgaggtgcgtggatcacctgaggttaagagtttgagaccagcctggccaacatggtgaaaccccattgctactaaaaatacaaaaattagctgggcgtggtggcgtgcacctgtaatcccagctactcaggaggctgaggcaggagaattgcttgaacccaggaggcggaggttgcagtgagccaagatcgtgccaactgcaatctgtcctgggtgactgagcgagactctgtcaaaaaaaaaaaaaaaaaaagaaagaaaagaaaagaaagaaaggaaagaaagaaagaaagaaagaaagaaagaaagaaaagaaaaaagaaagagaaagaaagaaaagaaaaaagaaagagaaagaaagaaagagaaagaaagaaagaaagaaagaaagaaagaaagaaagaaagaaagaaagaaagaaagaaagaaagaaagaaaagaaagaaagaaagaaagaaagaaaaccaacctctacgatgcagccccattctgctctgggtgccagcaccatgtcttgcccacaggaacccagagctgtttgctgactgagcgctgtcatgcccaccatccttgcattcacccttctcaccaccagctttccattccaccccgccgagcctgctgaagctcagttcattgctcacgtgtaaactcagtccagctcctaaactctacatcctcctaatgtgataagcaaagagaacagaataacatctggggaaacagaatttcccaattgcactttagagctctggccgctggacaaggacattgtttcactgtcatgacaatagttatttatcaattacttcctggtggaacttaacccagaataaggaaagacccaaacaacaaaaagtcagttccttgccttttagctcaagcatatgctcagaggagttaagccatggaccgtggttgcacagcttagtagagaaaaagctaaccagtattacagtccaggtgtccgttcgcaaggtcagccttctcttgcctagactctgaaccctaacccccttgtattttgttcatctccagggtgcattctgtctactgataagcagccttcagacagcaggcatcgtaattttagatacagaatacacgactaactctaggtcatcacgtttatgaacaggaaattaaaataggaaaaagagttccccccttttaaattacagtcatggttgtcagatgggagaaaatgykaggttcagacttracggtcttgaacttcacaggctgggcttcccggtgggctctggtgctggaggctgttctctgcctccccgtatcatgcagttcctgcaaccttgccctgactgccagccctgcattctccgcttaaggactgtcaccttgagggtggggttgagtgacgcagggggaggcgctggtgccagggctgactttgccagggttattctgatgcttgtgaagtttatgggtcaaccctccctacttcccactgtttcttgtgtttagactcactgtccaatctacctggtcaacgtgtccagtatctcggctggtgacgttatcgcagctgctaagatgcaaggtgagtccatagacttggctggacagagcaggtcaagtggagggactggagatggatggggcccattagccgtgctcactcctggccccggctcctgaaaccaggacctgagccagcccttccctttcatctgccaccgtcttcctcagagctgccctgtgctatgctggctttagtctgctagaacatgagctttttcttctgcaaatttgtakgcataacagctttacggaagtgtctgtcacttctcctgggtctggtaacattttccaagttttaaacccactcattaattagtgtctttttggcctcatagattttactagcagttgccttggcaactaacataaaatgctggaccagtttcagtgggcatttcaggggctgtttgggaagtccctaaagaaagaacagtgtgtgggcccagcttccttttagcctcctggaaccctgtgtatgagtccgaggggcacttgtatggcttctgttgcggatcgcctggcagtacctaaaggcttgcagatgcttggagtccagccccgccccaggtgctggtgagggcctggcagcaggagaaacaaagtcacagtcacaagcctggggagacagatcagaagcaagggcatctcagccttcaactataatcgatcagaagcaagggcatcctggccttcaactctatcgccctctagatcccgccacctgcctctcccctcactgaagccccttggagggtctcgcctagactgtcgtcccagcctggtgactgctcccacctcctgtctccctgtcctccagccctgctacggccctccctgtcctaccacaaccgttctcttgaagctgctcacagcaactgcctgtccagaaaacagtctagactgctctttagcgtggcattcgtggccctgcatgcctgttcacccaccgtcaagctccatctgccaacagcaccctgcacacaccagtgctctggtcatctggccaaaccagactcctcaaagtgccgcttggtcctgctgggcctcggtgcccatgtccctctgtcctccttgcctaagtcagcagaatagggaggctctctgggcttgaacccagctgtgctcttaaaagccctgtgagcttgggcaggtcccttcctgtctctgacctcagctccttcacctgtaaaatgagaggcacacaccagcgatcrctcrggttcggtggcttcctggttatggttctgacctttcttcttccagggaaggttgtgctggcggagaccaccactgcacatgccacgctgacaggcttacactactaccaccaggactggtcccacgcggctgcctatgtcacggtgcctcccctgagactggacaccaacacctcaacctacctcatgagcctgctggccaagtaaggcgtttcagcagcacattgcagggatgtgtacatctttaggaagacgtcatagagggcccaggaaacaaatctgagctaggtttgatttcattgtgcccataggatcattgtgcttttcttaccttctctgagcccatcagataattgccatcctattgggattttatgaccgcttgatayggagtgagatcttctgaagtataagagtgaagagcacatatagaactgtgaaccgtggttattcggaatttcaaaggacattgatctcttactctaaagcccagtggggagctgcagaacgtggcctgtgacttatcctagaatgtaggggtcctttctgtttcttttgttcacctctccctcttcttgttggctcccgtgtgccccttgtctgtacatccctccttctgtgggtttctcctcctttccttcccctttccctttttcttctgcactttctccccctttccttcccacacccttcctccagatctcctttctccagctcttctatttctgacactgctttttccccatgcaatcccaatctaaaggaaatggtttgatgaacggtctgaattcagtgggacccaattatggaagggtttctgttttatcccaataactgcttgcagcttctttctctctcctattaacatttttggggccaggtgcagtggttcacacctgtaatcccagccctttgggaggccgaggtgggtggatcacttgagatcaggagttcaagaccagcctggccaacgtggtaaaaccctgtctctactgaaaatacaaaaaattagccgggcatggtggtgtgtgcctgtaatcccagctacttgggaggctgaggcaggagaatcacttgaacccaggaggcagaggttgcagtgagctaggatcatgccactgcactccagcctgtccggcgacagagcaagactccatctcaaaaaaaaaaaaaaaaaaattgggggagaagacgatgctttctcttcacttttgggtattaaagttccatccagtttaagacttcatctccttccctcctgatccccagctcagcttgggttggggtaggaggactaggacaaaaggcgaggggattcttctccatacccaagcatgcatccctcccagcttgcagcactggcaatgcctctgtgaacaaggacctgcacaaggcaacttatgcctggccaccttctacagtatctgaggcccagaggaagcccacacagcctttctgctccctgtggctcagaggcaggtccatagcccacagcccaggcaaggtgcccactgctctcagctctgttctccacaagtgaacctcttgaagtatgccctccttgtcttcagggtggactggtgaggagagggtatggaagccccactcaactcaggaaagaggaggggagggaatgccaggactctccatcctgccaacccctcagtctccctccgagggtcccgctttctagacctgggggatggggattcgcctcttctaagatggtgcaggagcagtggagggaagcgactggccccaccgaagatggctstcttagataataaggtgcttgtctcatccatgtccttagctttcagttctggttgccaaccactggaaaactcccactcccatcccgttatgttcacaacctaaacagagttggggggtgcagggcttagccaatgcgagtggagtgccatcgataggggcgtgggcraaggtggcctctgtggagggcagtacgcaccacggcatggggatggtcattgtattctgtcccatagccttggtgggtgccaggcggcagcagctcttacaatatttacatatttacattatgtaaataaatatggagggtaaagattaagagagaaatgctagatcagctcttactcttaaaaaatgcttgttttggctgggcatggtggctcgcacctgtaatcccagcactttgggaggcggagtcaggcagattacctgaggtcaggagttcagcctggccaacatggtaaaatcctgtctctactaaaaatacaaaaattagctgggcatggtggctcgtgcctgtaatcccagctactccagaggctgaggcaggagaatcgcttgaacccaggaggcggaggttgcagtgagctgagatcgcacaactgcactccagtgtgggcaacaagagcaagacttcatttaaaaaaaaaaaaaaaaaaaaaaaaaaaaaagcttgttttgagaagaatcaacctccttttcatcatcagcaatacaataaaagaaacaattaccaagactccactataataatgtgggcttggttccaaggtcaagaatcttttgaaacacccctgcttgctacaagcaaatttactgaaagaacaaaaaagataataagtgcttcaacccacccaaattacagcgcccaaacccacacaaattcaaatagactggaataagtatcattgaataatttaagtttttatatctagcttactttgtcaaatgtattttaattatttaaattaattctatttatttaagtagaaatgtactttttgtgttatgataatagtctgaatccctttttaatccctttttaatcagtgcatattgtaaatgggtgctactttataggatttggagcataattttaatattttaatatttatagaaatttatgatgactataattttgcttttgtaacacattattggttataatttatatgatgcaagatacttgatagaaaattcagacaccaattattattcctataagaaaatatgagctgtttcctaattatctactttagggtatgatttgtgatttgttaggccctgcaggaataaaaaagtacaatctatagatataactatttatgctttattctggcttgtttttttttttcagacagggtctggctctgtcactcaggctggaatgcagtggtacaacctcctgagtagctggggctacacgtgtgcaccaccatgcctggctagttttttgtttgtttgtttgtttgtttgtttgtttgtttgttgagccagggtctcactctgtctcccaggctggagtgcagcctcccaaagtgctggggttacaggcgtgagccaccctgcaccaccgtgcccagcctaatttttgtattttttgtattttttcatcatgttgcccatgctggcctcaaactcctgacctcaactgatccacccgcctcggcctcccaaaatgctgggattacagatgtgagccactgcacctggcctaaaatctggtttcttaaagggacaagaaattttttcatttgatcatataaaatgttacagtgcttagcaaagccagtcatgttttaaactttaaatggtttggatgggggcttcctacctcccagattcagggcagcactgagagagctcagagggcctcctagaatgtaactaccgtcattcacrgctgcttagtgggtacctttgtgtaggagccttttcagaaagctgggtgctcaggaagacttgctggttaaagagcaggagttgagcctgttgctctcagggtccctgacctgcccttcatgactgcagtgggcatcttctgccctgagccctgctcaggtatccagagggcccctcaggagaaaggaaaccctaaagattccattcatctatcagggcttctgcaggtccagagagtgtggggagccttggggctctgcgggagaatctcttgcaaagagtctctgcaagggccagagcagcctctttggcccagagaaggcccagcctaccgcacaggaagagcgatgcatcttcaccacgggtttggccaaagacattagtcactgggcaggagctgagactgataagccctgccaggtcccccgtggagacagccctatggagctaactggccatcatctgagagccttaagaatatgcttcctcaccaggtcagataatgctttctgcccccacagtctcctggaatgggcatcttagatggcccacaggcactcacaaggctctggggcctcttacagagtacaatgggacccctgcccctgaccttcagggcacccacagtgtggtcccagcagtcatcccctcccccacctgacccccctgctccagccaggcctttctctggccccgcaaagccatttcctcttgaggccctgacctggtttgcgtgggcattctctctcctccgcccctcactgcctctgagcccttggcctgcagagatctctgaatccaggccacctgcctgcctccctcattgggcagaggatctgctgccatgagccctctctccctgttcttccctacgtcttctttggcccaggagcccctcgagggcctgcctgtgccttagccacccacagccttggatggaggatggctttttttttcatcttttcagacagagtctccctctgttccccaggctsgagtgcattggggctatcttggctcactgcagcctccgcctcctggattcaagcaattctctcacctcggcctccagagtagctgggattacaggcgcccaccactacgctcagataatttttttctatttttagtagagacagggtttcaccatgttgccaaggctgatctcgaactcctggcctccagtgatgcacctgcctcggcctcccaaagtgctgggattacaggcatgagcacctggcccgaggacagccttaatatatgtgtgaggaccgtagtcatgaacggcattggggaagaactgagtggcttgcataccactctcggtctattaagtcaggcttctagctcatccctccttccccttctgggccattagaatccccacatccaaggaaggctatgagtccaagttattcaacaaagcttaacactgaacttgtgaatgcttgttgccagcaggttggggttggagagctgatgagagggaattggtatacaattccatgagagtagaacyacctccaccatctcacttcagctagactctaagttcggcttttctctgctatcttcactcttaaacattgctatcccaaggctctcactgaagtctcctgtgacacagacagactgtgccacactcattctgtagatgagtaaactgaggttcacatagatgcagtaactcacgacagaccacatggcctaagcggcagagctgaaattggagtcggctttgcctgcttcccacacggaggattttccctatatctatcctcaccctctaagttcctcacctcccctccccttactggtcacctccttttctctacccagtgacactctgaacatcgtggcatcagatcaccggcctttcaccacaaagcagaaagctatgggcaaggaagacttcaccaagatcccacatggagtgagtggcgtgcaggaccgcatgagcgtcatctgggagagaggagtggtaygtttcctagagccccgccccgatctgatccctgctctaatccccgtttcatccccgttctaatcccaataagagtattcactcctcagatcctgtcaaagaatgttcttagaagggctggttcaatcccagctgtttgtttcactcaaaaacaaaacacaaaaggtctttcccccaattagaaaggtagtaagacctattatggaaatttggaaaatacagaaaagtataagaaaaaaaaaaaccttaattccacgcctagaaattaaactactattaacattttaatgtatttctttcatttagttctgtgcatgtactgtacttttttttttttttccttttttactatgttgtccagacaggtcttgaactcatgggctcaagctatccttccacctctgcctccttaagtgctgcgattataggtgtgagccaccacacccagctatacattattttaataactggcttcatatttttttcttttaccaactgctatactaaccaggattttttttcttcatataacactataccctgagtgtctccctatatcagtaaaaattctttaaaaacatcttttttcagagctgaatgatattttctccaatgaaagtaccatactttatttaatccttccctgatgtttgggactttcggctgtttctaatttttgcacttacaaataatgctgaggagaacctctttgttcaggagtgtgtgtcagcatttctgattattattattattattattatttattttttttttttttgtgatagaatctccctctgttgcccgggctggagtacaatggcgctgtctcggctcactgcaacctccgcctcccgggttcaagcggttctcctgcctcagcctcccgagtagctgggactacaggcgtgcgccactatgcccagctaatttttgtattttttatagaggcgggttttcaccatgttggttggtcagatggtctcgatctcttgacctcgtgatccgcccgtcttggcctcccaaagtgctgggattacaggcatgagccactgcacccggcctctgattattatttctgattatttccttaagacagcatcctagaagtggatttttaggccaagggatgtgaacatttttaaggctcttgatttgatatattttgtctaattgctttcagaaaagataagaactgggacttcatttgaataccacctgttccgcacatgaagaataagtatttttggtcttgatctatctcagattagatctaaaatagtatgagccccaaagagatttgaagttctcaagactaagctcatggaaggccaaggagatggctcaggaaatccccttgaagagagtccatagtactctcatgggtggggcaataagatgtttttctagagcatatataaccctttgaaaatatcacccttagtagatgaagggaggttcctgactcatccgtgtgggcacatgagcagagctggttttacaaacaggaggcagatttgcccccgggcaggaagcctgaatggaaccacggccactcaccatagttgctgggtgaagggagaaaggaataagtgagcaactgggacccagccaagcaggctggctcatctgagatggtgctcatggccttgtccctttgtgaccactgtcctgaccacctaagccctaagtccatgggccagcatcaaaggtgaccaagggtttgagacccacccccagagcctggttgacttgacactttctrcaacatttcaggttggaggaaagatggatgagaaccgttttgtggccgttaccagttccaacgcagctaagcttctgaacctgtatccccgcaagggccgcattattcccggagccgatgctgatgtggtggtgtgggacccagaagccacaaagtaaagtttgttgctcgtccccagggctagaggggcttgggattttgaagaagacttgcattacagatctccaaaagcatataattttgcactatttctagcacaaaatatggccctggcctaccgttggccatcttctccctccatcttcacacagtctttcttccgtgtcacacatgtctggtgtgtctgtctcctcttcttataaggacaccgataagactggattagggcccacctayatgacctcactttatcttaatgattacattaaaggccctaaatagtgccatgttctgaggttctgggtgttagaacttyagcagaagaattttgaagggagccaattcaacccataacaaccagcctttggggctcacccctcccatggagctgtgacattttgacctgtcctcagcgctttctctcccgccattgcctccccaccaggaccatctcagccagcacgcaggtccagggaggagacttcaacctgtatgagaacatgcgctgccacggcgtgccactggtcaccatcagccgggggcgcgtcgtgtatgagaacggcgtcttcatgtgcgccgagggcaccggcaagttctgtcccctgaggtccttcccagacactgtctacaagaagctggtccagagagagaaggtgaggtgggaggaggaagatgcaggggtgttggcgccccctgccggggaacatcctccatgactgttttaaatctcaaagagatgttcactccagttttcgacccaattccattgcactttctccagcgttgagaggggagtgtgcggcagcgccagggaacgctagagtcagaaaatgctgatttctgttccccgtctttgattaccaagtggcattttaagtggtcaggcagcagggctcctgagttgctgagggcacaagtgggaaatgtgagtgtgtgcgaccgctgagctcctctggatacgcaggcttggggtggaggaggtgctgggggctggagatgctgctttggctcggctccctcccactcttgatgaagcaagcggggggtagagctggcatttgcaaagcattgtctgaagcacaggaggagcaggcacctgaacacgggaggcccacactgctggcacacagagcacacgagagggctcagagctttcagagaaaccaaggacccttctctcccagaggccaatgagtgaagaaatccactgccaggtctgccgtgggagcgcaggcttgggctgcctgaatgaagaaagcgtgactttcgtgatcgcagggctaaatccaaaagcaaactcagggtctctcactcatcacactcagctaatgtttacttttttgtggagatggacggggtttaaccgtgttgctcgggttgctttcaaattcctgggctcaagtgatccgtctgcctcggcctcctaaagtgctgggattacaggcgtgagccactgtgcgcggcccaataacactttttaatacgatgtaggaccataaatgacctctgcagtaataactgctcgtacttctgtgttgcctctcatgtgccagagcagttggaacagctttacacataktaattcgtctgctctcctgcaactctctgatgtaggtatagtattatgggcacagaaaagtaacttgcacaaagccacacagtttacaagtgacagagttgggattggaacctaggcagtctggttgtagaatatagactcctaactctactgcctttgtgagtacagaattagctagtattgctactgggggcctctcatctccagatggggctgtgtttagcctctgttccctcagagttgtcagaccagtaaagggtgtggcttcgtgggagcctaaggtggggaataacgttgcgctgtgtgggagggcgctctctaaaattgacttccggttgggcatggtggctcacgcctgtaatcccggaactttgggaggccgaggcgggtggatcacgaggtcaggagttcaagaccagctggccaagatggtgaaaccccgtctctattaaaaatacaaaaattagtcaggcacggtggcaggcgcctgtaatcctagctacttgggaggctgaggcaggagaatcactttgcgggggcggaggttgcagtgagccaagatcgcaccactgcactccagcatgggcgacagagtgagactctgtctcaaaaaaaagaaaagaaaaatttggttaaagttgacttcctcagatgtctacctgctacctcggtgaggcttccatcagtgttgagggggagccagtatctctcccatacacatgcatgcacacacacatgtgcactcacatacatgcacgcatgcacacatgtacacrtatgcacatgctctttaggaggtatgagaaaactccagcccctggactcaatgtttaagaagccttggtcacttgcagtgatttgggtcttgggcagagtggcagtgtctaatgtcccaccggcccccagggaggccatggttgtatcactcagctctgatggtgttgtcctgttcttctgctcttcttccatccttccctagactttaaaggttagaggagtggaccgcactccctacctgggggatgtcgctgttgtcgtgcaccctgggaaaaaagagatgggaaccccactcgcagacactcctacccggcccgtcacccggcatgggggcatgagggaccttcacgaatccagcttcagcctctctggtaagagtcagggggccacgggaggaggatgggggtctgggagaagtggcccacctaggcagtgggacttacgcctgcttttcttttgtgtnctctcctccctcccgttgcctrtttccagggatgagtgctggtttggatattagactcacatagacattagtggggacaggagggctgtcctggtccctgggcacagacgctctaataggccatggcccacctggggctctgctcggggtttctaagttcagatatttttgtcccttgaaacatcttgagggctgtgcacacagtgggtgctccagagatgccctgagctcagaagagtcagccctgtctgtggttcacgggactgcaccgaccagcccttcgcccaccccagcccactcctcaccagcctctctactccttctgctaccccctctcctcctctgaccttcccacacctttccccgcctttgcctcaccttcaccttcttttttttttttttaccaggaattgtattgtatatattttattaactttaagtaaaatattttctctcgacttctgatgcccagttttttctcttatctttctgtcctttgggtcctggccccagtccttctgtggaatctctgggttccttggggggtgcgatcccagttcttaaagccacgatctgcagtttcccgcccccccgtccccccccgcacccatcaccatgcgagccacaggctcataaatgatgatcctcagtggagaacaagcagaggctgtaagatgcctcgggcctccaggtggcttaggtgggaactgtcaccaccacttgcagggggctaggaccctgagtctccctgagcacagttgagctgccttcaggataagcccagagagagaccaagcacccactcagtaagggctgtgctgggatgggtacggcgagaggcgcaagaccctggtccttccacccacagcctggagtttactgggggagacaagccccatacacaaaccatcctgctgtgagaacagagggctaaaccagagggatgccaatgggtcagygcctgcctgcccaggctcctgtgtgccctgctttgggccaggcgcagcttgtggcagaagagatgaggtccctgttggaggtgctggtagcccatggggaggggtcctctctcaggaccagtctcattcctgagatgatggctccgctactctgagggccactgccactcccaccagtgacgggccatgagtgaagtcagaaagggaccctggcatggaagacttgtttatgcacactcaggtcttgccagtcccggaggcatggactcccaccgccttcctcctgcagccagacccacgagaggcaccaagaccccagagctgcagggcccctgctgaccagcagcctcctcttctcctgcctgagagccaagactgggcagaacccccgctcagacagcaaacatcaggcagcctgtcccctcctctctaccccaaatcttgtctgttctaagcaggccaggctgaagaatgtcccactgggctctccggggcactagaccctccctttccctccctttgtgttttgtttgtttttgtttttttttttcaatccttctcctgtatagaccctccctttgtaactaagtcatgggatttcaagatgcggggcctttgggctgtggttctttcattttccgaaacaatggcataccctcatttttctctctcgcttactcactgaggcatatgtacaaaggcccatgtgccaacaggctggccaatgacctgcatgtacgagagacygtatgcctaggcatggggcagtgaagttggcacagtgggcagttaataakgtcggctctgaatcaggaaaacctgggtccaagtccaggctctgccacttacacactgcaacatggggcaagtcacttaacttccctgagcctctgtctcctcatctataagatgggatggagtggctgtgaggattcactcaggccatgcacacagtgagcctccaggagagggtgtctgtggtttgttagcaggcacaagagcccgtctcaccctctgtgcttccttccctgcaggctctcagatcgatgaccatgttccaaagcgagcttcagctcggatcctcgctcctcccggaggmaggtcgagtggcatttggtaaaggcattgccaagccccccgagtgaggacgcaccgccgccaccagcccgcaactctccagccgaagctgcaggggcaggagaggctgggctgrgtggcayaccacccgaggggggccccgggacccacggagccctccctatgtctgcaaagtgattcactgtgcttcgagccaactctaacagrcactttgagatgtgttcctcctgctgtagtcctttctgccttggmctcrgcgggcttttctggggcccaggaagcccacactatgcacagagcccaatgcatagagccctggccagcccttcctctcactcctgcctccgctggctttgggaaagcccagactttagtgccctgccccctggctgactggccagttgcccagagcactttagcagatgtggtttcaaagtaaaggcctcctcccmcaccccttaggccccgtggtgacatttcccaagtcagacagatgtcagcttcccagccatgcccaggacgtcctatctcccccaacccacctctggccctgtgtaggggcagggatgggggtggctgggactcctggtgcccctcgccagcttctcctgcgccccgcccacaccctcgggggggtcacaggcccagaagggtagctgggcggggctcgaggctggtgccaggcgcgtgtaaatggttttgttttgcacgtttggtttgcgcagtagtttggtttgacttgtttgtgcatcctgtgaaaaataacggtgcttgtgtcactagcatagaatagcgacaggaatagatgtggtccttaggagacgctgcacttgacaccaaccagacagcacagggcaggggtggtggagggggctgggctcacaggcctctcttttccccgcctgcagtcttctgggctgcgggaggccctggccctttccccttcccctcccctccttgtctagtttcccacattccaaaagggggcctgggatgctagccccagagatgccagcccttcaggaagcaggtgtcctttcccctctctgcccctgatcactcccagcactccccttgccttcccctgtcttcacctgccaccacacacacacacacacacacacacacacacacacgcatggcttcctataacttcttcctgctggacagagactcagcgctcctcctgtgtgactggcaagaggcctcatgcctgctgagagaggaggagtgggagaggggcttgccagacaccagagagggagaccccaggcccacaggacctggctgtcgaacccgcattgctgctcaggtgccgtgatctcccgtggtcggcaccaggcccttgccagctcatggcctcatcttctcccctgtccatccaggtgggccctccctgcttytaaagccccacagaagttcccatggaaacactagaggccgggtgtctccttccacctccagtgatctgggaagtgacccagccgcctgcccttgttaagcctggtctgccccgtgggaagtgacttcatgttgcacatgtgatttcagcccccgaggcttgcgcgaggcttctggaccctcggttaaaggtcagcccctggccgggtgcggtggctcacgcctgtaatcccagcactttgggaggccaaggcgggtggatcatggagtcaggagatcgagaccatcctggctaacacggtgaaaccccgtctctactaaaaatacaaaaattacccaggcgtggtggcgggcgcctgtagtcccagctactgaggaggctgaggcaggagaatagcgtgaacccgggaggcggagcttgcagtgagccaagatcacgccactgcacttcagcctggacgacagagtgagactccatctcaaaaaacagacaaacaaaaaagtcagcccctgcacatctctgtagtgcttttcatgtattcaaaccacttccgtatatgacctctcacttagtcctcatgacaatggagcacttattattcttcccattttacagatgaggaaactaagacccagaaagttcaggtcctctgaccccagaagtgtctgtgatgaccctcccaaccttggctatctaccccacctgtggagaggaggtctggggtgacatctattgtagatcccacctgagagtttaaccaatgagaagacttactttcctggtaggcagcctgctttgttttgcacaggaagatagattttttttctcatctttcttataaacaacctcatgcacattctgtgtttgagccaagactagtcacccattgggggctaaccgtgcagtgtgagctgcgtccacaccctcacttctcccttcactccccctttcctcactcaggggctgagaggacagaggtggtcagccggggagcagaggtggcgaaggggctcatggcaagtggcagccattggaacaggggtgaggacccaggcctgggaaagccaccagggatgggggaaaccatgacgccgcctcctggtgcagtgcacaccatctctatccctgtcagccctcactgggtcatgggccttgggcagatgtcaaagagcccagcagcagcggtggtggccagctgggcagagcatccttgcttgggctaggaaagctttaccttctctgagtgcctccgcctgagagatgtgtgacccgtggcaccagggaaccacgtcttggagtggtccactgtaggccatgcgcttcatccacccccagtccctacataggccctacccttgcccgggagcttctagatagaaatcagaaagagattcaaggagccaaatgagcggtcagcccccaccatgcactccttgccccgtgcagagctccagccagcttcgtcaccagccccactggctcctggttggaacgaaagggtctctggttgcactgaatgcagctctcaaactggtcttgtacttgctgaataaatactgttgttcttgccttagctgctctctaggtttgtggggttaagttgccagaaaattgtgctactgtgtgtgcgtgtgcgtgcgtgtgtgtagtgctaggagtccacagtaggtctctgtcaagccgatgtcgtgatgagggcttttctgatactgacccagaagccacagaaccacaaggaaacccaaaccccctccagctgctgaggcgcaggcacagcctggggtcggatggagcctccagcaccccagcacccaggtgacttccccactcccctgtaaatgtcatggtgctaagactgtgtcaaccccaagacgacacatggtcctgtgctttggccaccgtttgaggcaaaaactaaacagcccgacacgttgtgttctggtgcaggtttgtattaaactgtagctacttctcacttggactctgttgtgtttcttcaaagaggagggagtttggcagagatctcttctacggtggctgggcaaggcttcagttgctaagaaaaggcagctttgatctgtctctcctattgggtgacagctcactgggaggcttgtgcagagactggatttttttttttttaattctgagagacaggagccccagtggtgccagatttccagggacaaggttgccaaattatctgaaataattaggaggaagaattagatgcaaaagggaaaaaaactagactcactccatctacctatagtcgcgtattctcttggctaccattttggaagcccatagccacctctccactcggcagaacgtttggctgatggaacgatggcctcataaaaaaaaaaatcacaagacaaagcgctgtcccaaggccaatatgcctttgaaggaccttccagctgctctccggctgtctagaaccccgcttttggagttggccctctgtagtctcaaccccatccattgcattgagacccctctaccttccctctagagctcagtcagatgttaggaggattatctgattaaactctttcacactaaagggtaaaactgtggcttctaaggccgggtgctgtggctcatgcctgtgatcccagcactttgggaggccgaagcgggtggatcacctaaggtcaggagtttcagaccagcctgaccaacatggagaaaccccgtctctactaaaaaaaatacaaaattagccaggtgtggtggtgcatgcctgtaatcccaggtactcaggaggctgaggcaggagaatcgcttgaacccgggaggcggaggttgcagtgagccaagatcgcgccattacactccagcctgggcaacaagagtgaagctctgtctcaaaaaaaataaaaataaaaataaactgtggcttctagtactatgtggtcactgtacttatttcttaacattaaaattcgaaggttgagatggatttgccagcttgagatggatgccgagtccctgcaatgtattgggccaaagtgtctgttaccctgttttcccacaacaggagagcacaccagaattgggttaactgccaaaaatccattgggtttggatgaaaaaatatgaccacacatttggcacaaggcgtctatcaggcagtctacagggaaaaaataaaagatacccaggaagacatagggtgcctttttatgtatgtagttgtagaaaaatcaaagaccacagactcagactttaaaataaggcttgatcatttatgagaatccggatttggagaaaccacaccagtcagcagctaggcagccaccagcctctattttctaactcagaattacagactgacctctgtacaccggtagagactaacgctaagaattgcattgtggtcggccagtcacagtggctcacgcctgtaatcctagcactttgggaggccaaggcgggaggattgcctgagctcaggagttcaagaccagcctgcgcaacacagtgaaacccagtctctattaaaatacaaaaaattagccgagcgtggcggtgggatcacaccactgcactccagcctgggcgacaaagcgagactgtctcaaaaaaaaaaaaaaaattgctttttagtcagtggaagacacagggtctcatgacacccaggtgtgaagaagaaacctcatgatatgtaggggctggtagaccttagagtcctaagttaataacaggctatttgacagtgttgtaacaacagacatttgaaagggctcttagagctttcccagtagaacagtaaaggatctggcattttgctgacactgggtactgtcttatgatggaaagtgagttctttactttcccttctggatttacaaccatacatttagaactagagggaccagatgtcttggtttgctcagggcaatcctggtttaagtctattgccccagaataattattaacagtgtccactttcactgtcaaacatgtcctggtttgtataataaattacatggtcactttctgtatacctatacattcattgggctattactgtgcctgtccaggagttaaaaatttttccattgctgaaagacaagacatggcattgtaagagatgcggaagatgggtccttccacagtgggtggtgacttaggggtttgcatgacaagcccagcgtcttcacacagctcttggaggcttgatgagtctcagtagccggggatgccacagggtggggaaggcctgcaaatgcttttctaagctttttcagtttgcctcgtagacctcattgttccattagaagctgtaagcctaccaaattctatcatttgcttttaaggtgactttgattccatttatgaacttgaacaccttacaacattttcaactacatttaaaatttgatttcccttttaaatacctttcctgagtaccaaataattattaccaatctaataaattaaacttataaatatactgagtttcacactttattagttgttttgatgctaagaataaacaatatttcaacctaaaattagaagttttaagttacacttttttttttttttttttttttttttttgagacagagtcttgctctgtctgtcatccaggctggagtgcagtggaggatctcggctcactgcaacctccgcctcctgggttcaagcaattctcctgcctcaacctcccaagtagctgggattacaggcacctaccaccacgcccagctagtttttgtattttcagttgagatgaggtttcaccatgttgtccaggctggtcttgaactcctgaccgcgtgatctgcccgcctcagcctcccaaagtgctgggattacaggtgtgcaccactgcgcttggccaagttacacattttaagttaattatgagatgctcactttaatagcccaaaaagttctcatagaaataaataaaataccaaatatgcccagatttccaattaatacaaaaattttgacactatgggcttggttctttaaaaacttttattttcttaattctatacctcctgccagttataagctctcactgggctttagctttgagtcttttcttttttattttatttatttattttttgagacagagtcttgctctgtcacccagactggagtgcagtgatgcgattacagctcactgtggcctcgacctccaggctcaggtaatcctaccacctcagcctctagagtacctgggatcacaggtgtrcaccactgcacctggctaatttttgtattttttgtagagactgggtttccctatgttgcccaggctggtctcaaactcctgggctcaggctatccaccagtctcccaaagtgctaggattacaggtgtgacccaccacgcctggcctcaagtcttttcttgatgacaagtcaactcctagagggtgcaaggaaggtctgcttaccagctccactccaatctcaaatttccagtgcacctaattttcactttaccactacctggtcatctacaataactgaatgcacagttattagtgcaatgtgtgtatatatcacttctagcccagtgagttctgcctcctttaaaaatgtttaaataaattagatcctttgtattttaaggtttccttacatttaaagcaacacattctatccctgtgtagctttttttaaattgactattttttagaaaagtctgatttacagctgcacagatagtgcggagtttccatctactccacacccggcctcccctattactaacatcctacattagcatgttaaaatcagtgagccaacactgatacattatcattaattaaagtccatgcctattcagatttcctaagtttttatcgaatgtcccttttctgatccaggatctcctccaggacaccacattacatttagttgtcatgtctcctgaggctctgtggactgtgacagtttctcagacttcccttgtttttgatgaccttgacaagttttgagaaatattgttcagagattttatagaatactctctactggaatttgtctgttgtttttctaaatggttaggctggtgttaagagtttttaaaaggaagaccataaaagcaaggtgccgttctcctcacgtcgcatcaagggtatatactatgaaaatgacctattactgatgatgttgactttgatcacctggctaaagtcggatctaccttttcaaatttatatggttcccttttatgagctaaaagcttctctttttacagtatgtgacttctttaagcaactaaatatggtttgtattgctatactaagtttttccagtgtttgctagatgattctcgcagttaggaattttttgaaattcagtatcagttgtaagacttttggccagacgtggtggctcacacctgtaatcccagcactttgggaggccaaggtgggcagatcacttgaggtcaggagttgaagaccagcctggctaacatggtgaaaccctgtctccactaaaaatacaaaaaaattatctgggtatggtggtgcaaacctgtaatcccagctacctgggaggctgaggtgggaggatcgcttgaacccaggaggaagaggc

SEQ ID NO: 94383 - DNA, 13309 bp, Homo sapiens
caagcagaggtgtgtgctgtgactgacagagatttgggagatggaagtgaggtggaggtcatatttctgtacctttggctggccttttgaatgcaagcaaggttgtagagatgtggaattttctgtggtagtagtccaatgtccagtttgtaggtggtgagacgcagtggcagcagccaggctttgcactccagtttcctgaactgggtaccagcagctttttgatccttagattatggctctggctatgttctcgaactccttagtcccactggcaacttctgattcccagttttctgattgtggctgagggagtggctcccctggagggtcagtcctgggggtcatttctggagggccagcctaagtgtcttctccacagctctttcaatgatgtggttaacattcaattctctgtattaaattgctttctgttgaaatactgaaagtggggtcggttcggttccccgcaatgaactctgccattgctctgtttctggattctgctcctgccacaccccctgctagaatgttctttttgggcacgcacaaaaaaaatcatctgtctcgatagattataaatctcttgagagcaaagttcagtggtatgagcctttctcacagcataacacacaaggggtgctcaataaataactagatgcacaaatgagtgaattgataaatgggtgagtgaatgacaccagagtattatcagatttctgactccaagtttctgcccagttctgctctgagcctctctcctcgcatctacaagccctaggctcaaactctaactctgtactcattttgtgacattgaaaaagctactctgtaagcagtttcctcatctgtaaaatggggccaatgttaatgatacctagtttttcaggattattggaaggattaaaaccacacaattggccaggcatggtggctcacacctgtgatcccaccactttgggaggctgaggcaggcagatcacctgaggtcaggggttcaagactagcctggccaacatggtgaaaccccgtctccactaaaaatgcaaaaatgagctgggtgtggtggcacatgtctgtaatcccagctactcaggaggttgaggcaggagaatctcttgaacccaggagacggaggttgcagtgagcctagattgtgccactgcactccagcctggacaacagaacgagactcccccccacaaaaaaacaaaacaaaacaaaacaaaacaaaacaaaacaaaacaaaacacaatttgaggttcttgccccagtcagttttcattcgcccagctcagggccaggtactggagcgtactgcctgaagttaggtggccacctgtgtgaatcctgcctcttttccccacttgctttgggtcctgaggcaagttaagttacctatctgaatctcaattttctcatctttaaaaggagtgaaaacataccccttcctcactcagatgctgtaggattcaaaatgtgcatgtgtatatagtattttttaatttttactcttggtaaagagggagtcttgctgtgttgcccaggctggtctctatctcctgggctcaagtgatcctcctgccttggcctcccaaagtgctaggattataggtgagagccaccacacccggccttatgtgtatatagtattttgtgtgtttgtgttatcactatcatgtagtctctgacacctactagctgctcaatgaaagtgaattccactgaccaaagtccttcctatcttggggagatagagaacctagttatttagagatgaggtttcaggactccaagagtccctgctgttttatgttgtttaaagacacccctctcccccagagctgtcaatgcccataggtactggcagagctgtaacaccaggctaaagttccacaggaacttttttcctgacaaagtcctggaaaagtgaatgggcaggtaattgaaagacatgagaaagttccagaaagggcaggtgacaatgagttaggccaagcacattgctttttctcttgttaacctttgagtcagcctggctgctcacctgaagaggttagaaaaattagggggtcagtcttcacaaaactattggagacctgatgctctctgggagttatttgggagaaattttcctgctgttggattaccagtaacctagcacaggttcacacctgcatttttgtaactgagagactcatctggcacttgtttgatatcgtctaccaagtttgaaattgtctaccaagagccagaaatgctgcacacaggttagtgacatcactcttgtatcagttaagaatgtttcgggtggtttccggtgcaggaactgagagaccctttggtgttctacctggaggcatggctggcggatgagatctttggcccagatggagccataactctagaaatggagtggatgatccaggccctgctgacagtgggcatagtggactctgggaacctagtggaaatcaccatttttggtcggccctgtgtacccaatcgggtgaagaggatgctcctgtgcctggcatggtttcaccgagaacattgtgcctgaactgagaagatgaaacactttgagaacttgaaggcctgtgcatcaggcctccatactctccaacatcctattgcttaggacaacataattattgtcaggagcatcttgagaacgttcctacttttgctgctgaagttgaagagaagcaagtatagcattcctaaatccctgcattcctttttcctgtgtcttgatggatggtggttgcaagagtgagtttgaggaactattctcataaagaaatggctattttgcccaatgcgtaaagatctttgcacacttataataaaacaaatatatatatgaatgtttcagttgcagatgtgcagatgataggaaaaacctactaaagcttcttaggcatgaaggggattgtacaacaccctttccaccctcattctgtcccccgtgaattacaagtaaacaggtagagtagggtcctggagtggcctgagttagccctgtgatgacattaccaacccagttttcggctttgctcccttgggcaggctccctgtcaagctctctgtggttgtccctgctagcttccagcccacccatcatggtcttcagatggtggtgcctccagacctatatccaggtagcgcccaatcctgtggaagagaaaacattctttccctcaatcctgggcaaacatgttcttccatctcattggctctgattggattacatgccaatccctacaccagtcaccattggcttcaggtggacatcagaagcatccatcggcttaagactctcagggcctacccctaggtctgggggtgtgacaggcagaatttctaagaatggcccccaagaccccatgtcccatgttatagtttggatatggatatattttggatatagatatagtttatttggcccctctaaatctcatgtggaaatgtgacccccagtgctggaggtgggacctggtggggggtgtctgggtcatggggctggatccctcatgaatggcttggtgttggtgttgtcctcactgtaatgagtgagttcttgctgtctgagttcccacgaaagctgattgttaaataaagccgggcacctctaccccaccccccttgcttcctcttttgtcacatggtcttggcataccttggctccccttcatcttcagccatgagtggaagcagcctgaggcctcatcagaagcagctgctggagccatgcttcttgtacagcctgcagaactgtgagccaaacaaacctcttttctttataaactacccagcttcaggaatccctttacggcgatgcaaaagaacgaagataccccttacgccttggaaactgtaaatgtgatgagatttcactcccatggttgtgttatgttatatagcacagctgatctttaaaaagggagattatctgagtgggcctaatctaatcacacgaacccttaaaagcagagaactttctctggctggtggcagaagagaaaagagaagaaaaaatcataaaaaaataaaagcacaagaataactccaagtgcccttgttgactttaagatggaggggaccacgtggaaaatgtgaggagaaactgcattctctcaacaacctgagtgagtttggaagtgcattctttcccagattttccagaaaggaacacagccctgttgacacctggattttagcctaatgtgctaagtgctctaagcagagaatccggctgagccacttctgacccatgaaactgtgagctggccactgtttctgaaaatttgttacatagcaagagaagatgaatacagatgttaaggctgactccacgcaaaccacgaatagttgagaatggtagaaaaatggtttcctaggtagggttaccagataaagaaaaatacaagactcttagttaaatttgaatttcagatacattatagaatttttaagtataaatatgtccccagttccccagtttgaattgcagataaacaatgattttttttttaagtatgagtatgtcctgtgtaatatttgggacaaacttttttttctttttttctttttttttttttctttttgagagagggtctcattttgtcacccaggatggagtgcggtgatgcggccccggctcactgcagcttcaaccttgtgggctcaagcaatcctcccaccgcagcctccccagtgactgggactccaggcatgtgtcaccacacccagctaatttttgtattttttgtagaaatgaggtttccttgtgttgcccaggctggtctcaaactcctgagctcaagaaatccgcccatctcagcctcctacagtgctgtgattgcaggtgtgagccactgtgcatggccgggacaaacttatactaaaaaaattattaattgtttatctgaaattcaaatttcacagcccaagtcacatggaaagtccaggtgttggcactctggtagacagctgacttcccagatgacagctgttgtcaactgccagcgcctgtgcaggcaccatcttggatgtccagcccagttgaatctccagaggaatccagccctggccagttcctgactgcaactgcatgagagaccccaagcaagagccacccacctgagcccagtcaatccacagaactatgagaggctatcataaattgttgttttatgggatggggttcaggacccactactccaaaatatggcaccttggcatttgagaaaactacagaagcaggtaggactttctgatcttctcccaaccttttcccctgaagcaggccataaaacctggaaaatacttttttgacttttccatgaagcaggtcataagaccctcatgtgagaggtggtaccctttcaatagccaacagaaaggaacttctttatgtctgaagacacagggacgcagagaggaacctgaataaacaggcttgcgaagttcctctccccaccccagtttactaccattggatcatacattctttgtgcaatcatacttctccatgaccagccacctcgtcatcaaacctaagcataaaaatttgcaagtttacccatttctttgggttttcatttctgagtactctcatgtcacgtaaaacgtatatgaaatacatttgtatgcttttctcttgttaatcgatcttgttttaggtgcctcatccatgaacccagtgatgaatgagaaaagaaatcttttctcccctacatatgcctccacgttttagggtggtttgctatacagcaatagaccattgaaacagggagaacggccttctaatggatatgagaagtattttcaggggcataaagcaatactttcttctcccttaccactgcctctccccaccttttaaactcatttcttaaccttttgataccactgctggtgagctgaaagtttcatattcataaatgtcacagtgtagtggttaaggccaaagacaggtaagtcagaaaaatcttggctcggctctctgctcctcctgttctacagtcagccgcatcttcttttgcatcgtcagccaaaccacatccctgagacaccatggggaaggtgaaggtcggagtcaacagatttggtcgtactgggcgcctggtcaccagggctgcttttaactctggtaaagtggatattgttgccatcaatgaccccttcattgacctgaactacatggtttacatgttccaatatgactccacccatagcaaattccatggcaccgtcaaggctgagaatgggaagcttgtcatcaatggaaatcccatcaccatcttccaggagcgagatccctcyaaaatcaagtggggcgatgctggcgctgagtacgtcatggagtccactggcgtcttcaccaccatgtagaaggctgggcctcatttgcaggggggagccaaaagggtcatcatctctgccccctctgctgatgccccaatgtttgtcatgggtgtgaaccatgagaagtatgacaacaacctcaagattgtcggcagtgccttctgcaccaccaactgcttagcacccctggccaaggtcatccatgacaactttggtatcgtggaaggactcatgaccatagtccacgccatcactgccacccagaagactgtggatggcccctccgggaaactgtggcgtgatggccacggggctctccagaacatcatccctgcctctactggcactgcgaaggctatgggcaaggtcatccctgagctgaacgggaagctcactggcatggccttctgtgtccccactgccgtgtcagtggtggacctgacctgccgtctggaaaaacctgccaaatatgatgacaccaagaaggtggtgaagcaggcatcggagggccccctcaagggcatcctgggctacactgagcaccaggtggtctcctccgacttcaacagcaacacccactcttccaccttcaatgctggggctgtcattgccctcaacaaccactttttcaagctcatttcctggtatgacaatgaatttggctacagcaacaggatggtggacctcatggcccacatggcctccaaggagtaagacccctggaccaccagccccagtaagagcacaagaggaagagagagaccctcactgctggggagtccctgccacactcagtcccccaccacactgaatctcccctcctcacagtttccatgtagaccccttgaagaggggaggggcctagggagccccaccttgtcatataccatcaataaagtaccctgtgctcagccaaaaaaaaaaaaaagagagagaaaaatcttggcttacattttgactttgtgaaaattactttacctctctaaacctagaattgcccatctgtaaaatggcaatgatgggtcaggcatagtggtgcatgcctgtggtcctggctactccggaggctgaggtgggaggatcacttgagccaaggacttctgggctgtagcacgctatgctgatcaagtgtccacactaagttcagcatctatatggtgacctcccaggggcgggggaccacgaggttgcctaagaaagggtgaactggcccaggttggaaacggagcaggtcaaaactcccgtgctgatcagtagtgggatcttgcctgtgaatactcactgtgctccagcctgggcaacacagtgagaccctgatctcttaaaaagaaaaaaaaagataaaaaaaaatgggaatgatgggctagtcagctgcccagtcagagcactgttctgaagatcacataagaaaatatagtgcctggcatgtaatacatgcttaataaatactagccattgttattatcagtaatgacatccagcaatggctttaataaacaacttccatctaattattggcagaaaggagaactaccgtttagttgttttggattggaagccattgttggtggtagagattccccatttatacctggtgcttggcttataaccccagcagctaatcacctgggtcaccttggaacacattttatactagttgagcttggagaattcattaggaagtcacacgatcagagattaatgacttttaaaaaatgatttaggtgggtgtttagttatcattgtctcaaattagaagaaaaattccccagtagagattattgtaaccctgcttgatggcttggaaccacgggggcacctccatcactccattgccacaaagttacccagcccctgggggctccccggcaactctctgagcaggggtagggggccttctagttggagactggctctgaatcagctcatcctcataggaggagactcctaccccagcttcattgaatgtcaaaccttcgtttccacacctcactggtaactctaagaagtcatgtgccatcagtgagggagaagcagtttatggagaagtttggaagtgtgtgctgctgcttttcctccatgtgggtaattcttcacttttcttggactcactgacacctttgagaatgcaatgaaacctatggacccagtcctggaaaaagtgcacagatgcacacacttttgcttactgtgccaaggattcctgaacccctgaatcctggtgcatggtttccaggctaagaaattttgcatgagatattccagagtctgtcccttgtgaagccaccttagtgtaagacccctgttagtcactgcggcatagttttccctgaacagcatcattgcttttgttgcagtatactaatacggtggtgtgaggttaagacagtcttgtgtgttcttttgccctgtgtaatgtgagaatgttgtttgtgatactatatttatgataatctatggcaaaaacttgcctccctgatctccatgttaggaataactgtgcttctcccaactgtgctttgtttttatatcactgactcggctcagtgatataagtcacagtgcaacccggcttcctttttcccctgggctgctggggaactcagcctcaaacttgtgttctgtctccagtgagtgcagtaggtttcatggcaggtgttttgtgtaatcacctcactcttggctccatcttattttcctctccttgttttccctttacgtcatttgctctaatttactgctaatttattttatgctgttttattgtatgcatctttgtaaaccttaaatacatctttggaacaaggcaggtataaatcaataaaaacacataggagctaatggaagctctggacagctttcttcttgtgaaaacaattgtccctgaatgtataggccagtttcctggggatgtggagggcaactgaggagagaggtgacagaaagattgaagggtctttaaatggagaagtgggcctagctagggaatctacccttgctagtatagaaaaaagtatagggcaatgcatttggatattatccccccatcatccaactaaaaacaataatcacaatcctcccccacccccatggggaaaatatgtatttttaaaataaggtcacctaagaaaatttcttttattatggagagtttttaaaacacctgaaagtagactaaacactgtaataagcccccatgtacccttcatccagccctagtaaccgtgaacccacagccaatcttgtctatatattgtcattttttttttttttgtgacaatgtatcgctctgtcgcccaggctggagtgcagtggcatgatcagggctcactgcaacctctgcctcctgggctcaagtgatggtcctacttcaccctctcgagtagctgtgactacaggcaggcaccaccacacctggctaacttaaaaaaaaaagaaaattgtagagacaaggtctcactctattgcccagattggtcttaaactcccgggctcccaaagtgctgggattacaggtgtgagccactgcacccagcttaatttttaaatcaaagcaaaatatacatacataaatgcatacatataagcagacagtgagtatatttttacacattgggcacacctgtgtaaccagcactcaggacaaggaattgaatataatcaagtccccagaaccccacctcatgccccttcccagttactattctccccctcccccaagggtgaccactacacagacttctaacatcacagatgaattttgcctgtttttgacctttctctaaatggaatcatacagtacggactctcaaatctggcttctcgtgtgcaacactgcattggtgagattcatttaggttgtgtgtgcagccagtagttcatttagtttatttgctaagtagtattctgttgtgtgaatgtaccacagtttatccactttcttttcttttctttttagagacagggtctcgctcttttgcccaggctggagtacaatggcatagtcacagctcactacagcctcgacctcctgggctcaggtgatcctcccacctcagcctcctgagtagctgagaccataggtgtctacccccacacccagctaatttttaaattttttgtagagacagggtctcgctgtgttgtccaggctggtctggaactcttaatcttaagtgatcctctcctcttagcttcctaaagcactgggattacaggcatgagccaccgtgcctggccttattttttatttataatttattttttattatttaatcaattatttaagaaagttgctattatttaataagccacctagtctatagtattttgtcatagcagctcaaaataagatagtacctaaacattttaaaaggaaaagtggcttgatccaagcccttcttcaccaaaacagcaatgagtttgggctttcataaccatcgcttgcttttgctgtcatgagaacaggcatttttcactggagtgtagaaaatacacagcagcctccactatagataagcctggaccttcatctataacaggaacagagagtaaagagttatcaaacatatttgaggaaaaccaacatcgtgaaagagaggcaccaaactaaacaaacaaaagaactaatccctacagaattctcccaggatctagagagatatttaaatgaaatagaagtactatccataaatagagagctgactgctgtcaaaagaatatgtcagagttcttgaaattacaaaaagtgcaattgctaacataataagctcattggaaagactgagtagccaagtgaccatggctgaagactgaacagatgacagggttgagagattctctcaaagaatgcaaaacagataaaaagatttttttttaagtgtaagagaaaaattaagagacatggggcaggacctgaaatttaactctctatctaataggaattctcagaagccaagaacagagagtctgtaagagaggagataatctaagtagtgacagaacaaacaatttccctgagctggggaaaaacttccatcttgagatttaaagaacagaccaaatgccaaacaagaagaattataaaaggcccatccctaaaggcatcaagatttctgaactccaagggtaatgaaaaaaaaaaaagtctaaatcctccagaaagatgaaatgtagtaactgggtggaaatgtagtaactgggtgttaaagacctcagtgggaatgctagaagacaatggcgtgaggtcttcaaacttctgaggacaatcgtcttgagatttgagcaacgacaccctgttggaaccagaagctggaagcttttccattcctcctgcttttccatctcctcccagtgccccctcttggctgactctaacaggaaggcagctgggaaatgtagtttgcaggctcctagccccagcgctatggagctgagtttaaaagggcaggtatagtgtggagtgataacaagtaaatgccagcacactggccaattaatattcaagtgggagggcaaattaaatatatttttggacatgaaaagacttggggccaggcatggtggcacatgcctgtaatctcagcactttgggaggccaagaaggtcgggagtatgagaccagcctggacaacatggcaaaaccctgtctctactaaaaatacaaaaaaaaaaaacaaaaaaacaaaaaaaccccaaaaaacattagctgggcttggtggtgcacacctgtaatcccagctacatgggaggctgaggcaggagaatcgcttgcacccgggaggcaggggttgtggtgagccgagatcatgccattgcactccagcctgggcgacagagcaagactccatctaaaaaaaaaaaaaaaaaaaagaaaagacaagacttggagccaggcacagtggctcacacctataatcccagcactttgggaggctgaggcagatggatcccttgaggccaggagttcaagagcagcctgggcaacatagagagaccctgtctctacaaaaaaatacaaaaattagccgggcgtggttgtgtgtgtttgtagtcccagctactcatgtgggaggtagaaagtgaggtgggagctgaggtgggaggtgaggtgggagctgaggtggaaggatcacctgagcatgggaggttgatgttgcaagtgagaagtgatagtgccactgcacttcagcctgggtgatagagcctgtttcaaaagagaaaataaataaatgagtaaataaaagacttggggccgggtgtggtggctcatgcctgcaatcccagaggatcgcttgagcccaggagttagagaccaaactgggcaacatagtgagaccccatctctatattaaaaaaaaaaagacttgggaaatttaacattttctgaaagaattcttcaagatattctgtcatactcagcaaaggcagaggctcatgtctgtgacatcccacatgagggaaccagtgtcatgggcacctaaggggaggcaggacatcccaatccaactctctagggctttcccatagagaagcttggagggcaagtgagggaacgcaggggagtgaaggtatagaaaggtggtgtctaaatgtagtttcattaggatggggcagaggtacagggtcttccctgggaaaatttggatcctgaccccagcaccttcctatgttcccttttagcaaagtaggacaggcccagagtgtttgagagactcctctgctggtagcagccccacctgggacttctgtgccctcctggcctctggctttttggttctcccttcccacccctgaccctgtcctgtgctctctccctccatccaaacctgctctgggctcatgagacctggatcatttgccagttaatttgcactttcatacggataatggattaaccaaaggaatgaagcactaactttagactttcaggctattt

SEQ ID NO: 94384 - DNA, 13153 bp, Homo sapiens
ggtctcatgagcccagagcaggtttggatggagggagagagcacaggacagggtcaggggtgggaagggagaaccaaaaagccagaggccaggagggcacagaagtcccaggtggggctgctaccagcagaggagtctctcaaacactctgggcctgtcctactttgctaaaagggaacataggaaggtgctggggtcaggatccaaattttcccagggaagaccctgtacctctgccccatcctaatgaaactacatttagacaccacctttctataccttcactcccctgcgttccctcacttgccctccaagcttctctatgggaaagccctagagagttggattgggatgtcctgcctccccttaggtgcccatgacactggttccctcatgtgggatgtcacagacatgagcctctgcctttgctgagtatgacagaatatcttgaagaattctttcagaaaatgttaaatttcccaagtctttttttttttaatatagagatggggtctcactatgttgcccagtttggtctctaactcctgggctcaagcgatcctctgggattgcaggcatgagccaccacacccggccccaagtcttttatttactcatttatttattttctcttttgaaacaggctctatcacccaggctgaagtgcagtggcactatcacttctcacttgcaacatcaacctcccatgctcaggtgatccttccacctcagctcccacctcacctcccacctcagctcccacctcactttctacctcccacatgagtagctgggactacaaacacacacaaccacgcccggctaatttttgtatttttttgtagagacagggtctctctatgttgcccaggctgctcttgaactcctggcctcaagggatccatctgcctcagcctcccaaagtgctgggattataggtgtgagccactgtgcctggctccaagtcttgtcttttcttttttttttttttttttttagatggagtcttgctctgtcgcccaggctggagtgcaatggcatgatctcggctcaccacaacccctgcctcccgggtgcaagcgattctcctgcctcagcctcccatgtagctgggattacaggtgtgcaccaccaagcccagctaatgttttttggggtttttttgtttttttgttttttttttttgtatttttagtagagacagggttttgccatgttgtccaggctggtctcatactcccgaccttcttggcctcccaaagtgctgagattacaggcatgtgccaccatgcctggccccaagtcttttcatgtccaaaaatatatttaatttgccctcccacttgaatattaattggccagtgtgctggcatttacttgttatcactccacactatacctgcccttttaaactcagctccatagcgctggggctaggagcctgcaaactacatttcccagctgccttcctgttagagtcagccaagagggggcactgggaggagatggaaaagcaggaggaatggaaaagcttccagcttctggttccaacagggtgtcgttgctcaaatctcaagacgattgtcctcagaagtttgaagacctcacgccattgtcttctagcattcccactgaggtctttaacacccagttactacatttccacccagttactacatttcatctttctggaggatttagacttttttttttttcattacccttggagttcagaaatcttgatgcctttagggatgggccttttataattcttcttgtttggcatttggtctgttctttaaatctcaagatggaagtttttccccagctcagggaaattgtttgttctgtcactacttagattatctcctctcttacagactctctgttcttggcttctgagaattcctattagatagagagttaaatttcaggtcctgccccatgtctcttaatttttctcttacacttaaaaaaaaatctttttatctgttttgcattctttgagagaatctctcaaccctgtcatctgttcagtcttcagccatggtcacttggctactcagtctttccaatgagcttattatgttagcaattgcactttttgtaatttcaagaactctgacatattcttttgacagcagtcagctctctatttatggatagtacttctatttcatttaaatatctctctagatcctgggagaattctgtagggattagttcttttgtttgtttagtttggtgcctctctttcacgatgttggttttcctcaaatatgtttgataactctttactctctgttcctgttatagatgaaggtccaggcttatctatagtggaggctgctgtgtattttctacactccagtgaaaaatgcctgttctcatgacagcaaaagcaagcgatggttatgaaagcccaaactcattgctgttttggtgaagaagggcttggatcaagccacttttccttttaaaatgtttaggtactatcttattttgagctgctatgacaaaatactatagactaggtggcttattaaataatagcaactttcttaaataattgattaaataataaaaaataaattataaataaaaaataaggccaggcacggtggctcatgcctgtaatcccagtgctttaggaagctaagaggagaggatcacttaagattaagagttccagaccagcctggacaacacagcgagaccctgtctctacaaaaaatttaaaaattagctgggtgtgggggtagacacctatggtctcagctactcaggaggctgaggtgggaggatcacctgagcccaggaggtcgaggctgtagtgagctgtgactatgccattgtactccagcctgggcaaaagagcgagaccctgtctctaaaaagaaaagaaaagaaagtggataaactgtggtacattcacacaacagaatactacttagcaaataaactaaatgaactactggctgcacacacaacctaaatgaatctcaccaatgcagtgttgcacacgagaagccagatttgagagtccgtactgtatgattccatttagagaaaggtcaaaaacaggcaaaattcatctgtgatgttagaagtctgtgtagtggtcacccttgggggagggggagaatagtaactgggaaggggcatgaggtggggttctggggacttgattatattcaattccttgtcctgagtgctggttacacaggtgtgcccaatgtgtaaaaatatactcactgtctgcttatatgtatgcatttatgtatgtatattttgctttgatttaaaaattaagctgggtgcagtggctcacacctgtaatcccagcactttgggagcccgggagtttaagaccaatctgggcaatagagtgagaccttgtctctacaattttcttttttttttaagttagccaggtgtggtggtgcctgcctgtagtcacagctactcgagagggtgaagtaggaccatcacttgagcccaggaggcagaggttgcagtgagccctgatcatgccactgcactccagcctgggcgacagagcgatacattgtcacaaaaaaaaaaaaaatgacaatatatagacaagattggctgtgggttcacggttactagggctggatgaagggtacatgggggcttattacagtgtttagtctactttcaggtgttttaaaaactctccataataaaagaaattttcttaggtgaccttattttaaaaatacatattttccccatgggggtgggggaggattgtgattattgtttttagttggatgatggggggataatatccaaatgcattgccctatacttttttctatactagcaagggtagattccctagctaggcccacttctccatttaaagacccttcaatctttctgtcacctctctcctcagttgccctccacatccccaggaaactggcctatacattcagggacaattgttttcacaagaagaaagctgtccagagcttccattagctcctatgtgtttttattgatttatacctgccttgttccaaagatgtatttaaggtttacaaagatgcatacaataaaacagcataaaataaattagcagtaaattagagcaaatgacgtaaagggaaaacaaggagaggaaaataagatggagccaagagtgaggtgattacacaaaacacctgccatgaaacctactgcactcactggagacagaacacaagtttgaggctgagttccccagcagcccaggggaaaaaggaagccgggttgcactgtgacttatatcactgagccgagtcagtgatataaaaacaaagcacagttgggagaagcacagttattcctaacatggagatcagggaggcaagtttttgccatagattatcataaatatagtatcacaaacaacattctcacattacacagggcaaaagaacacacaagactgtcttaacctcacaccaccgtattagtatactgcaacaaaagcaatgatgctgttcagggaaaactatgccgcagtgactaacaggggtcttacactaaggtggcttcacaagggacagactctggaatatctcatgcaaaatttcttagcctggaaaccatgcaccaggattcaggggttcaggaatccttggcacagtaagcaaaagtgtgtgcatctgtgcactttttccaggactgggtccataggtttcattgcattctcaaaggtgtcagtgagtccaagaaaagtgaagaattacccacatggaggaaaagcagcagcacacacttccaaacttctccataaactgcttctccctcactgatggcacatgacttcttagagttaccagtgaggtgtggaaacgaaggtttgacattcaatgaagctggggtaggagtctcctcctatgaggatgagctgattcagagccagtctccaactagaaggccccctacccctgctcagagagttgccggggagcccccaggggctgggtaactttgtggcaatggagtgatggaggtgcccccgtggttccaagccatcaagcagggttacaataatctctactggggaatttttcttctaatttgagacaatgataactaaacacccacctaaatcattttttaaaagtcattaatctctgatcgtgtgacttcctaatgaattctccaagctcaactagtataaaatgtgttccaaggtgacccaggtgattagctgctggggttataagccaagcaccaggtataaatggggaatctctaccaccaacaatggcttccaatccaaaacaactaaacggtagttctcctttctgccaataattagatggaagttgtttattaaagccattgctggatgtcattactgataataacaatggctagtatttattaagcatgtattacatgccaggcactatattttcttatgtgatcttcagaacagtgctctgactgggcagctgactagcccatcattcccatttttttttatctttttttttctttttaagagatcagggtctcactgtgttgcccaggctggagcacagtgagtattcacaggcaagatcccactactgatcagcacgggagttttgacctgctccgtttccaacctgggccagttcaccctttcttaggcaacctcgtggtcccccgcccctgggaggtcaccatatagatgctgaacttagtgtggacacttgatcagcatagcgtgctacagcccagaagtccttggctcaagtgatcctcccacctcagcctccggagtagccaggaccacaggcatgcaccactatgcctgacccatcattgccattttacagatgggcaattctaggtttagagaggtaaagtaattttcacaaagtcaaaatgtaagccaagatttttctctctcttttttttttttttggctgagcacagggtactttattgatggtatatgacaaggtggggctccctaggcccctcccctcttcaaggggtctacatggaaactgtgaggaggggagattcagtgtggtgggggactgagtgtggcagggactccccagcagtgagggtctctctcttcctcttgtgctcttactggggctggtggtccaggggtcttactccttggaggccatgtgggccatgaggtccaccatcctgttgctgtagccaaattcattgtcataccaggaaatgagcttgaaaaagtggttgttgagggcaatgacagccccagcattgaaggtggaagagtgggtgttgctgttgaagtcggaggagaccacctggtgctcagtgtagcccaggatgcccttgagggggccctccgatgcctgcttcaccaccttcttggtgtcatcatatttggcaggtttttccagacggcaggtcaggtccaccactgacacggcagtggggacacagaaggccatgccagtgagcttcccgttcagctcagggatgaccttgcccatagccttcgcagtgccagtagaggcagggatgatgttctggagagccccgtggccatcacgccacagtttcccggaggggccatccacagtcttctgggtggcagtgatggcgtggactatggtcatgagtccttccacgataccaaagttgtcatggatgaccttggccaggggtgctaagcagttggtggtgcagaaggcactgccgacaatcttgaggttgttgtcatacttctcatggttcacacccatgacaaacattggggcatcagcagagggggcagagatgatgacccttttggctcccccctgcaaatgaggcccagccttctacatggtggtgaagacgccagtggactccatgacgtactcagcgccagcatcgccccacttgattttrgagggatctcgctcctggaagatggtgatgggatttccattgatgacaagcttcccattctcagccttgacggtgccatggaatttgctatgggtggagtcatattggaacatgtaaaccatgtagttcaggtcaatgaaggggtcattgatggcaacaatatccactttaccagagttaaaagcagccctggtgaccaggcgcccagtacgaccaaatctgttgactccgaccttcaccttccccatggtgtctcagggatgtggtttggctgacgatgcaaaagaagatgcggctgactgtagaacaggaggagcagagagccgagccaagatttttctgacttacctgtctttggccttaaccactacactgtgacatttatgaatatgaaactttcagctcaccagcagtggtatcaaaaggttaagaaatgagtttaaaaggtggggagaggcagtggtaagggagaagaaagtattgctttatgcccctgaaaatacttctcatatccattagaaggccgttctccctgtttcaatggtctattgctgtatagcaaaccaccctaaaacgtggaggcatatgtaggggagaaaagatttcttttctcattcatcactgggttcatggatgaggcacctaaaacaagatcgattaacaagagaaaagcatacaaatgtatttcatatacgttttacgtgacatgagagtactcagaaatgaaaacccaaagaaatgggtaaacttgcaaatttttatgcttaggtttgatgacgaggtggctggtcatggagaagtatgattgcacaaagaatgtatgatccaatggtagtaaactggggtggggagaggaacttcgcaagcctgtttattcaggttcctctctgcgtccctgtgtcttcagacataaagaagttcctttctgttggctattgaaagggtaccacctctcacatgagggtcttatgacctgcttcatggaaaagtcaaaaaagtattttccaggttttatggcctgcttcaggggaaaaggttgggagaagatcagaaagtcctacctgcttctgtagttttctcaaatgccaaggtgccatattttggagtagtgggtcctgaaccccatcccataaaacaacaatttatgatagcctctcatagttctgtggattgactgggctcaggtgggtggctcttgcttggggtctctcatgcagttgcagtcaggaactggccagggctggattcctctggagattcaactgggctggacatccaagatggtgcctgcacaggcgctggcagttgacaacagctgtcatctgggaagtcagctgtctaccagagtgccaacacctggactttccatgtgacttgggctgtgaaatttgaatttcagataaacaattaataatttttttagtataagtttgtcccggccatgcacagtggctcacacctgcaatcacagcactgtaggaggctgagatgggcggatttcttgagctcaggagtttgagaccagcctgggcaacacaaggaaacctcatttctacaaaaaatacaaaaattagctgggtgtggtgacacatgcctggagtcccagtcactggggaggctgcggtgggaggattgcttgagcccacaaggttgaagctgcagtgagccggggccgcatcaccgcactccatcctgggtgacaaaatgagaccctctctcaaaaagaaaaaaaaaaaaagaaaaaaagaaaaaaaagtttgtcccaaatattacacaggacatactcatacttaaaaaaaaaatcattgtttatctgcaattcaaactggggaactggggacatatttatacttaaaaattctataatgtatctgaaattcaaatttaactaagagtcttgtatttttctttatctggtaaccctacctaggaaaccatttttctaccattctcaactattcgtggtttgcgtggagtcagccttaacatctgtattcatcttctcttgctatgtaacaaattttcagaaacagtggccagctcacagtttcatgggtcagaagtggctcagccggattctctgcttagagcacttagcacattaggctaaaatccaggtgtcaacagggctgtgttcctttctggaaaatctgggaaagaatgcacttccaaactcactcaggttgttgagagaatgcagtttctcctcacattttccacgtggtcccctccatcttaaagtcaacaagggcacttggagttattcttgtgcttttatttttttatgattttttcttctcttttctcttctgccaccagccagagaaagttctctgcttttaagggttcgtgtgattagattaggcccactcagataatctccctttttaaagatcagctgtgctatataacataacacaaccatgggagtgaaatctcatcacatttacagtttccaaggcgtaaggggtatcttcgttcttttgcatcgccgtaaagggattcctgaagctgggtagtttataaagaaaagaggtttgtttggctcacagttctgcaggctgtacaagaagcatggctccagcagctgcttctgatgaggcctcaggctgcttccactcatggctgaagatgaaggggagccaaggtatgccaagaccatgtgacaaaagaggaagcaaggggggtggggtagaggtgcccggctttatttaacaatcagctttcgtgggaactcagacagcaagaactcactcattacagtgaggacaacaccaacaccaagccattcatgagggatccagccccatgacccagacaccccccaccaggtcccacctccagcactgggggtcacatttccacatgagatttagaggggccaaataaactatatctatatccaaaatatatccatatccaaactataacatgggacatggggtcttgggggccattcttagaaattctgcctgtcacacccccagacctaggggtaggccctgagagtcttaagccgatggatgcttctgatgtccacctgaagccaatggtgactggtgtagggattggcatgtaatccaatcagagccaatgagatggaagaacatgtttgcccaggattgagggaaagaatgttttctcttccacaggattgggcgctacctggatataggtctggaggcaccaccatctgaagaccatgatgggtgggctggaagctagcagggacaaccacagagagcttgacagggagcctgcccaagggagcaaagccgaaaactgggttggtaatgtcatcacagggctaactcaggccactccaggaccctactctacctgtttacttgtaattcacgggggacagaatgagggtggaaagggtgttgtacaatccccttcatgcctaagaagctttagtaggtttttcctatcatctgcacatctgcaactgaaacattcatatatatatttgttttattataagtgtgcaaagatctttacgcattgggcaaaatagccatttctttatgagaatagttcctcaaactcactcttgcaaccaccatccatcaagacacaggaaaaaggaatgcagggatttaggaatgctatacttgcttctcttcaacttcagcagcaaaagtaggaacgttctcaagatgctcctgacaataattatgttgtcctaagcaataggatgttggagagtatggaggcctgatgcacaggccttcaagttctcaaagtgtttcatcttctcagttcaggcacaatgttctcggtgaaaccatgccaggcacaggagcatcctcttcacccgattgggtacacagggccgaccaaaaatggtgatttccactaggttcccagagtccactatgcccactgtcagcagggcctggatcatccactccatttctagagttatggctccatctgggccaaagatctcatccgccagccatgcctccaggtagaacaccaaagggtctctcagttcctgcaccggaaaccacccgaaacattcttaactgatacaagagtgatgtcactaacctgtgtgcagcatttctggctcttggtagacaatttcaaacttggtagacgatatcaaacaagtgccagatgagtctctcagttacaaaaatgcaggtgtgaacctgtgctaggttactggtaatccaacagcaggaaaatttctcccaaataactcccagagagcatcaggtctccaatagttttgtgaagactgaccccctaatttttctaacctcttcaggtgagcagccaggctgactcaaaggttaacaagagaaaaagcaatgtgcttggcctaactcattgtcacctgccctttctggaactttctcatgtctttcaattacctgcccattcacttttccaggactttgtcaggaaaaaagttcctgtggaactttagcctggtgttacagctctgccagtacctatgggcattgacagctctgggggagaggggtgtctttaaacaacataaaacagcagggactcttggagtcctgaaacctcatctctaaataactaggttctctatctccccaagataggaaggactttggtcagtggaattcactttcattgagcagctagtaggtgtcagagactacatgatagtgataacacaaacacacaaaatactatatacacataaggccgggtgtggtggctctcacctataatcctagcactttgggaggccaaggcaggaggatcacttgagcccaggagatagagaccagcctgggcaacacagcaagactccctctttaccaagagtaaaaattaaaaaatactatatacacatgcacattttgaatcctacagcatctgagtgaggaaggggtatgttttcactccttttaaagatgagaaaattgagattcagataggtaacttaacttgcctcaggacccaaagcaagtggggaaaagaggcaggattcacacaggtggccacctaacttcaggcagtacgctccagtacctggccctgagctgggcgaatgaaaactgactggggcaagaacctcaaattgtgttttgttttgttttgttttgttttgttttgttttgttttgtttttttgtgggggggagtctcgttctgttgtccaggctggagtgcagtggcacaatctaggctcactgcaacctccgtctcctgggttcaagagattctcctgcctcaacctcctgagtagctgggattacagacatgtgccaccacacccagctcatttttgcatttttagtggagacggggtttcaccatgttggccaggctagtcttgaacccctgacctcaggtgatctgcctgcctcagcctcccaaagtggtgggatcacaggtgtgagccaccatgcctggccaattgtgtggttttaatccttccaataatcctgaaaaactaggtatcattaacattggccccattttacagatgaggaaactgcttacagagtagctttttcaatgtcacaaaatgagtacagagttagagtttgagcctagggcttgtagatgcgaggagagaggctcagagcagaactgggcagaaacttggagtcagaaatctgataatactctggtgtcattcactcacccatttatcaattcactcatttgtgcatctagttatttattgagcaccccttgtgtgttatgctgtgagaaaggctcataccactgaactttgctctcaagagatttataatctatcgagacagatgattttttttgtgcgtgcccaaaaagaacattctagcagggggtgtggcaggagcagaatccagaaacagagcaatggcagagttcattgcggggaaccgaaccgaccccactttcagtatttcaacagaaagcaatttaatacagagaattgaatgttaaccacatcattgaaagagctgtggagaagacacttaggctggccctccagaaatgacccccaggactgaccctccaggggagccactccctcagccacaatcagaaaactgggaatcagaagttgccagtgggactaaggagttcgagaacatagccagagccataatctaaggatcaaaaagctgctggtacccagttcaggaaactggagtgcaaagcctggctgctgccactgcgtctcaccacctacaaactggacattggactactaccacagaaaattccacatctctacaaccttgcttgcattcaaaaggccagccaaaggtaca

SEQ ID NO: 94385 - DNA, 140081 bp, Homo sapiens
  misc_feature (1)...(140081): n = A,T,C or G
ctacatcatgtggtgacggtgcaactgtgaaatatcaccactccatcccccaactacaggtatgaccacatggctcaggggggacaatcaaagtgcttcatccctttagccatagagacttttcagagataagaaactaatctgagcaaggccattcagagacttactatgagatttgatataagcatgtcagagaaaagggattttctaactttttgagggaagataagataggctgcaagataggctaatggctgcttcagtggccagggaagaatgaacataaagccaaaacacaaaagaaagcactgtaaagggaaggaaagagagttatatctaagtccctggatctgtccatgcctgaagcaacagccactggtggacttcctagttatatgagctaattattttcccttttttcttaaatagtatgagttaagtttcttgaaataaaaatatttttgatgaaaatggaggtaattctttctgcttacagggttattgtaaagatcagatttataagaatctggcaaggctggtggcccatacctgtagtcccagctactctggaggctgaggcaagagtatcgtttgagcccaggagtttgaggctgcagtgagctatgatcatcccactgtacttcagcctgggtgacacagtgagatcctgtctcaaaaaaaaaaaaaaagaaaagaaaagaaaagaaaaagaagaataaatatataattcattgtaggctctaaagagcacctgagtcatttgacgtttatcaaattcctttggccacagagaaaataataaaaacaattattctcatgaaatagtggtaagttatacttttcatgaaataaactacagtaatagatttttgcatatgctgtgatttggaatcataaatgatcctaattgcctctgtgttgggctttgtctaaatacttgctatactttgtttttactggtatttgaagccagcaagtaatctgtttattcaaatacttatggccaaatatccttaattactttctgaaacaatagtttctgaatagggagactggtcaattatttttctttaatatgattattataataaagctatggacatgtttttgcagtcaagcttcctcagagatgtttataatgattcaatcacaaactaaatctctrtgtttcctgctttgttgttgttgttgttgttgttgttagggaattaggggattccctggtatagcagtgtctttgttatatccacttcctatcttacctcttttctgaaatatttcaagttctccctgccagtgcaccaggagtaaaaagtcctatttatattgttcctcactgtgtatgtcattgcttctatcatattctggaatgcttacggtaccgtacttagattcaggatggccagcatttccagccattgatgacattattaagaaacagaatgataaactatggctgaatcatttaaaatgccaggtgttcctggaaataaatctcttatgacaatgtatctgaggctgggcaacgtgtctcacacctgtaatcccagcattttgggaggcccaggcaggtggatcacttgaggtcaggagttcgagaccagccagaccaacatggtgaaacctcatctctactaaaaatacaaattagctgggtgtggtggcacatgcctgtaatcccggttacttgggaggctacctcaggagaatcacttgaacccgggaggtggaggttgcagttagccgagatcacaccattgcactccagcctgggcaacaagagtgaaactctgtctcaaaaaaaagaaaaaaaagaaaatacatctgatatattccagaaatgaaaactaccctcaatctgtctgtatccgatgtgtttttccctggtatttccttagtaagctgcctggatagaatgcgtaagacaataacagcattgctttttcacataaaagtttgaaattttcccttcaaatacaaaaatatttttctcagtctctttttttagaaagtcaccactgcagtgaggcaaaaacatacattctgagaagttaaagtagaaatgacaatttacaaaacaaactgtgctctgatttgcataatgtgtaaactgaactaaatcatggcatgcaacacaaactatttaagaccaaaatgttttaatgtcatcttattcagacccacacgttcaaagataaaaccatagataagtggctataccctcagtctgaactcatgtatttcagagaaaagactattacctgttctactaattttcctgtttatcaattctgaacaacacctgcccagaccatgcttactaactttactctaaaaccactttgtctgccttctcccaaccaaaaaacctagcagtacctttccctaaattttccccatgagaactaagggtactctggtaaacgttctgttttcccttgttcagtcaacttaataaactaagttttgtgtggttagcagatccctgatgatcttttcatggaaacttgtgtcattcagacatgatgacattgctttcttcaccatccatcatggtacccacactgtgttctgtgctcctaaaacttaaatacttggccctagggatatatttgtcccctgttagatgttgaacaggtatctgagaagagataaagactagggacttattcttgttcaaactcagtatttattggctgaccttatgtctatccaaggacagtcaaaaccgggtggtagccaaccactttacttttgagtgatggctcttgttctgcagaatctatgaatttgagtcataaaagaaaatgatgtgcttatattctcaatcactagactctggtttttctttttcttacatcatgctaccaatgccagaggctgaaacaaggacaaatgtgcagaggctacatatcgccacacagctggaaaatggctttgacaagcacacaaagtattcttgctgtggataatttcctttcaacataagtaatatgtgtcctccctcatgacctgtgtgaggttggactacatgattgttaggtctcttcaaacccaagactactttaggttataaaaatttcaaagtaggtaaactttggccttaatcttattcagcccatcttttttccctgctcttctgacattgcttctgtttgctacctttcactagtgttcattgatggatttagtgtattcatgttgtcctcatttacccaagatctttattttaggcctagtgccaagagccaaacttcattctcacacatgtgattttatttcctgtgttagaaccaaaacaatcagaattcagtttttaatagctaaaagttacaattccaaaagaaatttgacgtcatcaggtccttcctgaaagaaataatcactgaaccaaaaaatggatgtccatgtatcatttatatagcagttgcctacctttcatatacagtatatcaggttagagctgtgcaatagtattttataatttacattatgagcacggatcaatggtatagtcaaaaatcctacctttcaatctgttgcctaacaggcatttgttggacacatttaaaaaccagctgacttatattaaacataattgtgtgctaaactatatatttggccttcaacctagaaagaatgattttataacttccattttgtaggttttaagaagttaagtaacttaccctatatgacatatttggtaaatgttagactttgctctcaagctttcaatttggctgagtaaataacaatattcatggaacagttataaaataacatgaaaacacaaagcaagtcacaaggcactactttattaattgaacccatgtaatttgggaaatctattatcaattttctgaattaaaataaaggaggtattattgtgagatggactgtatttagaaagctccctaaaagagatggataattacactgggttgtgaaatatgtacaatggcagaatgtttgtcgaagggaagaatttcagagaacgcaggaacaatacattattggaaggagaaactagtaggagcactgacagattatcaaattaccaagaaaattttcaatggctagtgaggccttgaatgagggatagggcaggaggagggataataaataaaaactaaatagctattagtgttgagggagatgtgaagtggaatttgtggccacactcccctttccctccatgagccacttggtctataaaaagactggcaactaaggtttattcaagcggaattcattggtatctacactaagagttttaaaagccacattgtgacatacagagaatttggatggatggcctgacaacaggcaaacatcaaggaaatttatttgtttattagttggtcagttagtttgtttgtttgaaagttgcatttctctgtcttttgacagataaaaagatgggaacatatataactgagagtaagagaaagaaaaaattaaaattcacctacaatgtggatgtggtaaatgagaaggaaattgatatgtttaagtacctaatgtcagccagaaactgtactaatttttttttttacacattgmttcacttaatccccataacaactataagaagtagatgttacttaaagagggggagctaaaatttaagggatttttttttttttttagttatacttcaaattgaagaaataatttagagaagtttaatacctggcctaaagtcatatagttaataaaaaataaagtatttaaaccagctctcactgatatcaaagtccattgtctcattaaatgaatctcatatttaaaaaagaaaaaaaccttaataatttactgagatgaagcattcttaggaaatttaataagcaaaatattcagataaaaattagtattttagtcaagcatttctgtgcaacacatcaacccaataaagtggtttaaaacaacaactttttctttttttttcctttttttcttgaaatgaggtcttattttgtctcccaggctggagtgcagtggcactattaccagaaagtggtcctgakccagaccccaagagagggttcttggatctcacacactctatgactccatagagtaaagtgaaagcaagtttattaggaaagtaaaggaagagagaggggctactccataggctaggcagcagcataggctgctcagctgcttatacttactgttactttttgacatatgctaaactagcagtggattatttatgagwtttccaggaaaggggtgggcaattcccagaactgagggttccacacctttttagaccatatagggtgacttcctcatgttgccatggcatttgaaaactgttatggtgctagtgggagtgacttttagcatgctaacgcattataattagcatataatgaggagtgaggacaaccagaggtcacatttgttgccctcagtgattttggctggcttgggctggcttctttacaatatgctgtttcatcagcaaggtctttgtgctctgtaccttgtgcggacctcctaactcatccgcaactaagaatgccttaacctcctgggaatgcagctggcttcagccctattttacccatcccctattcaagatagagtagctttggtttgatcgcctctgacagcatgattttggctcattgcagctttgacttctccccggctcaagtgatcctcctgctcagccccccaagcagttgggactataggcacatgccaccacacccagctaatttttgtattcttcttgtgtgtagagatggggttttgccacgttgcccaggctggtcttgaactcctgggcacaagctatctgcctgcctcggcctcccaaagtgctggattactcgtgtcagtcacagtgccctgcccaacaacttttaattatctctcatgcttctctatcaattaggacctcagctgagtcgttctgctatattgcatcagatgtcagctggttctgcagtcatctggaggctctgctggtagaacacccagcacacttcactcaaatggctggctgcagctggtgctagttatggtctgggatctcagatgaggctgctaagctgaatgtgttgttactcctttacatcgtctctccacatggcttgaacttctcacagcatgcctgctggattcgaagagatggcattcaagtgcttaaaaatgtaagcaaatctcttaatattcagcctkagtattacatagggcttctactgccatattctctggttgaaaacaatccttggatcagcccaaactaaargggtagagaaagaaattccacttctcaaggaaggaatgacaagttttgggccctttttaatcaacatcyaagtaagctgcttgtgatgaaagtgaaggtggggaacggaaaaagtgggaaggtaaagatcaaaagcaaaatgctcccgagagtccttaaaaagctaaccgtgtatgcttggattccaagagagagactccagatagagctaggaatagaaagatttcctagcattagggatttcctagtaattgggagyaaggtagatgaacatttaccgtttctcataatttctgtagtcaggcttcaggtacaaaattaggctaatatattgtctgttaattatatgtatttcttaatcatatattcattgaggagataccttgggagggttgagagggaagataactgagagatggtgatattgctaatactaccgatatacgggacccctctgcaattacatgtcttttagttaatttcatgtgtatatattcagccattgacagtatactctgtatcttctgtgggtaggagccacagcactgtattcatttcgcatgcttaatcacgcctacagattcaattcattcagactgttgtaaaaataaatgctgctcaaaaatgcagctcccccatgtaacctcctaggcaaaaggagacagaataaaatcagccaaccattttttctgcctagtaatttcagggaataaccttttagttaataccctaagtgcagaggcctgcagcatacacccaggtgaaaagtttcaccccacattgacctgtcttagggagaggcaagcacttgctgaagaagcaagttctcattactaattagtaattcattattgcacggtttcaagggaaacttatgacctgttaagactaaaaatgaacacaatcattaatatttccatcactttggaataggaaacaatttcagtctaaagtgcatgatttctggaatttatttctcgatgcttctgtkataatatttcttgaaagcctggttaaacaaataaaaatagctatgtttagcctaaaatgattacttttctctgccattgacaatgagttagcatttactacaaaattggcattacatgttctttgctatgaacrtaactttatttgaatcaaaaaagtcaagcaacaaaagtttaaactmatttctttgaattttgacaagagtgtaaaattgggataattttcattaaatgtgttatacatttagcagagtaaaagcaaataagtatttaatcactactgagaaaattacaaattataatcatgtgggatcctmacaccagaatagaaaacatgagaatagattataagaaataataagaaaaacaattgggatttttcccccaraaatctgggggcaagtgttgcaatgagaaaacataamgttactgattattgtattttattatcaamtatcatcttaagtcatattgaaaatgtggccatctgttctccagtgtcttcaaaatctaatagcccaatcccaatcctttcaaaaacattctaaaaacaaaggatgaaaattatttatattggtagagatagataytttaattgaaatcagtttataaatatrtaacatttgataaacaaatctgaacacataaaccatttttaactattataaaattattgatttctgcctccaaaattccagcgaaattgtccctaagccactaatcccatggttctattggtttatggcctgtttgagacatttttcttctcttttccactccctcttacaattttttcttcccttggctttgtgggcacctctatgccctggtagttttcctcccctctgattgtgttcatctggatcatttccctctcccgcctttgttccacatgtctgtttcaaatcacccattcctattaataaactcattataacttttgaatctcagaatctccatccctggactatctgaaactcgccattttaaaatttagtacattatcttcttacaaaaaatgttttccatctccttatttaatgtacctatatagtggcatcaccattttaatagtctccttggaaagaaatctaagccatcgaggtgcctctatcctctcccttctatgttactgcatccaatatattaaactctcacaattcagtttctggcatttgtcttgaattcattctttcttctctgaccccatagggtgccagccctccattcagtctttttcctcaacaattctgattattttttctgtgtctttgctcccaaaagttgccttttttattatcatgggagcttcctctttctaatatgtacactaggacataaaactaaataaaatctctccattttctaagaaaaaacatacaaattccatagaatccgtgcaatagctgtcagtcacctaattgctagtttcctctccgaacacttccagtcctttcacctttgttatctaacattagaggaccatgcctgctgaagcctatctccatgtcaatgtacatgatttttcttcctcctgaaatattctaaaattttcccacctggtaaatttcagattactctttaagacccaggtgaagtgttgttttatctgcaaagagtctcttaaggaagttcattctctcccatttgctataatattaatttgaacatttctttattattacatgatgttgcattgtatttatgaaggatgactgtatgcatgaaggattctaccactaaacttcagcttcttgaagaagtagtccatttcttcttgatctttatattaccagtgccacaaataagcgctaagaatacttaaatgagttacttgcattattttgcataatgcactttagtgtttggcaggcctatactcaaagctcactctgaaacttaattgggtgattcaattacctaatttctcaaaatcacatttgcctcatctgaagacattggtacctacctcacaggnnnnnnnnnnnnnnnnnnnnnnnnnnnnnnnnnnnnnnnnnnnnnnnnnnnnnnnnnnnnnnnnnnnnnnnnnnnnnnnnnnnnnnnnnnnnnnnnnnnnnnnnnnnnnnnnnnnnnnnnnnnnnnnnnnnnnnnnnnnnnnnnnnnnnnnnnnnnnnnnnnnnnnnnnnnnnnnnnnnnnnnnnnnnnnnnnnnnnnnnnnnnnnnnnnnnnnnnnnnnnnnnnnnnnnnnnnnnnnnnnnnnnnnnnnnnnnnnnnnnnnnnnnnnnnnnnnnnnnnnnnnnnnnnnnnnnnnnnnnnnnnnnnnnnnnnnnnnnnnnnnnnnnnnnnnnnnnnnnnnnnnnnnnnnnnnnnnnnnnnnnnnnnnnnnnnnnnnnnnnnnnnnnnnnnnnnnnnnnnnnnnnnnnnnnnnnnnnnnnnnnnnnnnnnnnnnnnnnnnnnnnnnnnnnnnnnnnnnnnnnnnnnnnnnnnnnnnnnnnnnnnnnnnnnnnnnnnnnnnnnnnnnnnnnnnnnnnnnnnnnnnnnnnnnnnnnnnnnnnnnnnnnnnnnnnnnnnnnnnnnnnnnnnnnnnnnnnnnnnnnnnnnnnnnnnnnnnnnnnnnnnnnnnnnnnnnnnnnnnnnnnnnnnnnnnnnnnnnnnnnnnnnnnnnnnnnnnnnnnnnnnnnnnnnnnnnnnnnnnnnnnnnnnnnnnnnnnnnnnnnnnnnnnnnnnnnnnnnnnnnnnnnnnnnnnnnnnnnnnnnnnnnnnnnnnnnnnnnnnnnnnnnnnnnnnnnnnnnnnnnnnnnnnnnnnnnnnnnnnnnnnnnnnnnnnnnnnnnnnnnnnnnnnnnnnnnnnnnnnnnnnnnnnnnnnnnnnnnnnnnnnnnnnnnnnnnnnnnnnnnnnnnnnnnnnnnnnnnnnnnnnnnnnnnnnnnnnnnnnnnnnnnnnnnnnnnnnnnnnnnnnnnnnnnnnnnnnnnnnnnnnnnnnnnnnnnnnnnnnnnnnnnnnnnnnnnnnnnnnnnnnnnnnnnnnnnnnnnnnnnnnnnnnnnnnnnnnnnnnnnnnnnnnnnnnnnnnnnnnnnnnnnnnnnnnnnnnnnnnnnnnnnnnnnnnnnnnnnnnnnnnnnnnnnnnnnnnnnnnnnnnnnnnnnnnnnnnnnnnnnnnnnnnnnnnnnnnnnnnnnnnnnnnnnnnnnnnnnnnnnnnnnnnnnnnnnnnnnnnnnnnnnnnnnnnnnnnnnnnnnnnnnnnnnnnnnnnnnnnnnnnnnnnnnnnnnnnnnnnnnnnnnnnnnnnnnnnnnnnnnnnnnnnnnnnnnnnnnnnnnnnnnnnnnnnnnnnnnnnnnnnnnnnnnnnnnnnnnnnnnnnnnnnnnnnnnnnnnnnnnnnnnnnnnnnnnnnnnnnnnnnnnnnnnnnnnnnnnnnnnnnnnnnnnnnnnnnnnnnnnnnnnnnnnnnnnnnnnnnnnnnnnnnnnnnnnnnnnnnnnnnnnnnnnnnnnnnnnnnnnnnnnnnnnnnnnnnnnnnnnnnnnnnnnnnnnnnnnnnnnnnnnnnnnnnnnnnnnnnnnnnnnnnnnnnnnnnnnnnnnnnnnnnnnnnnnnnnnnnnnnnnnnnnnnnnnnnnnnnnnnnnnnnnnnnnnnnnnnnnnnnnnnnnnnnnnnnnnnnnnnnnnnnnnnnnnnnnnnnnnnnnnnnnnnnnnnnnnnnnnnnnnnnnnnnnnnnnnnnnnnnnnnnnnnnnnnnnnnnnnnnnnnnnnnnnnnnnnnnnnnnnnnnnnnnnnnnnnnnnnnnnnnnnnnnnnnnnnnnnnnnnnnnnnnnnnnnnnnnnnnnnnnnnnnnnnnnnnnnnnnnnnnnnnnnnnnnnnnnnnnnnnnnnnnnnnnnnnnnnnnnnnnnnnnnnnnnnnnnnnnnnnnnnnnnnnnnnnnnnnnnnnnnnnnnnnnnnnnnnnnnnnnnnnnnnnnnnnnnnnnnnnnnnnnnnnnnnnnnnnnnnnnnnnnnnnnnnnnnnnnnnnnnnnnnnnnnnnnnnnnnnnnnnnnnnnnnnnnnnnnnnnnnnnnnnnnnnnnnnnnnnnnnnnnnnnnnnnnnnnnnnnnnnnnnnnnnnnnnnnnnnnnnnnnnnnnnnnnnnnnnnnnnnnnnnnnnnnnnnnnnnnnnnnnnnnnnnnnnnnnnnnnnnnnnnnnnnnnnnnnnnnnnnnnnnnnnnnnnnnnnnnnnnnnnnnnnnnnnnnnnnnnnnnnnnnnnnnnnnnnnnnnnnnnnnnnnnnnnnnnnnnnnnnnnnnnnnnnnnnnnnnnnnnnnnnnnnnnnnnnnnnnnnnnnnnnnnnnnnnnnnnnnnnnnnnnnnnnnnnnnnnnnnnnnnnnnnnnnnnnnnnnnnnnnnnnnnnnnnnnnnnnnnnnnnnnnnnnnnnnnnnnnnnnnnnnnnnnnnnnnnnnnnnnnnnnnnnnnnnnnnnnnnnnnnnnnnnnnnnnnnnnnnnnnnnnnnnnnnnnnnnnnnnnnnnnnnnnnnnnnnnnnnnnnnnnnnnnnnnnnnnnnnnnnnnnnnnnnnnnnnnnnnnnnnnnnnnnnnnnnnnnnnnnnnnnnnnnnnnnnnnnnnnnnnnnnnnnnnnnnnnnnnnnnnnnnnnnnnnnnnnnnnnnnnnnnnnnnnnnnnnnnnnnnnnnnnnnnnnnnnnnnnnnnnnnnnnnnnnnnnnnnnnnnnnnnnnnnnnnnnnnnnnnnnnnnnnnnnnnnnnnnnnnnnnnnnnnnnnnnnnnnnnnnnnnnnnnnnnnnnnnnnnnnnnnnnnnnnnnnnnnnnnnnnnnnnnnnnnnnnnnnnnnnnnnnnnnnnnnnnnnnnnnnnnnnnnnnnnnnnnnnnnnnnnnnnnnnnnnnnnnnnnnnnnnnnnnnnnnnnnnnnnnnnnnnnnnnnnnnnnnnnnnnnnnnnnnnnnnnnnnnnnnnnnnnnnnnnnnnnnnnnnnnnnnnnnnnnnnnnnnnnnnnnnnnnnnnnnnnnnnnnnnnnnnnnnnnnnnnnnnnnnnnnnnnnnnnnnnnnnnnnnnnnnnnnnnnnnnnnnnnnnnnnnnnnnnnnnnnnnnnnnnnnnnnnnnnnnnnnnnnnnnnnnnnnnnnnnnnnnnnnnnnnnnnnnnnnnnnnnnnnnnnnnnnnnnnnnnnnnnnnnnnnnnnnnnnnnnnnnnnnnnnnnnnnnnnnnnnnnnnnnnnnnnnnnnnnnnnnnnnnnnnnnnnnnnnnnnnnnnnnnnnnnnnnnnnnnnnnnnnnnnnnnnnnnnnnnnnnnnnnnnnnnnnnnnnnnnnnnnnnnnnnnnnnnnnnnnnnnnnnnnnnnnnnnnnnnnnnnnnnnnnnnnnnnnnnnnnnnnnnnnnnnnnnnnnnnnnnnnnnnnnnnnnnnnnnnnnnnnnnnnnnnnnnnnnnnnnnnnnnnnnnnnnnnnnnnnnnnnnnnnnnnnnnnnnnnnnnnnnnnnnnnnnnnnnnnnnnnnnnnnnnnnnnnnnnnnnnnnnnnnnnnnnnnnnnnnnnnnnnnnnnnnnnnnnnnnnnnnnnnnnnnnnnnnnnnnnnnnnnnnnnnnnnnnnnnnnnnnnnnnnnnnnnnnnnnnnnnnnnnnnnnnnnnnnnnnnnnnnnnnnnnnnnnnnnnnnnnnnnnnnnnnnnnnnnnnnnnnnnnnnnnnnnnnnnnnnnnnnnnnnnnnnnnnnnnnnnnnnnnnnnnnnnnnnnnnnnnnnnnnnnnnnnnnnnnnnnnnnnnnnnnnnnnnnnnnnnnnnnnnnnnnnnnnnnnnnnnnnnnnnnnnnnnnnnnnnnnnnnnnnnnnnnnnnnnnnnnnnnnnnnnnnnnnnnnnnnnnnnnnnnnnnnnnnnnnnnnnnnnnnnnnnnnnnnnnnnnnnnnnnnnnnnnnnnnnnnnnnnnnnnnnnnnnnnnnnnnnnnnnnnnnnnnnnnnnnnnnnnnnnnnnnnnnnnnnnnnnnnnnnnnnnnnnnnnnnnnnnnnnnnnnnnnnnnnnnnnnnnnnnnnnnnnnnnnnnnnnnnnnnnnnnnnnnnnnnnnnnnnnnnnnnnnnnnnnnnnnnnnnnnnnnnnnnnnnnnnnnnnnnnnnnnnnnnnnnnnnnnnnnnnnnnnnnnnnnnnnnnnnnnnnnnnnnnnnnnnnnnnnnnnnnnnnnnnnnnnnnnnnnnnnnnnnnnnnnnnnnnnnnnnnnnnnnnnnnnnnnnnnnnnnnnnnnnnnnnnnnnnnnnnnnnnnnnnnnnnnnnnnnnnnnnnnnnnnnnnnnnnnnnnnnnnnnnnnnnnnnnnnnnnnnnnnnnnnnnnnnnnnnnnnnnnnnnnnnnnnnnnnnnnnnnnnnnnnnnnnnnnnnnnnnnnnnnnnnnnnnnnnnnnnnnnnnnnnnnnnnnnnnnnnnnnnnnnnnnnnnnnnnnnnnnnnnnnnnnnnnnnnnnnnnnnnnnnnnnnnnnnnnnnnnnnnnnnnnnnnnnnnnnnnnnnnnnnnnnnnnnnnnnnnnnnnnnnnnnnnnnnnnnnnnnnnnnnnnnnnnnnnnnnnnnnnnnnnnnnnnnnnnnnnnnnnnnnnnnnnnnnnnnnnnnnnnnnnnnnnnnnnnnnnnnnnnnnnnnnnnnnnnnnnnnnnnnnnnnnnnnnnnnnnnnnnnnnnnnnnnnnnnnnnnnnnnnnnnnnnnnnnnnnnnnnnnnnnnnnnnnnnnnnnnnnnnnnnnnnnnnnnnnnnnnnnnnnnnnnnnnnnnnnnnnnnnnnnnnnnnnnnnnnnnnnnnnnnnnnnnnnnnnnnnnnnnnnnnnnnnnnnnnnnnnnnnnnnnnnnnnnnnnnnnnnnnnnnnnnnnnnnnnnnnnnnnnnnnnnnnnnnnnnnnnnnnnnnnnnnnnnnnnnnnnnnnnnnnnnnnnnnnnnnnnnnnnnnnnnnnnnnnnnnnnnnnnnnnnnnnnnnnnnnnnnnnnnnnnnnnnnnnnnnnnnnnnnnnnnnnnnnnnnnnnnnnnnnnnnnnnnnnnnnnnnnnnnnnnnnnnnnnnnnnnnnnnnnnnnnnnnnnnnnnnnnnnnnnnnnnnnnnnnnnnnnnnnnnnnnnnnnnnnnnnnnnnnnnnnnnnnnnnnnnnnnnnnnnnnnnnnnnnnnnnnnnnnnnnnnnnnnnnnnnnnnnnnnnnnnnnnnnnnnnnnnnnnnnnnnnnnnnnnnnnnnnnnnnnnnnnnnnnnnnnnnnnnnnnnnnnnnnnnnnnnnnnnnnnnnnnnnnnnnnnnnnnnnnnnnnnnnnnnnnnnnnnnnnnnnnnnnnnnnnnnnnnnnnnnnnnnnnnnnnnnnnnnnnnnnnnnnnnnnnnnnnnnnnnnnnnnnnnnnnnnnnnnnnnnnnnnnnnnnnnnnnnnnnnnnnnnnnnnnnnnnnnnnnnnnnnnnnnnnnnnnnnnnnnnnnnnnnnnnnnnnnnnnnnnnnnnnnnnnnnnnnnnnnnnnnnnnnnnnnnnnnnnnnnnnnnnnnnnnnnnnnnnnnnnnnnnnnnnnnnnnnnnnnnnnnnnnnnnnnnnnnnnnnnnnnnnnnnnnnnnnnnnnnnnnnnnnnnnnnnnnnnnnnnnnnnnnnnnnnnnnnnnnnnnnnnnnnnnnnnnnnnnnnnnnnnnnnnnnnnnnnnnnnnnnnnnnnnnnnnnnnnnnnnnnnnnnnnnnnnnnnnnnnnnnnnnnnnnnnnnnnnnnnnnnnnnnnnnnnnnnnnnnnnnnnnnnnnnnnnnnnnnnnnnnnnnnnnnnnnnnnnnnnnnnnnnnnnnnnnnnnnnnnnnnnnnnnnnnnnnnnnnnnnnnnnnnnnnnnnnnnnnnnnnnnnnnnnnnnnnnnnnnnnnnnnnnnnnnnnnnnnnnnnnnnnnnnnnnnnnnnnnnnnnnnnnnnnnnnnnnnnnnnnnnnnnnnnnnnnnnnnnnnnnnnnnnnnnnnnnnnnnnnnnnnnnnnnnnnnnnnnnnnnnnnnnnnnnnnnnnnnnnnnnnnnnnnnnnnnnnnnnnnnnnnnnnnnnnnnnnnnnnnnnnnnnnnnnnnnnnnnnnnnnnnnnnnnnnnnnnnnnnnnnnnnnnnnnnnnnnnnnnnnnnnnnnnnnnnnnnnnnnnnnnnnnnnnnnnnnnnnnnnnnnnnnnnnnnnnnnnnnnnnnnnnnnnnnnnnnnnnnnnnnnnnnnnnnnnnnnnnnnnnnnnnnnnnnnnnnnnnnnnnnnnnnnnnnnnnnnnnnnnnnnnnnnnnnnnnnnnnnnnnnnnnnnnnnnnnnnnnnnnnnnnnnnnnnnnnnnnnnnnnnnnnnnnnnnnnnnnnnnnnnnnnnnnnnnnnnnnnnnnnnnnnnnnnnnnnnnnnnnnnnnnnnnnnnnnnnnnnnnnnnnnnnnnnnnnnnnnnnnnnnnnnnnnnnnnnnnnnnnnnnnnnnnnnnnnnnnnnnnnnnnnnnnnnnnnnnnnnnnnnnnnnnnnnnnnnnnnnnnnnnnnnnnnnnnnnnnnnnnnnnnnnnnnnnnnnnnnnnnnnnnnnnnnnnnnnnnnnnnnnnnnnnnnnnnnnnnnnnnnnnnnnnnnnnnnnnnnnnnnnnnnnnnnnnnnnnnnnnnnnnnnnnnnnnnnnnnnnnnnnnnnnnnnnnnnnnnnnnnnnnnnnnnnnnnnnnnnnnnnnnnnnnnnnnnnnnnnnnnnnnnnnnnnnnnnnnnnnnnnnnnnnnnnnnnnnnnnnnnnnnnnnnnnnnnnnnnnnnnnnnnnnnnnnnnnnnnnnnnnnnnnnnnnnnnnnnnnnnnnnnnnnnnnnnnnnnnnnnnnnnnnnnnnnnnnnnnnnnnnnnnnnnnnnnnnnnnnnnnnnnnnnnnnnnnnnnnnnnnnnnnnnnnnnnnnnnnnnnnnnnnnnnnnnnnnnnnnnnnnnnnnnnnnnnnnnnnnnnnnnnnnnnnnnnnnnnnnnnnnnnnnnnnnnnnnnnnnnnnnnnnnnnnnnnnnnnnnnnnnnnnnnnnnnnnnnnnnnnnnnnnnnnnnnnnnnnnnnnnnnnnnnnnnnnnnnnnnnnnnnnnnnnnnnnnnnnnnnnnnnnnnnnnnnnnnnnnnnnnnnnnnnnnnnnnnnnnnnnnnnnnnnnnnnnnnnnnnnnnnnnnnnnnnnnnnnnnnnnnnnnnnnnnnnnnnnnnnnnnnnnnnnnnnnnnnnnnnnnnnnnnnnnnnnnnnnnnnnnnnnnnnnnnnnnnnnnnnnnnnnnnnnnnnnnnnnnnnnnnnnnnnnnnnnnnnnnnnnnnnnnnnnnnnnnnnnnnnnnnnnnnnnnnnnnnnnnnnnnnnnnnnnnnnnnnnnnnnnnnnnnnnnnnnnnnnnnnnnnnnnnnnnnnnnnnnnnnnnnnnnnnnnnnnnnnnnnnnnnnnnnnnnnnnnnnnnnnnnnnnnnnnnnnnnnnnnnnnnnnnnnnnnnnnnnnnnnnnnnnnnnnnnnnnnnnnnnnnnnnnnnnnnnnnnnnnnnnnnnnnnnnnnnnnnnnnnnnnnnnnnnnnnnnnnnnnnnnnnnnnnnnnnnnnnnnnnnnnnnnnnnnnnnnnnnnnnnnnnnnnnnnnnnnnnnnnnnnnnnnnnnnnnnnnnnnnnnnnnnnnnnnnnnnnnnnnnnnnnnnnnnnnnnnnnnnnnnnnnnnnnnnnnnnnnnnnnnnnnnnnnnnnnnnnnnnnnnnnnnnnnnnnnnnnnnnnnnnnnnnnnnnnnnnnnnnnnnnnnnnnnnnnnnnnnnnnnnnnnnnnnnnnnnnnnnnnnnnnnnnnnnnnnnnnnnnnnnnnnnnnnnnnnnnnnnnnnnnnnnnnnnnnnnnnnnnnnnnnnnnnnnnnnnnnnnnnnnnnnnnnnnnnnnnnnnnnnnnnnnnnnnnnnnnnnnnnnnnnnnnnnnnnnnnnnnnnnnnnnnnnnnnnnnnnnnnnnnnnnnnnnnnnnnnnnnnnnnnnnnnnnnnnnnnnnnnnnnnnnnnnnnnnnnnnnnnnnnnnnnnnnnnnnnnnnnnnnnnnnnnnnnnnnnnnnnnnnnnnnnnnnnnnnnnnnnnnnnnnnnnnnnnnnnnnnnnnnnnnnnnnnnnnnnnnnnnnnnnnnnnnnnnnnnnnnnnnnnnnnnnnnnnnnnnnnnnnnnnnnnnnnnnnnnnnnnnnnnnnnnnnnnnnnnnnnnnnnnnnnnnnnnnnnnnnnnnnnnnnnnnnnnnnnnnnnnnnnnnnnnnnnnnnnnnnnnnnnnnnnnnnnnnnnnnnnnnnnnnnnnnnnnnnnnnnnnnnnnnnnnnnnnnnnnnnnnnnnnnnnnnnnnnnnnnnnnnnnnnnnnnnnnnnnnnnnnnnnnnnnnnnnnnnnnnnnnnnnnnnnnnnnnnnnnnnnnnnnnnnnnnnnnnnnnnnnnnnnnnnnnnnnnnnnnnnnnnnnnnnnnnnnnnnnnnnnnnnnnnnnnnnnnnnnnnnnnnnnnnnnnnnnnnnnnnnnnnnnnnnnnnnnnnnnnnnnnnnnnnnnnnnnnnnnnnnnnnnnnnnnnnnnnnnnnnnnnnnnnnnnnttcctgattcataataaaagatcttccaaatagtaactcttgcttggatttccttacctaaatcctttatctgagccctttccagcattctatttttcagcaagatatgtaaattgcttaagaaaattggctcatacattagatatttttaaatcaagttttcctgtgtatcctgtgacttaatcttctagatctatcttatatattatcattgagaatgaaatatataagaatagattatcaaaactacagaattgtttttatattattgaaatttaaaatatttgggtaattatctatgctagtaaaaaattaataatataaatcttccatcatatcccactgctgcctgagctcttttacaaaaagtttttgaaggagataaggtgatattattaataccaacttgcagaagagaagaaattgggacccttaacaggtaaaaggatttaatctaagttacataatcagtactggatgtgctgacaagacatctcagcctctagcattcttcacatgttatataaatggcatagtattgggtctctaacttttacatttgccaatagcataattttgtgtacatatgaagttaaagaatttgttttgaaacaaattagtggtgttactgtgattgcgcagttgctactttttaatcgtatatagctccattacataaccaaatgttcaggaaatatttgtaaaactaaagaaataattcttactctgtatattaatagaactgagtatgagattatacgaatgtgacattaaagattgaaggaatgtcctataaaccaaaagctttttgaaaaatactcgccatttgcctgaaaattgaataatgtcacactaaagacaaagctggattgtgtccccttggcattaacaatatggagttaatggcagatagcatgtgaaaatgtgagcagacagttatcataaagggatacaaaaatataagaaaagctagatttaaataacatttctcaagaaaaatatagccacaatgattaaaatatagcttttttattgtatgatttttaagatttctcaagtttaaagacacagaaatacaatttaaatgatctcagggaaaaaagtaatttwttggaaggattctaggtcatgttatggaaaccaaaccagaaaaaagagagggctatatttgtaccccagggacactagatctagtgataggtagtgaacrctagaactcacatgacatcaaggacttgggctttcatctctgctgcttcttgaatgctcacattgtttttcccttccttttcaaactttctcaacttagcagtaaagttgactacaagcagttttaagttgtacacctttcaatttaacctccaaagagaaaacattactaactgctgctatctctggttccaagtccaaaaactgcagagaagggaatcatttgttcagcttggattgtgtgcccaaaactggacaaacaattgtggccagagaaataggatcttgttagcaacatggaacattcatagacttatggactattataactaggagacacattaaacatcacttttctaataattttgtttagagattaatgaactgtgacaacaaatgttcagagacttgaccaagtgacaaaacttgaatttgaataagtatctagtgtttttgtaatgcttaaagttattaaaaggaaaataaaaataaatgaagtaggaagagaaggaaatgaagtagaagaaagaagaagagaaggaggaagagagggagaagggaaaagaaggaaagaaggaaggaaggttgaaatggaaaaagtaaaagggaaagaaaggaagtaaaaaacagaaacaaaaacgggcagctcctactgtaattctattgatggagtgagtgggagaagaggttatattataaagtggctggaaaacaatgccatacttgcccattatagtctatgaaccatgacttacgtagtatatatagcaagtagaataaataaatgattatatttggcttaaattgtcagattattttactcagtttctctcaattttgcaatagatgtgctttctcattttgatttttcactcatcttcccttttatctacagatctgtaggctgtttctcataaaactgattgctgggtgaaaaaatttcttggcatcatcacacaaaaaaatacttatttggttctgcctagtttaaaataccagtgtaaaattaaacacttactacaatgtacctccatttcttaataggcactatgcttmattagaaatgtaaattgagcttttacaagcaatatctttttttttttttttttttttagatggagttccactcttgctgctcagttgggagtgcaaaggcacaatcttggctcactgcaacctccgcctcctgggttcaagcaattctcctgcctcagcctccagagtagcagggattacaggcatgtgccaccacgcttggctaatctttgtattgttagtagagacggggttttaccatgttggtcaggctggtcccgaacttctgaacttaggtgatcacccacctcggcctcccaaagtgctgggattatgggcatgagccactgcacctggcctcactagcaatatctttaatgacgccttggtatactacgtaattactaattacataaattattaaaacacagccataggaaaatgtgtctgtcttcatccagattcatctctaaatgtatggatgtttgagatagcactattgatgtatttattgtagtattttctttggggctatctgaataaagtgaataatttgtttaacaatgttcactatttgcctactaagtgccacgcaggtactgagaagtggaacagaaaataagataattcttagagaactagtccagttgagagaaaaagccttgtaaaaggtcattatagacttctggtaatggcaaactgaatattttgaaccagacttcctgaagaggataacaaaagagctaaacaatatatatgaaacattttccttatgtcgtcttataactaataaagtaggaaataattatggcttcaatacccggaagaaaccagaaatctagagagaagagcctggtttttggaatccttctgctctgtaggcattggcagcccagaataggtatccaacagactgggcattactttgggaagattcctgggtccatggaaaattaccttggaaataaatgtcaccaaatagtgtggctctggtaaatcccttgtgaatgggttggaatcagacaagtgtactctaggtctgttacaggtagttagacaggcaagagcatggcaggagagggctgttcacccctrcccactagcaatgtcaagtgatggtttgacaattatcacactgcctctctaaaaatgataatttggcagcctgtgccagggcatcagggagagacaacctccttaccatccaaagctattaacattaaagtgttaaaattatgcagcagccaggaagaagcaacttcccaggcatgtgcattaagaggcaaaatatcagagtatgaccttctggggccactccaccggaaaagggaaggaagcctcagatgggcatgtgtaccacttcctaaagacagtgcacgtgctcacttcccaggcgtaaggagggcactgtgcatgcgggcagcccaccctaagggaagaatcacaaaaaggggcataagatgccagcctacaaagtcctaggatgacagttaaatgcgacacttgttcttcaagtcgcccacttggatctcttccaagtgatctttcccttttttcctgttctaaagcctttttaataaacttccactcctgctctgaaacttcctgtctctttttctgccttatgcccctaaattgaattctttattctgaggaggtaagaattcaggttgctgcagacccgtacagattcgcagatggtaactcagatacctgccaccagtaacaggtctaagagtgcatcagaagcaaaacagctattaaaagtttgagtcatgtgggtgaccaaaaaaaaaaaaaaaaagtcagtgtttktttgtttgtttgtttgtttgtttttgagacagagtctcggtctgtcgcccaggctgcagtggcgcgatctcgactcactgcaagctccgccttccgggtttgcaccattctcctgcctcagcctcccgagtagcagagactacaggcgtccgccaccaagcccggctaattttttgtattttttttagtagagacagagtttcactgtgttagctaggatggtctcgatctcctgaccttgtgatccaccctcctcggcctcccaaagtgctgggattacaggtgtgagccaccatgcccagccaaaagcatcacttcttaaagttgtgttaaagcaaaataaatgataaaatatgcaggtaaatttaagtgaataccgactgcaaaaaataataatatattgtctcaggggtcttataaaatgtacataattaaaataaattttaaaatgcatatactttgaaggaaaaggtgttctgcagtgcttgcattgtctgggaagagagaatcaattaattctagtacatgtttctcaggaaaaccagtaaactatagtaaaaaaggaataaatgctgagttaatttgggggaaagagaaaataattgtaatatgaaggaaggcaagaaaagagattataaagtataagactacataagacaaatagaaaatgtagagcaagattgtagatttaaagccaaatattaaaaatatttaatgtaartaaagacagttgttatctgcctakacaaaaaacgaaacttgattttacactatttaagagatatatgtaaaaacaaaatatagaaaggttggaaagaaaaaagatgggaaagaagacgggaaaaaagatgctcctgtagtcccagctacttgggaggttgaggcaggagaatggtgtgaacccggcaggtggagcttgcagtgagcctagatcatgccactaaactccagcctgggcgacagagtgagactctttctcaaaaaaacagaaaaaccaaacaaacaaaaaaaaaaccatataattctgcagaatgcacatcatttttattgtctcaaggagaacttaatagcaattagccaaacactagtcataatgyatattcrtaaaattcaaaggactgaaatcatacagaatgtttcttgaccacaatttagttgagctagaggtcgatagcaaaaacgagccaaaataagaaaaaataaaataaaaactaaaaaatgctcatgtatatacagaaatcatttccaggtggattgcagatctgaatatgaggttgtaaaccaaaaggtatttgagacaggtctcaatcaatttagaaagtttatgttgccaaggttaaggacatgggcccctgacagagcctcaggagctcctgaagacatgtgcccaaggtggtcagggttcaagtgtgcttttatacattttagggagacatgagacatcaattaatatgtgtaacattgccttaggtacagtaaatcaggacwacttgaagagsggggcggaggcaaaagactgcattcttttgagtccttgatcagccttccactgaatacacsaatrcacaatttggtctggctcagtgaatctacatttttacataaacaatacagtggagaaagcaatcagatatgcatttgtctcaggtgagcctcagagggatgactttgagttctgtctgtcctttgtccacaaggaaattccctgtgggggaggtatgtagctttttatctttgtagctaccttatttaggaatacaatgggaggcagatttgggtgacatagttcccagcttgacttttcccttggcttagtaatttgggggtcctgaggtttatttttttttcacaaaggtaaacaacgcatgttttacaaagaaaacataagaaaacatcttattgctcttagagtaggcagtagttttgcttatttaaaaaggtatagcctgggtgcggtggctcacgcctgtaatcccagcactttgggaggcccaggcgggcggatcacgagctcaggagtttgaggccagcctggccaatgtggtgaaatgccgtctctactaaaaatgcaaaaactagccagtcttggtggtgtgcacctgtagtcccagttactcgggaagctgaggcagaagaattgcttgaacccaggaggcggaggttggagtgagtcgacatcatgccactgcactccagccaagtaagactccgtctcgaaaaaaaataaagtataaatcagagaagaaaaaataataaatcagactattttaaaatgtagaactactgtttatcaaaaatatgccatcaagagagtaaaaatgcygccaataaagtgggaaaatatccaattayttagatcaagagcacgtaagaaatgatgcttaacatccttagtcactgtggaaatgtaaattaaagccactatgccagaatggctaaactgaatactcttcagaaatgagaataaacaatgtacagttacaagtaaaaatatggattaatttcatgaacataactgagcaaaagaagttacattaaaaagtatacatattctatgattaaattgcataaagtataaaattaagtgaacctaatctatggtwttggaggtcaagatagagattaattctccttcccatwgggtgtggcatgttgacaagagaaagtattgagccacacacaataaatcatactttttgtttgtttaattttgagayagggtcttgctgtctttcccaggctggagtgcaatggcataatcatggctcactgaaggaccaacctcctaggctccagtgatcctccactttagcctcctctctgcgactacaggtatacaccaccataactgatgaatttcttgtttttcatagagacaaggtctccctatgttgcccagggtggccttgaactctgggctcaagtgatcctttcaccttagcctctcaaagtgttgggattagtcataagccacagtatttggccttttaaaaatacatacatmtattttgaaaatcacttttttttctttccaactatttttaggttygaggggtacatatacaggtttgttacatgggtaaattgcatgttgcaggggtttcttatacagattatttcatcacccaggtaataaacmgtacctgagaggtggtttttcacaccttactctccttcaaccctccaccctcaagtaggccctagtgtccattatttataaccatgtatactcaatatttagctcccacttataagtgagaacatgtggtgtttggttttcttttcttgcattaactaatttaggataatggcctccaattccacatgtgttgctgcaaaggacatgacttcattcttttttatgactgcrtaatattccatggtacatatctaccacatttcctttatccggttcagcactgatgagtgtctaccttgattccacatctttgctattgtgctttaataaacatatgcattaatgtgtctttctggcagaacatttatattctttttttttttttttttttttttgagacagagtctcgctctgtcacccatgctggagtgcagtggcatgatcttggctcactgcaagctccacctcccgggttcacgccattctcctgcctcagcctcccaagtagctggaattacaggcgcccgccaccacgcccggctaattttttgtatttttagtagaggcggggtttcaccatgttagccaagatggtctcgatatgctgaccttgtgatccgcccgcctcagcctcccaaagtactgggattacaggcgtgagccactgcacccggccagaacatttatattcttttagatatatacccagaaatggaattcctgggatgaccgataattcaattttaagttctttgcgaaatctccaaactgctttcctcaggggctgaactaatttacattcctgctagcagtgtataagcattccattttccccttaatctcatcagcatcaactttttaataagctattctaactggtatgagatagtatctcattgtggttctgatttgcatttctctaatgatyagtgatgttgagcattttttcrtatgcttgttggctgagtgtatgtcttttcttgagaaacgtctattcatatcctttgccyattttttaaatagggttattttggttttgtttgtttaagttccttatagattctggatattagacctctgtcagatgcatagtttgcaaatattttttctttcaatttaggtttctttcaatttactctgtggatagcttcttctgctgcgtataaattctttaattagatcccacttgtccattttttttttttcaattttggagtctttgtcatgaaatctttgacaggacctatgtccagaatgtttattcctaggtgttattctagggttttatagttaaaagttttacatttaagtctttagccctcaagatgagttacattttacatttttcatttaactcatcaagtctttaacccatcctgacttttgtttatagtaaagagaaggggtccaggttcaraaagttttacatttaagtctttagccctcaagatgagttacattttacatttttcatttaactcattaagtctttaacccatcctgacttttgtttatagtaaagagaaggggtccgggttcaatcctctgcatatagctagccagttacccagcaccattcattaaatagggagtccatttcccattgcttgtttttgttaactttgtcaaaagttatttgttgtaggtgtgtgaccttattcttgggttctctatcctgttccattggtctatgtgtctgtttttatacttgtaccatgctgctttggttactgttgccttgtagtagagtgtgatgcctctggcttagttctttttgcttaggattgttttggctattcagactatattttggttctgtataaattttggagtatatttttctaattctgtggaaaatgtttttgatagtttgataggaacagcattgtatctataaattgctttgggcagtatgaccattttaacaatattgattcttcctacagatgaccatggattatttttccatgtttgcttaatctctgattactttcaatagtatttcataattcttattgtagagatctttcccctctctggttagctgtcttcctaggcatttttgtatgtgtgtggctattgtgaatgggattgtgttttgatttggctctcagcttggatgttgttggtaaattgtgtttatttcgatcttcagttttctttattactccaacttgtggtctatcaatcttattctttcaaagaacccgctttttgtttcattaatctattgtatttattttaatctcaatttcattcagttcagctcggattttagtatttcttttcttctgctagtttttgggttgatttgctgtaagttgggttcagttgagtggctttgtttctggatgatttcacggggggccaggctcagctgagcactcttgagcttcatgctctaaccataaggtgcagtgtccaagcccataacttcgttttctgtccccttgaggttaagcagctgctgtgctggaggwgctagagatgttcccagtccacaagcaccaatactctgataaggggtgctggaaaaagcacttcatcaggatagtggcatcagggtccacacatgcacacacactgacaacagtgtgatgacagtgtgatggagtctgtgtacacatgctcatgctagtggtggtggaatggctgggtctccatgcacataggcaccagcaggggctgggttatggtggtgagttccacatgcatgcatctgtggtactgggtgatatgttttggctgtgtccccacccaaatctcatattgaattgtaatccccactggctgggggagggacctcatgggaggtgattagatcatgggartggttyccccatgctgttcttgtgatagtgagtgagttctcatgagatctgatggttttataagaggcttcccccttcactctgcactcattctctctcctgccaccatgtgaagaaagatatgtttgcttcttcttccatcatgattgtaagtttcctgaggcctccccagccattcaaaactgtgagtcaactaaacctcttttctttataatttacccagtctcgggtatgtccttatagtagtgtgagaatgaacaaatagactggggttgtgaggttcacagagtgcacaccatagcatagtagtaggaacaggccatgggcaggtgcttgggggcaaagcagtggaggaggctgctggcaggtgcatgtcagccaggcctgtctgctaaagctctccgatggttaggtagggtccacaccaagtagctatggtggcagctgctgcaaaatgcctctgttggkgatctcaggctgcggtgcaaatgggtgtggccagggaggtgccccagagaaggaccagcaaacgggggtgtgttcagatcagactggycccgtcccatggacaagatagctctgctctgttcaggtctgacagtcaacaaaggccaaagccacctaggggagtgtggtaagccttggaggatgtgcatccctggctgtgctctactgtagtcatgctgtgccaacaccccccagttccccaaaggctggagtcttgtccctgacacttctccaagcagctctccatgccagctcggatgtatatggcggtcatggggattcctayggttaatattctagaggtccgtggtaagtccatgggccacttctcacctatttaactcactccttccaaggagtcactgggggctaggaacaagtcctggtgcttggcagtctcatgcagggttcccagcttcctcccccttcagcccagtgtctgcatgctccctttttccactcttaatgatttccttctaaagatctccttagagtatactggacttcatgatggtctggtttcaccatgggagatgcttttccttgctgtgtctagctagccatcttggctcctctcacttttttgcatgtgtatttttatgtatatgtcttctacagagaaagcaccaaatttagatgacttcactgataagtcctaccaaatattcaagaaagaaatcctacactaacaaatcctaccaaatattcaagagaactattatataaaacctcctagagaatagaaaaacttagaaatattttcaatttattttataagggcagcataaacataatgctaaaagcaaacaggtatattaataggctgggcatggtggctcacacytgtaatcccagcactttgggaggccgagggggtggaacacaaggtcaggagatcragaccatcctggctaacacggtgaaacccagtctctactaaaaaatacaaaaaattagctgggcgttgyggtgggcgcctgtagtcccagctactcgggaggctgaggcaggagaatggcgtgaacccgggagacggagcttgcagtgagccgagattgtgccactgcactccagcctgggtgacagagcgtgactctgtctcaaaaaaaaaaaaaagaaaaaaagaaaaaaagaataagttaatttcatttatatacagagatgcagctgtcttaaatcattagtgcacaaatccagcaatacataaaaagtacagtattgtcacaaccatgcaggctctatttcagaagtggaagtttggcttaataatgaaaaatcaattaatgtaattaacttttatatcaaagcagaaaaaatcatgtacaaaaaaggctactgataataaaaatcaaaagctagtgataaaatgcaataatcatttatggtacagtatttaacaaagtaggaatagatggaatttttcttatctaatagaaggattttgcaaaaacttgtagcaaatgttattatgaattgttaaaatattatccaatgagattagaaattagaaaaaagttcctaatattatttccctttcaaattataytatacattcttgtcaaaacaggaaggcaagaggaaaaaagttataaaggttgaaagaaagcaataaaatgctcattagctgcaaaatatatgattatgtatctataatatccaatgaatgtacagatgagttatctggattattaagaagtttagcaaggatgttggtgcaaggtaatatatcaaaatttacatataaaccagtggtaaacaattgaaaataaaatttaaaacataatattataatattattgatatatcgtataccaaaaaatagtcctgcaagaatcttaacagagaaaactgtaaatcattattgagaaatcttttatatatgttcatagttaaggaagagttaaataaagagaasagaatatatgttcatgaataggaagactcaatattttaagatgtaaattctcctcaaattgagctatatgttcactggctaaatcccagtcaaaatcccagcaggtatttttagatatcagtaagcagacttttaagttatcctgcttttatttcagaatatggccaagaaaactgrgggaaaawttttcayttcacacaactgagccaagttacaggatatttccatgactggatcttccaagttccagaacagaaatattaagctgcaattgwaagatctggttctagatgagtggctattaatgctggttgaagaatctgcaaaactgctacaaagggaagaatgagcccactatgcacattgggatgggaaactataaaaaaaacagaaaacaaaaaacaacaacaacaaactcmtccaaaattagaaaaccaaaattcccatttccctgaagaaatgtaatggtgatcttctggcaagtgtgtcaagttctgagttgcaaacaaacaagttccaccttatttttatgaaaaggctacccagttacccactttgtcactactcttagagtcaaggttcacgatgtggtttggatttgtgtccctgcccaaatctcatgtttaattataatccccaatgttgaaggaggggcctgctaggagctgattgaaccctggggccgaattttcccccttgctgttcttgtgatagtgcatgagatgggaagacagtatctgagtgtttaaaaatgtatagcacctgcccctttgctctcttcctcctgctcctgtcatgtaagacatgcctgctttcacttcacccctccatcgtgattgtaattttcctgaggcctccccagctatgctccttgtatagcctgcagaactgcaagccaatcaaacctcttttctttataaattacccagtctcaggtagttctttatagcattgtgagaatggactaatasagttcaggatttgcaatttaaggaaacatgcggtgcattctatcatactctgtattattagtagatcttttataatacggtacmtttcaaatgtgttcctccccaaccacaaagccttttatttacctaaacggtcttgccatgtcaaaggcaaggctactgttcagtaaactcctctaaatcagaatgtcattagaagaaatttaaattatatgtaaaggaataaaagctgaaaatcgaagrcttttgttttgaaaagttgagcttacaaatttgcaagtgtcattttctgtatttccgaaatactgtaaaatttatttattataaagtttaatattagaaataaaagcttattactaaaaaaagtaatgttaagaaagacaaataatatagcaaacactcaaaattgtaatttcactatataaattcattttctacaataatcagaggaaaattaaaattactgttcaaaatttggaggtgaaagcagggatcaactgtctattaaagttactaaatttggcataaaaaatttaaagactctggaagatttggtttcgtttaatgagttcagggaattttaaaaaacacgtttttctgtatttttttgaaagttcttgtcagaaagcatttggaaagtcaaaaatatatagcagagagatcaaatagggttggagctgagattcagaggcagagataagtgatatggttggagtatatcaatctcccaaggagccacttcccaggttcggaatgtagaaaccaagccagaagtaagagtggcataaaatcatctccctaccacctggaaactacctctcccaactatctaaacagtggaaacttctggtaatttaacaaaaagtatttatgagttgttaacaaagatatgaaaagctaaaccattgtttcaggtaccatgcaaattgacaatgaagtgttgaaaatgaaatgtagggcctcttttcagaatattatgatgtattagtccattctcactctgctacaaagatactacctgagacttggtaatttataaacaaaagaggttaaattgactcacagttctacatggctggagaggcctcaggaaacttacaatcatggcagaaggtgaaggggaagcaggcacctttttcacaaggcagcaggagagagagaaagagcrtgagcggaggggaagtgccacactttcaaaccatcagatctcatgagaactcactcactatcaggagaacagcatrggggaaaatccccccaataatccaattacctcccaccaggtccctccctcaacatgtggggattacaattcaagataagatctggttggggacacagagccaaatggtatcatgtgatctaattgttagacagaatcataaatacacaaagcataggtgaaaagtttcataatagcattaacaccataaaattatgaaagaaggaggagcccattcttcaaggaatgtcaggaacagtttcagaaaagaatctttgagctaggtcttgacagatgacaaatacatagtctcatatggttaactcttgagccttatgaggatgaaaaaccagtatcagaaataaagaccaagttttgatttatcttatgtgccatrttaagtactttaggctgaaggcagtaggaataaatcagctgatttttaaacaggagagagagataygggcaggttacttatatyggmatcagtgggtgggatagattggataaaaggggcggggaggagaagaaggggcagagaagggaagggagargagaggataaaccatagttttattatctaacaaaaagcttccagggaatttaggcagacgatagtttttcttaaggctccttttttttcattgactcctttctaattcccccaagtcycaattctgttttctcatttttaatttckgtgtctcatgtgaacttacatctrcattgatatgattttcattagatattataaagaagaatayttayaattaatctaatgttaggaatatttagcatgcarcaagtgaatataggtgcttactaattaatgccttggattacagtgtcctaatgcctggaggtttttggaagtaactctgatctcagtaacactyaccctattgctgtttatctaacaaaacaggcattgcctcagctcacagcatttgtacttgctgttccctttccctgggatgtactttcctcaaacatctacagggcatattcatgtatgatctctgaaatcaccttgcttctgactgyrgtatataacatagcaaaggccgctgctcaatttcccaccacctccaattctgtttttccaatcctgytccccttttttccacagcatttattgccatctgacattctatggatttgcttgtttgtggccagcctccccaacaagaaaggaagctcctcaagagcaagaattttgttttgttcactgctgtatgtccccggcaccaacaacagtgtctggcatagtggagatgcctaggtgatatttattgaatgaattagtaaataatattcctataaaatgtggtgaaaagaattccacatgaggaaattaaagtctggagaaattcaacaactggctgaatataacttaacattagcaattattatcactgtcattttaktactatttttacaaacctatgctttgacatataaattagctccagtcatcacagcagtgctgtaagattgcagacagttgtatagattgttcaaggtcagctagctaatggatagaagaataattttctgaccaaatggtgatttgttatatttggatggaatgcatgtttcctagcaatttacctgctgggttgcacttcatctgccttatatcccttagctttcttccaccttctgcttatatattgaagaattgcaggcttatcattatatatttgcctactgattaaatgtattttaatcctttatggaattaccataagagatgctatggataggctagaacaaactttgaaagagaggtggtgtcttcgtttcctagagctgctgtgttagggttcttcwgggagagagaactgataggatatatatatatataatctattatatgtgtatgtgtgtatatatatatgatctattatatgtgtatgtatatatatatatatacacatatatatatatakagagagagagatgagatgagatgggatttttttaggggaattagctcccatgacaggctttctgcaacctgraaacactgaaatgctgatagcatcgcttagtccaactctgaaaacctcagaaccaggtaaacaaatggtgtaactcaatctgaggctaaaggcctgagaactcagggagttgctggtgtaagttctggagtccaaagrccagagagcttagagttctgatgtccaaaggcaggagaagaagggtgtcccagctccagaagagagagagaaagarggagagcaaatttgcctttcttctsgctttttgttctacctgggtccacagccgtttggatgttaaccacacacattgagggtagatctttccccattcagtcaaccaactcacaattcatgaaccagtctcctcagaaacaccctcacagacatacctcatggaaataatgctttatcagttctctaagtactccttaatccagtcaagttgacatctaaaattaaccatcacaattgctgtcacaaaataccacaaaactacagacataaaactcatgtaaaactacagaatttttgtttgtttcacagttctgggggctaaaaaaccaaaggtgccagaatcaaaggcccaaaatcaagacattgggagggccatgctccctgtgaaacctgtaggagaaaatcttccttgtctcttcctagcttctgacagaagtcattgatccttggcattccttgggttacaaatgcatcgctccaatctctgtctctgtcatcacatggcattctccctgtgtgtttctatcttcatgtgttcatcttttatgtgtgtgtgtgtgtctgtgtccaaatttctcttttcttatgaagacaacagtcatactggatttgagcaatccctaactgacctcatcttaactcgattatacctgcaaagacccaacttccaaatgaggtcacattcatagatgccagggtataggacttcaacatatatttctgcaggacacaaggcaacccatagcagatggagagcatcagcatgatgggattgctaataatgggtttaatgtatcaagctwtttctcaattcagagacttcccatgtattgtctcctctgtctgcattacttttctgcccactctttgctcaagttctggtrttgtactggagccatctcacaccagctcttgaggttcaattgytaaattttcagaagccagttgccaaacacagcaattattaaaaattaaatatataaacataattaattacatttaaagcaatggtaatacattctaaaaactyatccatttctagctattttgctacatttgattattatctatctatactctttagattatttgcatctattatatttacatagcagaaatataaaatactkgtattmatatgtctccataaatccatattcagtgacctcaccttgatagtttgaaattggccacagagtggatatatttataatacagaaaycagctaccagtacaaatcaggtctttttttatccttggaaaagcagctgttaaatatttaccagatatactggttaattctcgtacttcctttaggcctcatcttcatctcctcagaccagctttccatagcatccatttaaaatagactcyttcctctcattctctttctgaattcctttttctattcttcttgaaattcttttttgtaattgtgcagttatatatgcatttatttcatatctgtttctctcactaaattaagtttcttgagagcaggacccgtgatttttttatttctgtttatttctagcacagaaatacagcatttagcatatgacaggcacttaatacatatttgttaaatatttatgatgcatttgaggaataaatggaaaatcaaaattatgagatagtatgttaagtttggtgatcaggcaaagttaaagcatggccaaaaggcactgagtttccagttacctgctaagatgtgtaattaaatttaggtgaaaactgagagtgttaattccttggtatctatttttcctgcctctttgcacttatgatttgtgatggtaaacattaataatctaatcagatgcatgggacaattgaagtaaagagagatgtgtatggcatatacccagtgagaggttcctagaacgtagtaaatttrttctaataaaagaatctgwcaattgaagaaaggaatgcaaactggcctatggcatagttaccracttaccatttgtgccaacgaatccttgggtgacctcactgtaaggagctacatgagataaagatgggctcaatgtagaaatgaaaataataaatgccttcaatgggaggataggtcaacatrtttgaagtattctggggtactactaagcctgggaaataatctagggacagaagaggtaggcactagtcttggcttccaggctttaattaaacacctatatatgggcagcatcagctgtagttaggaagcagttcattccatccagagacttggttaccgaaggcccagacttatcaagcatggccaaatggtaagagtaagagtcttgaaagtagacatactgagatattaaaattaactcttagtttattaaatgactttcagtaatgtacttaatctgwctgcagttggtttctttatgtcttaaattggggtaacagtacaaacctgttggagaaaggagacygccactaacatttcaggaagttttgcatgaattagtaaagggcatcgactctgagctaatgcagtccctctagctaatggcttggcaagaaaatgactcttttgcataagtaaaaagatagtttcttgtttctggtgctcatactcagggtacaagactactggcctccaaatgcaggaagcaagtgatctgtacaatcattctgggtcctggggctgaggtaaagattaatcaagatcttatattaaaacactgagctgtatttgaaaacttaaccctgtcacaaatgtcagtttccttcccaaaaatctctcctcgttttcttctctttcctgtctcccccacaccactatcaagttggatttccttgcccttggagatgagtgagttcaactttaattttctacaaatatctttgtttcagaccctgaatagataacagagagtcatttaccctcttctcattgctctaccccatgtaactcccatcccatgtaattaatcataaagtgtattttgttttatgaggtatcctgagtaagtgctaatggagactaagtttagggagcatgaaatactgctacctttctccatgtgccaataaacctgctcagtctcagctgtaaaaaacacaaacaagtaaaacctgtttttctcttgycccttaaattatgtcagtacctggcagtcgtttatgtttwaaaagtcaacagatggcastcaagggaccaggaacatgataagtgtttaaagggtgtgatttactactcagcartgtgccagtgatgtggcatgaattaaaaacaagaagtcttccaggagaaaagatttctttagagatgtaattaattgacctggyttgggtcyctcctttccyggagaagtagttgtcagtgaagtgtttcaaatactgccctggttgtaattattattcaagttcatgctgcaaaatcatcttcacttaataattctagcattcaccacccaaaaactcataaacaaggcttttgtattgccacacagtttggrattttttttctctcagaattaggaagcaaatgtagccagcaattattttagatattgctttcagaaatgaatttttcccatatctgtcagatttggctcagagttctttttcaatttaatcattgttagcagcatgaaaaactgttaagttaaatgttcagacctaagcaagtcattactccatatctgaactctagagagctaatggttgtcatggtaatatgactgcatgtgtgaagttagcattggcaacattacattttcattaaaacatcatgaatatttgcatgaacttctgcccagaccattgttgcaggattggctcctccaccccatctcataatcgtgccaagagatttcatatttcagatccaaacttgttagagtttacagcgttcattattcatccctcggagatagaagttgacctgtattcaaggcttaacatatatgaatagagagctcactatatatctctatggttgatcctactaattactgttccactgaattgaggtaaccctcccatttcttttagtgaatagttttaattactttctttgacttgcctcttcccaaattaggatatgtttcttcaaataactccccatggatttgtagtgttgctattactcctgaagatgtaggtttccccctcccctccccttccttcccctccttccccttgatggagtttcgccctttcacccaggctggaatgaagtggtgtgatctcagttgactgcaacctctgcctcctaggttcaagccattctcctgcctaagcctcccgagtagctgagattacaggcacatgccaccacgcccagctaatttttgtatttttagtagaggtgacgtttcgccatgttggccaggcttgtcttgaactcctgacttcaggtaatccactcgccttgtgctagaattttttttctccttatgccttcttcccagaacctccattatgtttyctttggtttagggctgtgattatacttatttgcccatatgatcatttatttattcaattaataaatatttattatggtttactatgttgtagggtagatgctagatcctaagtaagcaagggcaacaattagttgattagacatgtaagctcttgctgtctaccctgttcttggccaaattgtctgtatttcagtgcagcagatgtcttcacaaaggtttttttagcacacaaactgtttgttgagtcctataaattagcaaacaatgctagtttactttttgtttccatgtcattgtttaaacattcttttgttgagctaaaggtttgaatgaataagccaacaaccaggaggtgccagaacagttcctgtatataccctgcatatatttatttgcagattttactggctattaaatatcatataatacataccagctctctcctttctctgcttacacatacatggttcctgattgatcaataatttaagcgttgcatttggagattcctataggagtttcaaatggtgtccacggtacttctgtatgtgcctctgttcatattgctccttacacttagtctgcctttcccatcccaaattcccactgaagacctggagaaggcctcatctttcaaaattcaattcaagtatcatttcgtttatgaagtgttatataacaataggaggataaatcaataacaggataaataaagaataagaaagcacactaaaaactctttttttttttttttgaaacaaattcttactctgttgtccaggctagagtgtwgtggtgcaatcatggttcattgcagcctcaacatcccgggttcaagtgatcttcctgccttggcctgccaataactgagactataggtgttcactaccacacctgtctaatttktgtgtgtgtgtggagatggggtcttgctatgttgcctaggctggtcctcaaatttctaggctcaagcaatcctcctgccttggccttccaaagtgttaggatttacaatccagagtcactgctcccagactaaaagcatttttttttaacaactctggaagtgaattccagcagaaccagcaaaaagaatggaattaattacctctggggaaagtgcctaagggtaaggagaactagggcagtaaactattataagtcttgtaccactattaagcttctaaaaccatgtacatgccattttaatttttaaaaagataaattttaaaaactctatatgcttacattaaaagtatactagttattctgtagtatttctcatcaaattattttaatttggattatttttttcactaaatttaaatggacagcagacccagatgaataataaagcataaagtttgatttcagtaaattgataacttgataactttgatcatttgtgtacttatgccttctaattacagccctctaaaaatacatcggattggtttttaaaaatgtaatctgtaaaagcctttctgccgattgctaactaaatgtcaacatctaccatgtagtcttaggaatcattaagaatacaactgagggtcatagatttagaaagatatttaatccaccctaaagatgagatactgaattaggtaatatctagaagtctcttgcatgcctccttccaagatatttatatctgtaactacacccgaatatctatttagaaacagatatctaaaattatggggattgttggatctagacaagttgcttttaaatgaattctgtgaaaataaaagatctcagaatatctgggaatcttcagtaagagaagaataatgagaaagaatagcattctaaaatattaaagcctattatgcagctgaaatttaaaaaatactatgggtttatcaatgaatttgatagagctaggatggaatataaaactcaaaaatacatatgtgaaggtagtttatgataaatgcggaatttcagatcatggtgaaaagaatttttcaatagtggtaggaccacagttttacagccatttagaaaaataaataaaatgcaattttaaaaagctagatccatgctttatgaaaataagagattcccctcccccccttttattttgagcatttactttagaaaacttgtaattatacatacttgatactatttctraaaaaaaaaaatacatccttttgaaacctaggcaagattttttcagcttaatcatccaggaatgtctytctcaaggacctggaagctgtctctttgaaatgtaaacatcattaaaaaaaaaagatgtttgtttctcttctaagtaaagccaattccaattagctaaaataaatggtcaccccagttagctggtaaagttaaagtggtgctgtcaagccctcttactcgaagactagttattatttatcttgataatatgtgtgtaatgggctgtatctgcttggctatataaaatttctttctgtctttgcaatctctttgtggattgcctgtgatatkctcacattctagattaattcttattcaataatgatttttttttgtttctctactacttttataggaaacatttctaggttgagagattattttatcaccaatattgytaatacagattttctctgctgtaaatagcctttgtattagtttgttttcacactgctataaagaatacgtgaaactgggtaatttataaagaaaagaggcttaattgactcacagttccacatggctgggaaggcctcaggaaacttacaataacagcagaaggggaagcaagacagcaggagagagagtgaggcaggggaaattgccagaaacttatcaaacaaccagatcctgtgagaaatcactcaccatcatgagaacggcatggggaaactgtccccacgatccaatcacctcccaccaggaccacccctaccctgcccttgacatgtagggattacaatttggattacagctggagatgagatttgggtggggaaacagccaaaccatatcagccctgtttttatattggttctcttgtccgggttggaattctgactaggaccctgtgtggggtaaaacactgtgggatggagatggggcaggttaactagcctggttttctctggggtgagtggcaggagatatctatcagctgggattaaaaccaagcacattgcttccagaatttcttactgcttgacttgaatgaaaatgttattactgatgataatttgggggaataatctcatgcctaacttgtattggaataatagtaagatgtgtaataaacatatgtgagtcttgagaattccgctctcattttgactcaacagtaagttacttgataaagtttgtcctacagtctcacttcttctcagcagaattcttactgtgtgatcagatactaaattcctttcagtttattcccagtaaatctgatggaatgtctagattctgcagactttgatccaaagactgaactaaatccaatgaactcaagagaacaacttttaagtagttattaagccgatattctgtgttcagacctgtgcctgggactgaaagaacataaataaatgtaactgaggaattgttctttctctttgatctagatgataacttacctaggggacgaatgggagtgggcagatctgaagaatggaagaatctgttgtaatagtctaaatgtgaggcaatgaattataaggtttccataatacagatgcaaagagacagaaagataaactaccataagaattaaaggagcttgataagttcctctgcaaagcctaaattaaaatgagacataaatggtcaatgattgacacaagatagtacagcagataaaaatatggatttcggtgtctatgagaactgaattaaagtcccagatctgacattggaattcaacagttacatgattcttctcagtttcagttttcttttgtgtaaaatagaacaaacmgtacttccttcagaaatgtattataaagttagtgtttttaaaactacaggttatgcctttttcttgagaaattaactttacagtttaatgaggaacagatagcattttaataagaaagatctggaaaagaaaagtagaatgcatcactcatggtaaaaataagtatttttgtaacactttattctagtgattgtatatatgtgtgtgagtgtgtgtgtgtaagagaatcattggattaaaaattaaaatataaataataggtatttatgagaaacccacagccaatatcatactgaatgggtaaaagctggaagcattccttttgaaaatcatcacaagacaaggatgccctctcttaccacttctattcaacatagtattggaagttctggccagggcaatcaggcaagagaaaaaaaatggtattcaaacaggaagagaggaaatcaaattgtctctgtttgcagatgacatgattgtacatttagaaaaccccattatctcagccgcaaaactccttaagctgatgagcaacttcagcaaagtctcaggacgcaaatcaatgtgcaaaaatcacaagcattcttatacaccaatgatagagagccaaatcatgtgtcagaagtgggaacactgatgtttagaaagaytaagtagcttgttgaagtttacttaactgatggatcctagattcaaacctaggcattctgattcagaaactcctaagtttttactacaaggctttatttttttggagaggtctgtacttctgagaatttgatcttagtatttgtttaaatgcctttatcttaactgctttgagactgtgatctgtctattcatctatgtccctatatcagatagatatagaaaataaaaatgcaatcatttattagtataatcatatattattttgcctttatgttttactaaattaaaactctgaaaaaaaactatttctttgtaaatcaaaatagtgtcaatttttttttaaaggatcagcagttcaaacagacttctttttaaagaggaagattacattgagggttctttacttttttggaagtaaaaggaatgcatatttaaattttgatttttacttttgtagaacaagcgtcatagaaagtgactttgatttatacagagaaatagtaggcatctataggatgaattatatataatcaatcaactattaaactaaattaatgtgtatttatttattataggtataaatgaagaaagcaattattctaattttgaaacacgtcatgcaagccatgcataatacaataagcattctgcagtgcacattttttccaggaaatttaatttttaaaaaagcaacatagatatgcttctggtgtgagaaatgttactactgataacattttaccattttctcaaaattaaaaaaaaactatattgatgaaggattggcttgtaattaagtctatttatttgtgcaaatgttggaaacagacatattttaacttctgaaatacctagataactttgttcttcaacttttggttatacaaatgaagtacaattgttcaaagtaaatttcttggatttatattgaaatttctgttcaacagtatgctttaggtctgaacagaaaatcactatttgcttagcattagcttctctgtccatcaatgtggtaagtaccataaggtaaagaagagcaatatattgcatgatctctagtcatccagcattgatcattgatttggaattttgaaaaatcaatagraaaagctagacgtattataaaactgcatatttttaaaatgtaaacactcatgtgttatttacatgaatgctagcaattcagagaattatcagtgtgggctagaaattctagaaaatattaggcttcaaagatgaggtgatgagacattgttgactggtttttctacctaagcagacttctacagtaagagaagttgcttcatatgattttctaaggtctttttttttcatagaatcttaaattttaaaggaagctgaaaagatatcttgatcaagcctcttttaagctcctctacaatttatctactaagtyaatgcctaattttgaagatgtctattgtgtcttaggggaagttctaattctcacaatgttctttcttttttggttggaattattttactgtaatttctgtctagctatttaaaagtctgtgattctggaggccatggaagttaagttgcccacttttctaarttctattcatctgtttctcacgttgtgatatttcagatctcaattttctgaactgtctctttgaatatattaacaattagtattaattgaatgcttctcttttactaacatttgttctcattaaatcctcctaacaatcctgaaaatttattattattattattatwgttattattattctcaatgttcagctgagagagtaggagcagtgagagataagttgctgagggccatggctagtaagtagatttccactttgaacccaggtatcaggtaccaaaattaayattcttaaccactaagttatgctggcccccatttggcaacacttctctgtatcccttttaaaacttacaccaaactaaatgttcttggagtatgtgatctgattttggcagagtgaaagtctcactttcttcactacaaacattgcaatcggtattatttaggaccccaattttttgttctatgattatctgtgcccttggcttaaactggttttcattcttgttgtatattttagcggttctcttcattttttataaataaatctgttgcatgccaccctaaaaagatgacatttcatgtacactaaactagatgtttctttttagtgttaaaatacatctttaaaataccttaattttcttctccaagatgttagtatagcacagaaattaaaagatacatcacttaatacccrtatgagcttggcagataatttatccttgctttttgttagcaattaaatgggattcataaaatcacttatatcatagtgttgtcttgggtttaaagtaatgcagcaaagtaggcagaatatagacatactcaataaatgttagtaagaacaaattatactagtaccaatacttacagctttgtaagaatgacactccacatttaactttgaaaaatcaggttttttgataatgacacaacacttttgaaaagcccagattttcttatcagcaaagtaatttgatgaacatagtgaaaactacttagcagctcaaaggaatattccttgatatggcaacaattataatattctaagatctctaaaattctattgatttttagcaataaaggtttatctttgcaaaacaagccttcttcctgaggaattttttgttttgatttttaatatacctttttrggaggttgctattggtgtgctgcgttaaagatattcaattcctaagatacctggttaaaacaaaacaaaacaaaaccatttcctctttccaaacatgtatagaactggrtatctctttcctcattttcttttgaaaaactcaggagatgcatactgctattctcacttactgataaaaaggatattggagggaaaataaattamgaatgtcgcagagcctctgcttaagagcctaacccagctcctttcgaagaaatgtggagggagtgcattgtaaatgagatttggcaccttagcttctgcaatcttaccatagtcaacactcccactggctttagcttggagagtgctgtgtgggtggtgattgtattttatgtctttatttaagtgagtgagagagactataatgtgataattctggaaatgatagaggggaagatcctcctcaaatgtttggatggcaatgacagcacattaatagtgtaaatatttttttgtgctagctctgctgcacttctcagatctttttattatatgaatgatacctgaattattcttttaagcagagctctttgccatttggtactacctgttagcaagagttaatcatagagcatgatttatcttctacttgaatcatttttkttttaggaaatctaaatggagtatttttatgtgcatgtttttaaaaacatttattctttatgccaggggaacacagtgggcaagcttttcaacagtgacattaatgaacccccagcagtgtcataggcagatagtttaacagggaacatcacaggagtttagactcaagacattaaccagggtgagacagatattgtgggggttggcttattgtgctgactggaaaataacctccatctattacggcctcgggcctcaggaggaggacattaaggatatactgttaggggatagagatatttatgcaatatagtgaagtgttaaggactgctgatacccaagtatcttctcttttagaagccactttggtggaagtcttccttcacccacactgatgtggcagagggaaaagcttggtcatcttgctactggtgggaggcacttgctcttcttagaaagtcaaattgcattttgaatggaaggcccacaagctgtattttaaacaatcctattctagtactgagggagaaaatttttactttcctctacattcttttcagtttcccatttcttgcctgtacatttgcagtgactttgtaatttattgtccaaaccagatacttttgagaatgaatggggatgctattgataattcagcagtggctatagaaaaactaggtcatataggtattctacctattcctaggcagtggggaaagttttaagagaggctaatgcactgtttgagctagagccacaaaaggagtccttaccttgaataggggctctgcgtrtgtatttgagaaacagaaccttcaaataatacacactgtaggtttgcctagctttgtctcactttagagattgtaattagatgtccactaccatggtcattggaaggctgaggatttgggtgttcatgacagtgggtaaaatcttttataaactctctatcactgatagagatgacctgttctaatacttcctagatgcctagtttctaatgagtctggcatactcgttatcagtttggtgcccattatttctatcacaaaattctacttctccttccataggataggggtttttaacatggctccataatccctaggactcattgaatgcattcagggattcattaattcctgaaatacatacacacatatatctgcatatttatgtatatgtttaattttgagacacatatgtatatttttgtataaaacaagtttctcaactttcattagataccctaaagtttgtgtggtcaaaaatgtttcaaaaaatatggaattgaagtttttaaagctagattttaacctaaaagctataatatctaatatcacattgacacattttatatagcctgcttcagttttatttagagttagaaacactgcattgtgggaaaaataaaagccactggggcatttttttccttccatgaaggctactggaaagagaacttgacaaatataatgaacaacttaacaattgcattatcattttagaggataataattatactattcataataattccctagttttagataatgttgaatatgtgacagggactattcttagcactttacacacacacacacacacacamtttttttgtttgtttttaatatgcacagtactataagttcttctatcatttctattttacagatggggaattgaagcatgaaagattaaatcaagtaactgtccaaagtcacacagctaataactgaaaaaactaagattgagcccatgaagtttgacccctgaatttaacttctacccttttcttgaattattgaattatttattcatcatttagaaagtacccttgcttatgaatgaaaaatatttatgtcatgtaaaaatctaggatatatttttctatttatccatgtaagttggtgagtatatatacatatatgtttgcctgttttgaataagaagttcaattttgattcagggtacatagagttcaaggttttgaaggtgaaatctaactagctcccagaaaatagagtaagaagaaaatggcttctttatggtgctgcctgataaatttcctaaaatgtttgaccttgttaagatacataataatatgataactttataatataatgtaatcattttataataaatctaataataaaattatatttatgtgatactttacttgccagaattcttccatgtaacctgaaaataacaatgaagaagactaggatttaaactggagcagataaaaatgctatggaagagatattcttatcagtattttattgccagtgtgtctttataaaaggattaagtcaaaacatagcaaagaaagcaatggggaaaagacattattcatcatatagaaaaatcaattaagtccacagatttccaaaacccataccttttagaattttgctatgaattttctctaaatattagattacccatcaagttattattcaaatgtgagggatgaaattgataatggaattccaaagtaaatacataaacgaacccaagtaagcatgcaatttgtgaattaccatagttttgctatcccaaacattttggtattttgactttaaatatagtgaaacaaatgccctgggttataaaactgaagaaacaggattgattcctagaagttcactaatcttagacaaatcagttttctatagagcttcctgatttgtgcaataaagaaaaataattgtatctcccagacctattagaagagaaatattagctattgtacataaaattgacactatacacacacatatatatacacatatatttttattgttgtctatgtaatgttctccatttacaaaacttttctatttttaatttttatgaatagacagtaggcgtatatgtttatgggatacatgagatattttgatataggcatacaatgtgtaatgatcacatttgcataaatgagatattcataatctcaaatatttatcttttctttgtgttacatacaaattgtactgttttcattattttttaatgtacattattgttgactctagtcatctaattatatttttataaccaatactcatccccacttctccccatctcattcgcagcctctggtaatcgtcattctactctctatcttcacgagttcagttttcatttttagctcccacaaataagtgagaacgtgtgaagtttgtctttctatgccttgcttatttcacttaacacaatgacctcagctccacccacgtcgttgaaaatgagaggatctccttctttttgtggctgaatagtacaccgttgttatatgtagcacattttctttatccatttatctgttgatgggcacttaggttgcttcaaaatcttggctattgtgaatagtgctacaataaacatgcaagtgcaggtatctcttcaatatactgatttcttttcttttgagtatatgtctagcaataggattgctgggtcatatggtagttctgtttttagtcttttgaggaacctccaaagttttctccataagggttatgctaacttacattcccaccaacagtgtgtatgagggttcccttttctccacgttctcaccagtatcggttgttgcctgtgttttcaataaaagccattttaactgtggtgagataatatcacattgtagttttacttcgcatttatctgatgatgtgatgttgagcaccttttcatatacctgtttgctatttgtatgtcttttgagaaatgtcagtttagatattgtgcccattttttaaatctgattattagatttttttcttacagaactatttgagttatttatatattttggttattaatctcttgtcatatggatagtttgcaaatattttcccccattctttgggttagatctttactttgttgattgtatcctttgctgtgcagaagctctttaatttgatgtaattccatttgtctatttttgctttgattgtttttgcttgtgggatattactcaagaaatctttgcccagtccaatgtcctggagagtttctccagtgttttcttttaraggtttcatagtttcaggtcttagatgaagtcttcaatcaattttgatttttttaatttaggaagagatagagatctagtttcattcttctggtatgttgtatttccattatcatgcatttcaaaaagtttgaaaatttcctcaaaaatttcatcattgactcactggttatcaggaatatatagtaaaatttctgtgtatttgtatagtttccaaaattcctcttattgatttctagttgtrttccattgtggtcaggaaaggtgcttgatattatttcaagtttttgaatgttttgagacttttttgttacctaacatatgatccttgagaatgacccatgtgctgaggagaagaatctgtgttctgcagccattggataaaatgttctgtaaatatttattaggtccatttggcctatagtgcagattaagtctgatgtttatttcttgattttctgtctgaaagatcggtccaatgctaaaagtggaatgttgaaatctccaactattgttgtatttaagtctctctctctctctttagccctaataatatttgctttacatttttgtgtgctgcagttttgggtatatatatatttacaattgttatatcatcttgctgaattgacccctttatcacaatatgatttgatttttttttggtctcttcttatggtttttgtcttgaaatctattttgtctgatattaagtatagcttctcctcttcctttttggtttccattggcatggaatatgtttttccatctgtttattttcagtctatgtgtatcttcataggtraagtgtgtttcttgtaaccagcagatcgttgggtctttttgtttctgcattcaaccactgtatgtcttttgattggatggtttatttcattgacattctatgtaattgctgataagtatggcctttctggtaccattttcttatttgctttctgattgttttgtggtcttctctttcttctttccttccatcctgtcttccttttggtgaaggtgattttctctgggggtatgttttaatttcttctttttctattttttatgtatctgttgtatgttttctgatttgtggttacagtgaggcttgcaactaatataacccacctcaggcccacagtgaggtactgcatagctactgcctatgttcattcaaggtccaagggctcctcagtcagcttgtagtgaatgcttcctggcctgggacttttacttcaggataatgcattcccctctggcccagggagtgtcaagaaatgtcatctgagagccagtgcctggaatcagggaaccttgcttggtgctctaccccactgtggctgaattggtatgtaatctgcaagacaaagtcccattcactcttccctttccttttctyaygcagaaggagtccctctccataacaaccacagatgggaatttgctgggtcacacctaaagccagaacatctctcmrtctcacccaaggcccatggcgagtactgcstgggtaccactgctggttattcaagggccaatggctctttagtcagaagatgattaatcttgccaggactgggtccttttcttcaaggcagcaagtttcttgcttgcccagggtgtgtctagaaatgtcattcgacagttagtgcctagaatcagggcctcaggyctctgcccagggccctatcctactgtggctgagctggcatcccagaggcaggacaaagtcctctttattcatccctctcctctcttcaagcagaaggaagaggtctctcccagaactgtgagctgtgttgcctgggcttggtagagaggtggtgcaagcactctcttggctgctctggctagtgtctcactgggrtgtgtgccccccatgtcactggctgtgagccctgtacagcaccaggacttgcaaggaatttcagtcctttaaacctagactgcctttcaagtttatttacaatcccagagcactttagcccaaaatggcaaggcttgctggggcttaggttttgactgctggaatgggcaattcctttttsgctaggactgggtctaaatgctccctctgtgggctctggctgarttcttcctggtgttgcttttcgttgtaacagggcaacactgagttctcttctccctaacctccttatgtatctgtgagttccaaccctaaaaagaaaaataaaatagaacattgtgccatattctaggtaaactagagtggtattggggataggagtgtttattactcatctttatgcagggaatccctttcacatatcactcactcagtattcactggatgaagctgaattgcattaattagtttaagctaggaatgtgttgtccttctaggctcttccaattttcctcaagtatcaaggcattacagatgacaataaaggataatctctaaatttgtttaactataacttggactgtcattttgtaactatcatttatatttagtcttatctaggtaattagttattatggcaactagtatattgattcccatgccaaaggaattagcttttaaatcttaactattttattatattgtagactggcacatttttgtttggggtctttatgcatctctgtggctaaaaattctgaaagaaaaaaaacccatgcctcttattttactttattttattttatttatttwtttttttttttgagacatggtctttctgtgttgctcaggctggtctcaaaagtctggcctcaagtaatgctcccacctcagcccctaagtgctgggtttacaggcatgatccagcatgctcagacccrgctctcctgaattgttttatttcactttttagttcttcaatttttcacttaaatatatggggtgaaaaatactattgaataattasatctctcttatatggaatccaaattcttctcctccataatatttacatattttcaatatgttaataaatacaatgtcctatataactatgatctttaagatataaagttttttttacctttatatyttttgtttgccaacttccaattttgtttgccaacttccaattttttattcattggatttttaaattttatgtaaaaagtagtatttctctatagtaattatggactaagatcttatggtttattcacatttgttgatattttatgctgtaagccagttggcagtagggattgaggtcatgtgatattttccccattaaagatgccttatattcctatagtttgtatgtatatatgtctgcttatatacatagatatagtatatacagagcatttttatgtacatgaagtcatttatgctataagttgtatatattaatggattttcttaaacttccaagctgcgagtttattttttccccagttttggagatagaccaaatactttttcacataatttttatctcagtttttctgcagggaacttttttatattagccagtgtttacagctggtattataagatgagaaagttgggggaaaggagaaggaaaaaggactgtatttatttaagaaacawtttcagtatagtactgtttttctgaaacatgaaataaatattttatcctccactgtcattttagtgaagcatgaaagctgaggaaatactgagaagtaatggatgcttacatttttttttctttgcaaggggtcaaagctctttcctttatatacctgtgaagtacagaggaacaggtactatttctctttttgagttaaggaaacttagggaagtgacctattttacttcaggaactcaaggaagttgtaaatgttgatcctaagcccttaagaccctaggctatacattagtcagctgcacagagattgtggcagaatcagctacttaatttgcagggcccactgcaaaatgaaatgtgggattccttgatcaaaaaattattaagcgtttggagatgatgacaacagagcagtgaaccaatagcagggtctttctaaagagcaaggtccggtgcacctgcacagattacaaacacatgatgttattcctatcttgtaagcttggaccaccccaccaggaagagctagacacaattcctgctgtggttaagctgcagatggcagtactcttagctatcaaaggcaagagccaggaaagaatgcagaggcaagaactctgttaggccagagaaacaaagtgggggtgggagtacaagctttggtagggtgggtacccagatacttaggatttcctgaggcacactggatctgtagtttaggacagcactccacttctaaatgcacctarcaagtagacttgactytcttgataactgtctgttacttaatgttactgtttgttacttaataactgtcatgttactacatgccatttgctaaaatatagacctcctttttgaagattgaaaatgagctcaaatatctgttaaaaccagatgactccccagtcacgtgtttcaacaacaatcacaacaaaagttgtttatacacttctggtcactaagttaatcaatgaatatttattgagcacttattataagtcataagcactattttaggcagtagaaaaatagcagtggagcaggataaacccttgactttaagaagtgcacattctagtggagtctacagaagttagagaactgcartaaattttaaaatatacaatttggttttattttttgaattaaactctttttctttgtacttgaagaaaaataaaaataactgtcagaatcaagatatatttttaccataaagaaaaaaaatcatgttataaaatattaggaaaaaaagtaggttcctaagggataagaatttttttctcctccttcagaatagattaaaataccacaaatataaaggtcacataagtgacactgcatttgtgggatatttttaacatgaaattaaagtagggatgattctggcattgtccttttgtcagatgtggtattttgtaatatttatcttttgccataaaatcatgttttgattgccataaaatcaygttattacttagtaggattcatttaatgtattgtattattttataagactttgtcacagccgggtattaaaaacaaagaaacaaacagaaagcaaaacaaacaaacaaaaaaacccagataggataactataatgtctcttgagggaaacaagggaaaaaaaaagaaacctacaactttgaaacatggttgaatgtttgatagcacatgttaagatccttttgaatgcagaaacaattttgaaactccataaaatcctttatttctcatgacaggagaacactagacattccacagatacttcaaaatttctccttggaacatcatacaatgaaacttaaaaaattaataataaacacttatatttccacatagtctgtgcacctccttccctcatccctcaccatgtcattataacttggcaagactctctgtttaccattcactaatgtctttttcccttcttgttttttgctttaaaawtatttagcatttatttatgaaakctacaacaatacatacaagaatgctgtcttttttattcctacatgatttgctatattaaaacaaattatgtgtttattatattgttgggagatacttaagtactcccaatctaaggccactgatttttaccatacaagcttttttttttttttttttttttaaaccagtaggtggcctttcaatactgagttaaaaacctgccttccggtgaactttcagtaccttcaccacctgattacagccaaatgacctgggatgtcatacttgagttttttttgatgaatgattttatcattgtctgtctttagatcttatccgtatttctttggtggcaacagttacaactaagacaaagtaatctgagctctctattctgtttgttttttgtgtttttatgcatataccatattgtttttattactatagtcttgaaataaagcttgaaatctgaaagtaaaaaaagaaaacaaagtaaggacagttttaatggggttttaggacagagatggcctatgctatttatcttgagtgtagctgaacataatacaaagctctcaaaattaaaaggaattttagaataatacgtgccactttatgtgccaagaacagcaaaactgtttgattgggctggcctgaagaactttactgtatagtaacaacattcactactctaaggacctagagcatggtacagttatgtccacttgaatgttatgacargagaagggattaacgacatttatttgcctggtgttaggaccctaaattataagcagccccattccaacacacacacacacacacacacacacacacmcacaatctgatttttgtttattttgaaccccttttacaatgtctacctctttaaccatctgatttgctttgcrtgacataggggcatggagtgagctaggtaggtttctgaaccctgtgctttgactatacttagttaatctyttacctgaatgaaagccttaggtttctcatctgtgtaatagaaataaaaatacttaccttgtatgattattttgttttgaagtttaaatgagaaatagatgttctaaaaattactgatgtgatactttcttagcaagtattaatcttcccccttccttacctttctcagagttatgttgtgaggattcagtgaactaatgtgatatatcatgagaggtgaagagcatagaatttgaatcagatctgaattcaaatcttggccctgctacttatcaactgtgtgacactggggtattatttcatcttttaaaatacttttatttttaaattttaaaatgggaataatgatcctagttcatgcagtttttgtgaggataacgtaaaatgcatataaatttctctgggctagacctggtgttttccatacattactaagctattattaaaacactactccagttagtatctgtagtctgacttatgttcagcttctttgaagatatcttccaaactagatcatgagtttctggagtgttaggagccggatttgactctactgaattctgaagaaccattgaagtagtgctaagtgcattatgctcatgtctgttcaacttttggccagtagaataaatgctcggggttttttacctacttagctatcagtcactatccttccgatggccaataggagcaaaaggtttgggtaaattattaatgtaaagaaagctgaatcaaattcacaggttgtctaagtataatatcccagcaattgtattgtgtgactggaaacttataaatgattagtgacaaaaatgtggctcaattttgtataatatttatcaatttatctcatacataggctgtatctactgtattacttwaaaaaaaaagtatgtttgtgtgtggtctactacgatgtcatgtaatgcatgcccctgacgtgtactgaatgctccctaatgacttcatgatgactagttttaaggaagaaaataaaatttaaaaaaggaagtgagcataagcaaagagggaagaaaggaaagtgatcaggacgaggagatggcgaatacaaccagagactggcctggtcattgctttccyaaccttcatatatggatctcttagtatcattatacagtttttgtttaaaaatattatttttgtaaaagcatcatagccgttatttatttatttttgagatggagttttgctcttattgtccaggctggagtgcaatggtgcgatctcaggctcaccgcaacctccgcctcccgggttcaagcaattctcctgcctcagcctcccaagtagctgggattacaggcatgcagcaccacacctggctaattttgtatgttttttagtagagacggggcttctccatgttggtcaggctggtctcgaactcctracctcaggcaattaaactactaaaattaagtatttgggagcatgaaagtttaaaaagcatgtactgtaagcccaccaaaaacagataatcttggaaataaatttttccttagcattctttaaaataataaaatatactgcaaaattttcaagcatttccaaatcttactttgtcatgcaatacttgcttatgcagcagtgaccttgttgatgctgtgtacaatctgtcattttatgcattatccctacgagrtagatgttaaccacttcttgacaagaaaggcaggacacagaaagttgaatggtttgtcttggtttctcacaaaataagaaataatcagaatgagrtttttatggtgtgggctctcctacctgatttattattttgaactttttatgtggttctgtctatggagaaattgaaaagtaaacagatttagggactgattgctgtatatacattgttttcagaccataggagagacaagcttccagttccagttatttctgtttaacatttctctgcaaatccgcaaggcttgttttatccaggcttggccaagttaaatatgttccctgtatttttcccttatgtttggagatctagcaaaatattcctcattatactgtttattgaagtgaaaacttgtatgtgattgtatgaatgcctaatagtcttgaagtaaaggccgtcaaattcaacaatgcctggagagattgcatgtattcttttctactgcatatttatagcatttgtttggagtgccaaaatttttgttttagtcctatagataagaatttcttaacattttttaagatttttcaatttctcctaaacataatacataaggaacactttttagataaatgttgtgtaaagttagcaaaaaaaaaaacaaaaacaaagacattattttcttttaccgtgtcccctgatctcaaatcttttcatttctctgtttgttttttttttaatttaattttagagggctgctgaagtatcaarctaatttagataccaaccctcccggctgtatcagtcttaactgaaccagctctcagaatatttccttaccagagtatatctcagaacattttcatgaacctttccctgaaggattttcaaaactggaagagtttacccagaacacatttgtgaagatttgtatggaagagcccagattccaagctaattttccacaggtcagattaattttgtgtttgatctccacaaagtttgtttccatttgactgatcaacatcacatataaatgtgtttttcaagctatatattcatgcataataggatatttcaggatgtttcaacagtaagttagtacctattattccattacaggtacttgacagttgaatgcaaaagatctatggtattagaggatatataacatttctacttaactgaccatatgagctttgcatacaacagcactggtgcttgcagccaagagatgacaaatatttttcccatcatttgagaaaagctgatttaataataaaaatagtagtaaaaaaactaccaccaatatcacaaattattattttattgtattataatattatgtataatattgtaaatagtaaatagcaaaatcagttgattgaatgcttaatattatctgccaagcattgtgctaaaatgtcccgtatgcctaatacagaacacttattagacatacagaatgtttcttgcaatattcgcaatgactatttgaggtaattaatatcaccctcgattttctgataaagaaattgtacttaccttaatcaaagtctccaaaccagtaagtggcagaggaagcatgtaaacacaggtctttgactaatatgcttgctcctggtaaacgtccataagtattcagcaattagttcaataagggcccttatcttcctctgtgcctgtgagaactacccccatgcaaattacactgtttattcctcatctataaaaagtggaagtaggaaatagtgatgtcaaatgtctctattggaagagaagaaagagaagtcaaaagctagaatgaatttgtagatgactttggaatagtgtattagtsatgtgtttattattattaataataatcctctagatccctaytagyctctataattttcagaacttttctgagtttcacataatattcacaaatattagacagggcaggtatggygactcccrttttgctcatgtgggacctgacactcaaagagtaagtgattrtctcaaaggtgcaaggctgctacattgcagaccttgtcttgcaatgctactcataacacagtgtggggctaaatgttattatatgcagaagaggcatgatctgtctgcatgaaagaaagaagatttgaaacaactagagtgaggctttaaaaagtgaccattaagacaagttttagttggaggcctcaaagggatgtgaaagataaagtgtgtaattttargagaacagtaagccacataggcttctgcacgtcccaaagtttgcatgtgtcctgggatcagggctaaccatgcaacacatattcaaaattgtcaggtttccaaattataaatattattttatgttcttattatattatataaaagtaagtggtaaacaacatgcctagcatawtgcatttttaaacatatgtgctatacatatttaacatatatacacatatgtatgtatattatgcatatacattatgtacattaaaaatctagggttttcttatttaataaacattagactgttactttatttctaaaattatccccatatttatcggagattgttaacttccctgtattcttttattaaatatgttgtgtatatacattacatatctgtaggcatagaaaggtgtatgaaagaatatacacttgtttgttcatggatagttacacccagagcatragaatgagggcagggtcttgatattactttgtgttttattttatacttttgtttgtttgaatgayagtgagcatctattgttttttactcatttattatattttcttatttaaaatacaaattaaaatactattactgtaatgtatgcaatgagcaattgggcagggtgtagatttctacaatacgagtatttcttgaagtatattttcaaaaatttgtcttaracttggctttggatttctggacctttgtgcctgtactgtgctgaaagactttacaggtatatgcggagcaataagccagtcaccatcattttggtcayragtcatccctcagatgtcatggaaatccgratggtcaaagaaaattttaaagcaagacctggtcaggtgagtcagtggtcagcaactttttaaatagcctttatccttatgtaatttttggaatttarcaaacatagcatcgttgaaatagttgcaattcttaattggtcatttaaaacttatccgttttttgctttttagtatattactctacattgtcccagtatatctgcattagaaaatcatccatttaccctcacaatggtaagaaacatatctcgtgctttttcacatttgtagggtgctatgcatctttttctttttttgtgtcctatctcattctaaaaggtattcaaggctatcatagtattcttgatgtttaagtaagccatctttttacaaggaaaatagttatctgctcaagaactttgtaactactctttattattttttgacaccttacaattcaggaagtaatgtattaaaacatattaaagcttgttgattcaaaatacaggccaagcactgtgactcatgcctgtaatcccagcactttgggaggtcaaggtaggaagaccacttgaacccaggattttaagaccagcctgcgaaacataaggagaccccgtttctacagtaaataaataaataaaaaagccaggtgtggtggtacacacctgtagtcccagctactaggaaggctgaggcaggaggattgcttgagccccagtgtttgaggtttcattgagccttgatcccaccagtgctctccagcmtgggcaagagagtgagaccttgtctcaaaaaagaaattttatatatatatataatttcttgaatatttacttttctccttttatggagtattttaatgtatatggaaatctaatatatgcacaattttctttggagatggaatttaggggaaacacagatactctgggttgaggtggaagcattaaacaaaacaggcagtgtttagaaaaggtaaaatccagtgtaatgggagagagaatgggaagtaaaattagaaaaatcaaatggagtaaataatggcatgggagggcatctagctaaataatggacaccatcaaatatgattagmtagtcagcatatcatttaatattattataaaaatagcatgagttcattataaacatttagacaattcacagatataaaataaaatagaaacttaaaaaaaattttccccactttccaatccttttctmtactgtttgacatatatctttccagatattttcccataagcttctgcatacatgagtttctaayatttatttgctggatcatattgttttgtaactggctcctttcactcaactacatgtgatggacatctttccatattactgtatgtgcctcattcatgttaatgaccrtataatatttcacagtaggaaagtactgtaatttatttaatattctcactaatgttggatatttggactttattcattttctaagaaagataattgagarcagagaccacatgtttaaatgtatatttaagaaagatagcaaaactattttatatatatggtatgtatacatgcatacagatggaaacatgttgtaaagcatgttgtaaaacatgttcccatctgtctgcatctatacatcccatatacatgaaattggtaacatgaaaatagaagggaatgattgaaaagggagaaaatacacaagtaagtttgtctttacttaaataacttaagaagttttgcctaatcctgggttcataagaaatttacttcagattgccctggccagaacttccaacactatggtgaataggagcggtgagagagggcatcactgtcttgtgccagttttcaaagggaatgcttccagtttctgcccattcagtatgatattggctgtgggtttgttataaatagctcttattattttgagatacgttccatcaatacctagtttattgagaatttttagcatgaagggctgttgaattttgtcgaaggccttttctacatctattgagataatcaagtggtttttctctttggttctgtttatgtgatggattacatttgttgatttgcatatgttgaaccagccttgcatcccagggattaagccaacttgatcttggtggataagcttttagatgtgctgctggattcggtttgccagtagtttattgaggatttttgcatcagtgttcatcagggatattggtctaaaattctctttttttgttgtgtctctgccaggctttggtatcaggatggtgctggcctcataaaatgagttagggaggactccctctttttctattgattggaatagtttcagaaggaatagtaccatctcctctttgtacctctggtagaatttggctgtgaatctgtctgatcctagacttttttttggttggtaggctgttaattaccatctcaatttcagagcctgttattggtcttttcagggattcaacttcttcctggtttagtctcgggagggtgtatgtgttgaggaatttatccatttcttctagattttctagtttatttgtgtaggggtgtttatagtattctctgatggtagtttgtatttctgtgggatcagtggtcatatcccttttattatttttattacatctatttgattcttctctcttttcttctttattactgttgctagcagtctgtcaattttgttgatcttttcaaaaaaccagctcctgcattcattgattttttgaagtgtttttttgtgtctctctctgcttcagttcagctctgatcttagttatttcttgccttctgctagcttttgaattcgtttgctcttgcttctctagttctttttattgtgatattagggtgtcaattttagatctttcctgctttcttttgtgggcatttagtgctataaatttctctctacacactgctgtaaatgtgtcccagagattctggtatattgtgtctttgttctcattggtttcaaagaacatctttatttctgccttcattttgttatgtacccagtagtcattcaggatcaggttgttcagtttccatgtaattgtgcagttttgagtgagttttttaatcctgagttctaacttgattgcactgtggtctgagagacagtttgttgtgatttctcttcttatacattttctgaggagtgctttacttacagctatgtggtcaattttggaataagtgtgatgtggtgctgagaagaatgtatattctgttgatttggggtggagagttctgtagatatctattaggtccacttggggcagagctgagttcaagtccaggatatccttgttaaccttctgtctcattgatctgtctaatattgaaagtggggtgttaaagtctcccactattattgagtgggagtctaagtctctttgtaggtttccaaggacttgctttatgaatctgggtgctcctgtattgggtgcatatatatttaggataattagctcttcttgctgaattgatccctttaccattacgtaatagtcttctttgtcccttttcatctttgttggtttaaagtctgttttatcagagactaggattgcaacccctgcatttttttgttttccatttacttggtagatcttcctccatccttttattttgagcctatgtgtgtctctgcacatgagatcggtttcctgaatacagcacacagataggtcttgactctttatccaatttgccagtctgtgtctcttaattggggcacgtaaagggtattcaattaggaaaagaggaagtcaaattgtccctgtttgcagatgacatgattgtatatttagaaaaccccatcatctcagcccaaaatctccttaagctgataagcaacttcagcgaagtctcaggatacaaaatcgatgtgcaaaaatcacaagcactcctatacaccaataacagacaaacagagaggcaaagcatgagtgaactcccattcacaattgcttygaagagaataaaatacctaggaatccaacttacaaggaatctgaaggacctcttcaaggagaactacaaagcaccactcaacaaaatgaaagagtacacaaacaaatggaagaacatttcttgctcatggacaggaagaatcaatatcgtcaaaatagccatacttcccatggtaatttatagattcaatgccatccccgtcaagctacctatgactttcttcacagaattggaaaaaactactttaaagttcctatggaaccataaaagagcccgtattgccaagacaatcctaagccaaaagaacaaagctggaggcctcatgctagctgacttcaaactatactamaaggctacagtaaccaaaacagcatggtactgctaccaaaacagagatatagaccaatggaacagaacagagccctcagaaataacaccacacatctacaaccatctgatctttggcaaacgacaaaaacaagaaatgggggaaggattccctgtttaataaatggtgctgggaaaactggctagttgtatgtagaaagctgaaactggatcccttccttacaccttatacaacaattaattcaagatgtattgaagacttaaatgttagayctaaaaccataaaaaccctaraagaaaacctaggcaataccattcaggacataggcatgggcaaggacttcataactaaaacaccaaaaccaaaagcaaaaaaaaaaaagctaaaataggcaagtgggatctaatttaactaaagagcttctgcacagcaaaagaaactaccatcagagtgaacaggcaacctacagaatgggagaaaatttttgcaatctaccaatctggcaaagagctaatatccagaatctacaaagaacttaaacacatttacaagaaaaaagcaaacaaccccatcgtaaagtgggcaaaggatatgaacagacacttctcaaaagaagacatttatgcagccaacagacacatgaaaaaatgctcatcattactggccatcacagaaatgcaaatcaaaaccacaatgagatactatctcacaccagttagaatgatgatcattaaaaagtcaggaaacaacagatgctggagaggatgtggagaaataggaatgcttttacagtgttggtggaagtgtaaactagttcaaccattgtggaagacagtgtggcgattcctcagggatctggaactagaaacaccatttgacccagtgatcccattactaggtatatacccaaaggattacaaatcatgctactataaagacacatgcacacgtatgtttattgcagcactattcacactagcaaagacttggaaccaacccaaatgtccatcaatgatagagtggattaagaatatgtggcacatatacaccatggaatgctatgcagccataaaaacggatgagttcatgtcctttgtagggacatggatgaagctggaaaccatcattctgagcaaactatcacaaggacagagaagcaaacaccacatgttctcactcattgttgggaactgaacaatgagaacacttggacacagggtggggaacatcacaaaccagggcctgtcatggggtgggggctaggagagggatagcatttggagaaatacctaatgtaaatgacgagttaatgggtgcagcaaaccaacatggcaaatgtatacatatgtaacaaacctgcacgttgtgcacatgtaccctagaacttaaactataataataacaataaaaattacttcagaaattaaccttcccttgtgttggcaactttattttgaaaatcatttcttcaccatagcattaaatagaaaatatggaataagaaaagaaatcagttgctgaatgtcaagtacagagcagcaagagttttttgttgttgttttttaaactatttttcaacataaacaaaagtagagagaatagtataatgaatccttgtattcataaaaaatatagaggttagtttactttttagtatatactcaatcattgaaaactttttgctttcttaaaacagtgtatcaaagaatttttaacctatgttcacactgaagagaggcttctagatctaatttctttcagcaggcctaggcccttttcacaaggcaaaggggaaatacaaaagaagtagtgtgtagagctggaagggctttaaataagtcccttctacggcctggcctgcttcttaagatgtgattatggtaacaggtgtgatagccctgtggccagcttgaggcaaagatgggaagaaaagaaagaggagagaagggaatgtaggtacagacagaagaaaaggaactggaggtaggagacagttgagaaaggaaaactgaattatatgtgaaataaaatagtggtaactattcacacaaagggcaaggactttagaactcaattccagatccctcacttgttacgtctgtgtctgaatgtctctctcaaccttgctaaggctcagtttcatcatctgcaaaacagtgctagtgatacttacctggaagggcatctttgatattgtcaatattagtttataaaataatgtgtataaaacccttggtacatcattagtggtcaatacttggtaatacagatattattattactttcattatcttaaaatgcctggttttaacttggattattgctttcatttctgaaattatgctttttttgagaagcaagtacaagacatgagcatgtggcttttcaacttgaaaatgagaaactgggaatatgagagtagtctcagttactgaaaatctgtcatgggggtgaaagagttgatttttttttcctttgggatcccaataggcagaaagttttaggaaaatacatttttatttaacccaataaagacatttctaacaatgagaccagtctagaaattacaaagagctatctcacagaagtgtttgcaaggattatcgcaatagatcaggatttttcaatcacgrcagcattgacatattagatcaggtaattcttcgataggatgtgttgttctgtgtattataggatgttttgcagcatctttagccttgacccactagaaggcaatagtatcccccactgtgactgtcaaaagtgtctccaaatgtagccagatgccttttgaggggcaaaatcacctacagttgacaaccaccacattagatcgttggttgtccaacatagcttccagtgctaaagggcttcagcactttagaggccactgtgagaaaggagaatttaagcacaatagrgaatttgagggatgggagtgcttatcttgtgttctggggacaccaatcatgtcagtgagaacagctcacttccaaatagtctctgttatgaggattctgctaaagtattcataaacatcatcatctaaaaacatattttgcttactcaacttgaatcctttttggaattccatgaaaattattttggttaccatgagctcctgaatactttcatgtgatgtagacctttgaaagagaatttgattacttttaaaattcagaattcttttttttcatattcactgtcatcaatgcccaaataacagtttggatatgaatcaaaaggaaaagtgggatagcagtataaagctctaacaagttcatcaataattaaaatgacatgaggatagcctcatgtacttgatatttttgtcatataaatgaaaggtttgttctttccccctgtggaatctcaaagtgtggaaataagaacagtacattgttcttggagaacaaatattggtttagtgaccactttgggaaataatgtgtttgggttggtggaaaaagacaagattttcctcacctcagggaacctccattagttacatgaggttctggagcctccctatgggttgcctcctacagcaaaggacatctcaccctgggccttcactcttgaggtggcccagggagccctcagtacgaaggctgtgagtgcattgcaggcttgtttcagaagattcaggttcagaagtgcaagagatgaagataaagaggttggatgtatacagtctccatcatagtttttcttttcttactttttcatttaagaaaaaaaagtcttatttcttctggttctataagaatattttaccaaaatgacagagaggagaaaaaaggataattgtagtaaagcaggttattggagaccacttcttccattcttttaaagaaagattgttctctggaaatcatcccagatcgggagagggggcacaggaggaaggaaggaaggaaggaaggaaggaaggaaggagaaggggaaggggaaggggaaggggaagggaaaaggaaaaaggaaggagagagtgaaataaaatacatttttcaatggcctagtttggaaaatgctgattaatatatattttaaagtgcatagtgcctactagtgtattaatggttttgaggagttctttaatatataatctcattaatttttttgctttctttctttcttttttttttttttgagacaaggtctgcctctgtcacccaggctggacagcagtggtgtgatcatggctcactccaacttggacacccgggcttagcctcctgagtagttgggactacaggcacatgccaccatgcctggctaaactttttaaaaaattgtgtagagatagggcctcgctatgttgcccaggctaatctcaacctcctagcctcaagcaatactcctgcctcagcctcccaaagtgctgggattacaggcatgaaccaccccatgctgccaatcccactaaattttgttcactcatttagttaatgctttctcattttcccacttttgggtctcaccctgggaaccaacctcattttcttccatgtattcacaccttaaactccacccattctctttgtctgggaactcttactcatccttcacatctcatcttcatatcacttctgctgaggagccttcactaacccttccctattagattaagtttcctgacctttccttttatgagcatccatcccatgtacactcttcaacaccagtcattaaattatttgtttaattaatatctgttctcctcatagaccataagctccatgagccctttgaaagatgaattcatagcacagtatgtggtgcataatcaatgcatatctgttgaaagagtaaaaaccacctaatatatagagttcaggacctagcttgagaaatgstttgtagacagagcctccccccatctctttatagcacagtcttccttagagggtgcaactacagaaaaggaaatgttggagggataaagaagaaaggagaaatatttatttccaaagtggctctcatttggagtagactgagtcagaatagagtatttaattaaagtctaatatttgagrtcatggtgcttatttctctctaacaaaagaggaggggaaatgtacctatggcaaaggtctttagaaagaaccaccaaagacaaatagacgcaatttgtrgattatatctggtctaygatgaagtcatttttcactcacctcccttaytctcagtgcaaataataacagaaaattacttgttcctaattctgtgcttatctgacaaatgcgtcaatatttcttagattcacctagcaccttgtaggctggaatagaacttgactctgtgaggtcaggttttgcattcacattcattcatgttttaaacatcagtttctgtatgttttacttatgctttattagatctcaattataaatactaactgttttcttaaaaccactctatctcatagatattttaaattgttacaatagttggctttaaataaaattttaaggcaaagaaattatttttatcagaccatctgtttatcaygtaggcttaagaaatggtttatagctttcccagatttggggggttacaagctcgctcatttgtactatcccccaagggagtttttgttttcataagtggaaaataggcaaacttgctgctacctagaaatgaatttgagtagggcaaatatttctaagctagattttacattatgctattatgctaatttacagtctcttcctgccatttccttctcgstccaattacttctgtttggcacttagaaatgtaaaatgcgtgctttcaaacattttcactgcatagttgtcttaagagttcccttgaagtaaaacaaagcaatttcccatatggtgattcccactaaacagtgagtatcacatctttgtcaaagataatagtacctactaattaagtgcctaagaggttctttcatagcttttgcaaatattatattatttaattcttattatattcctatgagacgtgtattgttaactcggtgacgcagaaaagaatgtggctcagagagactaaatagcatgcccttaaaatcacacatttagttgaggtagaggtgagatacaaacacagacctgtctggctgaaggcatgttattaactgttctgcactgtctctctcctgccacactatccrtccatgctgagggctttcatattgctaacactgctcttacttttggacatctatgtagctggagtcagaaaacaaaaataagtctaaaattaccatttagaactgaggtttattgaaaacacaaatatgtgttttctatagtaatgtgaaagctttggattgtccatactactaagctcttctaatagtgtgaagtggtgaaatttgaataaatccccctgtttttaaaaaatctaatacttattttcatatactgtgccagttagaaacaatcaaatcaataatatatacagctattacaaattcagtagtttgagttttagctcactttttaagatggagattaagcttttcacactgaaagtgtaacttcaaagtacaaaagacatggcacagaaatactattttggtcaaggtaaagctaagctttaagcactaatttattaggagggcaaaggttggagttttgattatttaaaatgcttcactatttttcatacatgtcattgacttccctacacaagaaggatatcctgatttgatgggttttccaaggaaattgtgattgtttcttgctgtggtacacctatattttctcatggtaaaacctcacacaygtttgctgacaagattgatggaaattataggaccttgtgtagtagcagatcgtggattttggactactacagcttgggatggagacctgtatgctctactttctagtattatgactgtggacatgaaaattaacataatcttttgtttacttctttataaaagtgcagttaattggaatatagtaaactctccataagtggatttagttatggttgtttcagatagtgactaagggaccaaagacatggattaaattaagattttttgcctcgttcttcagtatgtagtaactgactaaggtttggccacagattggtttagaaacagtcatttggggggaactgatgacttatttgccttttatggtcttctagccttaaggatgaatgacgttttaggttaggtttccttgaaaacaggctggcaggcatattgcatgcagcagatttgttgggaagtatgcttgggacaacaatcaataacgattgactaaagaggcaaggcagaactggaactatatgatacaggtccatagaggtctcagaagatctgacaggagctctgcagatgaaatgatagcttacagcggtactgtcttgaagtcagggggccaaatctttgtaacccccaattgaccagtcattggatttgagatacctccagggtgaggcacttagacataggcaaggaagctttgttctgtggatagctattcctggggcaggtctcagtggtgagccctcccaggcaacattttcagaagctggaagaatggtgaatgagtgtgttgatcctggaagttgggcagaggttgggaagggaaagggtctgagcagtgcagcacagtgtctattaagtagcttttaaaaacatagatcttttatgagataattctccatttttaaaactagaaattaaatttgggatacatataaattctagtttatctatactaattgaactttaaaaatctgttgtccaaactacaaatttatttacatttgagaagtctaaagcatagactgttgaagtgaccaaagtaaccaaaataatacaatcaatagctggaacacatttgttgactcttctcctgctttacacctttattgatttaaaacctgtgtagaatgtaacgttttgttcttcaagtatgtaatggatgtctgcaagtattttccagctgtgctctgtgattaccaaatttaagactttctaccaaatcaaatcctttattaaggtatgctctcacctaatttacctgtataaattaaagatgattggaaaaagccctaacgtaagagagcaagaaacctagtgcttgctacaaaatgtagcctctcttcgtatctagctgaggtagacattattttcatactaatttcatggattctcagttatgaaagtaatgcagaatctgccttttaaatagaagtaatgaatcgatgtttacatgaatacctctttattcttctgttattatttgtattcaggaacaaactgtcacatgcgtccctgtgaagagaccaccaaacaggctttgtgtgagcaataaagctttttaatcacctaggtacagacaggctgagtctaaaaagagagtcagtgaargsagacagggttggggccgttttataggatttgggtaggtaatggaaaattacagtcaaaggtggttgttctctggtggacaggggtgggggtcacaaggtgctcagtgggggagcttctgagccaggagaaggaatttcacaaggtaatgtcatcagttaaagcaggaaccggccattttcacttattttgtgaatcttcagttacttcaggccatctggatgtatacatgcagtcttgggatcagaggcctgacattcctgtcttcttatattaataagaaaaataaaatgaaatagtggtaaagtgttggggtggcgaaaatttttgggggtggtatggagagataatgggcgatgtttctcagggctgcttcaagcaggattaggggcggcatgggaatctagagtgggagagattaagctgaaggaagattttgtggtaaggggtgatattgtgggattgttagaaaaaacatttgtcatataaaatgattgctgatggcctggatatggttttgtattaattgagaaactaaacggacgacacaaggtccgaataagagaaggagaaaaacaagtattaaaggactaagaattgggaggacccaggacatccaattagagggtgcccaagtgggttcagcataattacttgcttggttggagagttttttgggctctatccttgagtttttttatgttgtcatacagcaggccagattgatttaggtaaaaacaacactcttcatttaaaaatagagtcctctttttttagcagtgagtaagtcgaggcctccacgattttggaggaaagagaaatacaaagccagcaattgtttgttaaagaaggattagaaatggctaggagagagtgagtgagattgatagtgtggtggagatagttggggagaggtagagtgtggcataagaatgggaacaagaataagagtgcatataaaagtaaagaataggacgttatcagggtgaaagtattggagggtaccctgtcagcaaagatcatctatccactttaaaagagaattaagggtggtggtttgaggtaaaaccaggagatatcagttatgatggtttgaaggaaaagtgtaaactgccagtgtaaacaagggcaggatatttacgagtagttgagaatgatgaataggagtgtgactagagagaagatagtagggatgacaagtatttggggtgcggttcaagttgggctggtgtctagaatgagactggggcctaataaaaaggagcatccatacaggagctcaaatgggctataccctgtagcatcctgaggacaggccagaattctgagaagggcaagtggtaaaagtattgtccattcctttttaagttggaggctgaacttgatgatttgtgtttttaaaagaccattagtccattttacctttcctgaagattgaggacagtaaggggtatgaaggttccactgaataccaagagtctgagaaactgcttgggcgatttgactaataaaggccggtccgttattggactatatagaggtgggaaggccaaatcaaggaattatgtctgacagaagggaagaaattatggcggttaccttctcagaccctgtgggaaaggcctctacccatccagtgaaagtgtctatccagaccaagaggtattttagtttcctgactcgggtcatgtgagtaaagtcaatttgccagtcctggtcagtggcaaattgtcaagcttgacttgtagggaagggagggggcctgaacaatccctgaggagtagtagaatagcagatggaacactaagaattgatttccgtgaggatagatttccatgatggaaaggaaatgagaggttttaagaggcgggctaccagcttrtaacctacatggaagaggttatgaaatgacgacagaatagattgggcctatgacgctggaaggagatccttggtccaagaaccatttgccttgtttgggaagagattgatagttggaagtttcagtgggggagtaggtgggagtgactgatgagaaggagaaaaacttccatggggaacagaagttggaatgctagctgcttttttagctaccttaacagcataagcattaccctgagcaatgggatctgatgccttttgatggcccttgcagtgaatgactccagcttcctttggaagtaaagcggccttgagaagtgtttttattaaagaggcattaatgatggaggacccttgcatagtgaggaaacttatttctgcccatataacagcwtggtggtgcaggatatggaaggcataccctttagagtcagtataaatattgacgcatagtcgctttgcaagagtgagggctccagttaaggtaatgagtttggcttgctgagaggtagtggagggggcagagtggtagcctcaaggatagatgtggaagatactatagcatagcctgcctttgctaatgagtgacaattaggcctggtggaactgccatcaataaaccaagtgtgatcagggtgaggaacaggaaagaagaaaatatggggaaatggagtgaatgtcaggtggatcagagagatacagtcatgggggtcaggtgtggtatctgaaataatgtgggggccagcctaaaacagtaaggtcaagctgtttggacagaaaggctacagggtgcggtcccagctcttgtgtaagaattgtgactgcacagccctgtactttggctgtgtgtaacgaaaaatggttgggatgagttagggagagctagtgtgggagcagctttagggctgttttttaaggaatggaaaggggagtggggaaaggatttaggatctatggggtcacctagatttgctttggtgagtttatataatggtttagtcaggatggtaaaagtaggtatccaaaggcggaagtagctaaccatgcctaggaaggaaaggagttgttgtttcgtagaaggggttggggtttgggagattagctagacatgatcagctgggagagcatgtgtgttttcatgaagaattatgctgagataggtaatggatgaggaggaaatttgggcttgackgaagtaatgggggctgtccgtgaagccttgtggcagtacagcccaggtaatttgctgagcctgatgggtgtcagggtcagtccaagtgaaaacaaagagaggctgggatgaagggtgcaaaggaatagtaaagaaagcatgtttgagatccagaacagaataatgggttgtagaggggttgtggagggaggtattgcggataggagagtatatggatttggcaccatggggtggataggcaaaacaatttggctgataaggcacagatcctgagctaacttgtaagacttgtctggtttttggacaggtaaaatggggaattgtaaggagagtttataggttttaaaaggccatgctgtaacaggcgagtgattacaggccttaatccttttaaagcctgctgtgagacgggatattggtgttgagcgggttaaaggtgattaggttttaatgggatggtaaggggtgcatgatcagtcatcaaggagggagtagaggtatcctatacttgtggattaagttggggagatacaagggaaggatgtaaaggaggctttgaactggagaagagggtggcaatgaggtgtggctatagcctaggaatagtcagggaagcagacaatttagttaaaatgtctcatcctaataagggagctgggcaggtggggataacttaaaaggagtgcataaaagaatgttgtccaagttggcatcagagttggggagttttaagaggtttagaagcctggccgtcaatacacacaacagttatggaggcaagggaaacatgcccttgaaaagaaggtaatgtggagtgggtagactccgtattgatgaagaaggggatggatttactttccactctaagagttacccaaagtgtctgtgatggtccagaaggcttcagaggcgatcgggcagcatcagtcttcagccactaagccgagaagacctgggaaggagtcagtcagagagccttgggccagagttccaggagctctgggtgtagctgccaggtgagttggacagttcaatttccaatggggtcctgcacagatgggacatggcttaggaggaatcctgggctgcaggcattccttggcccagtggccaaatttccggcacttgaagcaagatcctgagggaggaggtccttaaggaatgccagaccactgtggcttaggcgttttgaagttcttgtgtgctgcagatgtggctggggtttctcttacagcaaaggcaagtaattgcaactcctctgttattgtacatcttgaaggcgaggttgattaattcctattgtggggtttgagggcccaattctaatttttgaagcttttttttaagtcaggagctgactgggtgataaaatgcatattgagaataagatggccttcaggcccctctgggactagggcagtaaagggtctaagcattgtggccaaatgggccatgaactgggctgggtttttatatttgatgaaaaagagcctaaacgctaactgatttgggagaggttggataaagaaaaaggagcattaaccttgactatgcctttagctacagtcacctctttaagaggaaattattgggcaggtgggggagggctagtcacggaacgaaactgtaagctggactgggtgtgaggaggggaaatgatagaagaattatagggtgggggagtggagtctgaggaagaattggagcctgattcagcctggcagggagtgacctgaggaggagcagtcttgggaggaggggagaggtcagatgggtcagtagaaaaggaagagtgaaaagactcagcgacgcttggggttgggactgaggggacaggtgggagggaaggaaggatttgggacgagtcacattgggaacagagactagggagggaccaatgtgtaaaagaatgcctggatgtcaggcacctcagaccatttgcccattttacgacaagaattatctagatcttgtacaatggagaaattgaaagtgttttctggctatttggagctattgtcgagtttgtattggggtcaagtggcattgcagaagaaaataaggcatttaggttttaggtcagttgtgagttgaagaggctttaagttcttggaacacaggccaagggagaagaaggaggaatgatgggtggaaggttgcctatagtgaagaaggcaagcccagagaaaagaaagggtagggacacggagagaaggggtgggggtacatgccccccccccaggaaagtggtacttgccactaaggtgaaggatcaaggcaggcatccctgtggtgatcagacacctctgaaacgtgggtgaataatcaggcaggtgtccccacagtgattaaacaccaaaggaaaactgtcttcccgagtccatgactggtgccagagttttgggttcacagataaaatgcatctcttctgtctctaccagaaaaggaaaggaactgaaattaagcgaagggagagattcaagggtggcaccaagattgaaaggagaaagaggttgagggatagtgagagaggctggagaacagtaaaaagagcctgcttacccgatttaaaattggtgatgttccttgggcttgttggtctgaggaccagaggttgtagatgaatctttctcatggagcaaagagcaggaggacaggggattgatctcccaagggaggtcccccgatccgaatcacagcaccaagtttcactcacgtcagcgtgaagagaccaccaaacaggctttgcttaagctaagcaataaagctttttaatcacctgggtgcagatgggctgagtctgaaaagagagtcaaggaagggagataggtttgggtccattttataggatttgggtaggtaatggaaaattacagtcaaagggggttgttctctggcaggcagggatgggggtcacaaggtgctcagtgggggagcttttgagccaggagaaggaatttcacaaggtaatgtcatcaaaggcaggaactggctatttgctcttcttttgtgactcttcagttacttcaggccatctggatgtatacgtgcaagcttgggctcagaggcctgacattaacgtgcaggcttgggctcagaggcctgacacaaacatgttttcctgacatctgtattctaagttgtgtgattcattgtttttcagcttgaataacctgatttcacatatttttccgtaagtcagaggcatgtctagctgttagttattgtctgtacttttacatagcatgcctgcactagccatcatttttctactttgtgtttttaatcttttaaccagtcactatgggaagagtttttccaggaatagtttttccagttttcaatgaaaaccaggcaagaatggctatggatctcacaaagactggcaacattttattgctattgtttatttaatttagtgggtttaaatgaaaccaggacgtctgcagcagttttgatctctggtcttgctctcaactatttaagtcttaaaaattgttttgctttatgttttcgtaattttattgcttgtcaaaaatcagctgggatacatgataggttagcatggtgacaatgttatcttaaccatagatgaagcaaagtggtgaaaatttcctgagaagatgattaatgttcatgaaaagttaataggacatctgagtttcttgagatrtaaacatcatctaactgctctagtttggcttctttccaagggaaacaaaaatattcccttagtgtctaatgaaagtctgcatgataagtatgaactttagacggttagtgtatttagagtaaatctattgaatactgagcttaatttattcaatccttatttttgggtacctctttttacctaagtaccaaaaggaaatgatcaatgaaagtttctttcctgactcacatcccttctagctactgctccctctctcagcaatccagttcctttcctctcattctcttaaatcaaccatcttttgcccacagcacactactaaaaatgtccaggttcagcagtgaccatgttattgttcacttctcactcttcattkggtttgaccartgagcagctcttaatacagctgatcattcactttactgaaacatttttttccacttatctgtttttctccacattttctggctatttttactcagtctatttttgttgttccttatcatccccacaagctctaartattacaacataccagtgttcatttcttcaacctctcttcctctctagctgtacacatttctctggtagtctctctcatcttattgatgcatccatatgcttcatgtcccaagtttatattcctagcccagattttaactctgtaattcaggctcatatatccagaacatttaggcctttggcttttactttgattgataaaggagttgtgggagagtgtgaatggagaaatgacatgatatggcttacttttcaacaggatcactctggctgctgtgttaagagtagatgaggggaagcaagtgcagaaacagggggtccagttaggagctgttgcagtcatccagttgaggtatgatgatgattttgaccagggtggtgatagtggaagtggtgagaagtggtcatattctgaatatattttaaagttagagttaacaaaatgtattccatggattgtatatgtaatgtgaaaggaagtgaagtcaaggctgaccccagagtttttgatccragcaactggaatttcattaactgagatagggaaggwtggggttkgagaggaggttctgatggaaatttgtgcaactccacttaggaagtgttattttgagatgrcacttagagtgctttcatkaaatatttattgagcaaatgactggcatctcagccctgccttccacgaccagttatttctatacatagagcctttgtgtttcacctgtccttgtctttgggtttgtggagtagtagttacatggctggtgatcagagcaaagtgaatctggggataaaattagcccatatacagacacaaacaaattttttttttttaatgatgagcccgaactctaacttcctcctattacactgagacctgggtttttccagtgttgtgatcaaaagatgggcttacttctcaaggtaatctctgtttgaaggcaatgagactttggcttcatatgttttgtttagttcgttcctaaacggctacctcatccacttgtcacttttcaaaaatgtgttgacatctctttattgttcttatcactccacatgttatttttgccgttgtggcatctatttttatatctctaaattgttattttagtattctgtttgcctaagggacctgagataaatgcacatgttcaatccaagttaataaaaattccacttgcatattcttccagaatctttctttttaatattgaatatatttttcattcaaatatacaattaaacacttttttctttcatataaatgcaaaggtattaaagttttaatttgtcaaaatgtttactgtcatggtgttgccttaattgtggaagattcggtgctccgcgttatctcctctcagacatttagaacaatcttcacttgtgaaattgcatgagctcctagcataatagtctctggagtattttggacactaaataaatatttcttgagtgaataaataaattctcgaagagctgcccacctttgacgtttttattcattctcaggttaatcctcctattttttcttccaatatttactattcaattgatattataggattcattcaactgataccttctatgtgtaaggtgctgtggaatatataataatgatttagaaatagttcttgatctcaagacatttacagtttattaatacagaaaaatcatgtaaaaataaagagctagactgtaataaggagcataagagtcatactaataatttaagggttcaggggagtgagaattttcttggcaagaaaaatcaggatatctttatgaaatgatggctttaagataagccttgaacagttacagggattcaacctaagaaatggaaaaaaagtcactctaaatgagtaggctagcatgtgtgaagataaagggatgagaaaatgtattagttggtaagtattcgtttagctcgattagagtaaaaaaaggagaaacatggaatataaagccagaaagaatttgaaacagatgtgcttggccataggcaataggacagaaagaatatgggtgttttttcacagggggacacaaaaggttaatcaataggagattgctgtaatcagacattttctttgggaagcctgttggaaagaaatgaaaggtgattgaatgctggcaggacaaataagtggtatcagagagatttgagtctctgagaaggatgtaggttctatttccagatatatgggaattaggagaagatagttttggaagtattaataggataatagtaattttagatacagtaaatttagagtgaatttcaggtataaatgtctaacacacagtagaaaatatgaaactaagaacttgggaagaaagtgttaaaataaagacttaacaaaaatgattaaagaacatcatattatgtgatcactttctcaggtttaacacttttagttattgaaaagttgctattttggaatcatttttaatttttattaaaaggcacttctttacaaacaaaaaaatkcagcttgtaattttttatattgaataaattcatatttattcaaaaataatgtgcagttacatcatttttacatttaattcccaaacatatgacaagttacaaatatctttttacattttgtgggactgttataaaattattagtcatttgtgcacattaaaaacccaatgccatattgaagaaataattggaaggtaaaggttatattttctccaggatattaaaatacatatttctctagatctgttgttatggtcaaattgtcactttttatttttcttatccttagaattaagtgaatgwgtattccagaatttatattaaggtcgacatgatccaaactttatttttatgtcaaagaaactggatagattcagcaacattttaatgttcacaggtaaattaaaatttcaaaatacttaaaattatatcatagcaaatgcttgtgataaattttaaagcatagaagtgtaggaaatgattataagagttcttgttttctctgtcctcaattatacttcccaagttagtgttcctgaaatttgattttataatctctttaatgagaaaaaaagcacaaatatctgtcattttattttttatgtgcatatttatttatttattttgaaacagaatctcattctgtcgcccagactggacagcagtggtgcgttctcagctcactgcaacctctgccgcctgagttcaagcgattctcctgcttcagcctcccaagtagctgggattacacgcacctaccaccatgcccagctaatttttgtatttttttttaaattttttgagatggagtctcgctctgtcccccaggctggagtgcagtggcgtgatctcagctcactgcaacctccacctcctgggttcatgccattctcctgcctcagcctcctgagtatctgggaccccaggcacctgccaccacacctggctaattttttgtatttttagtagaggcagggtttcaccatcttgaacaggctggtcttgaactcatgaccttgtgatctacctgccccggcctcccaaaatgctaggattacaggcgtgagccaccgcacccagccatgtttttattttaatattaatatgtgcttaactacacatattatactgtaactctttcaactgaaaaattgccataagcatatcttttaattcatgttttaggaggaacgatagagctatagatatcaatacttgtattatttcttccctttgagatgttttctaaaagaaaaagacagtgagaaaacaatgaatcaccacaatgtgatctagacaatattaatgaatctggatactttttatgcaaagatactaaaatgtgattctaagatcttcattcacgttttcaaaccacatatactgaattaattctttatgttattctgtgaagcctccttgaaaatatgaggttacatgcttaaagactgttaaagtctgtcttagtttggagaaatatcagtgacttctaaagacctcatttccaagaggttgagagaaacaatattttgttttatccattcaaaaccagactagcattcgaagatatattgataccttggactgatacttagaagagagaagtttacagtttcctatgagacccaatgagatattaaacactgtgtgtaattaccttttacagtatctgctttgaaagaattcaatagagatatgaatatttggcaaaatatgcattttattttagaatgcattatgagattaactcaagccacatgtaccctcaggcacacaaggacaaacattctttgccttccattctgatatcttcttggctataggtcatcttttcataacctgagatctagttcacagtgaaggacatccagtgatatgtggacaatcagattggtagctcagatctctgttgggtatcttgcattctgagagctacaacttttattatacagagactctggtcagccttctgtagtatatagttaaatcgtgggtggtttttgcagataatattttatttggagatttactgatgacaaaactgttttttgctttcagagttattaaaaatcacagtatgggctgggtgtggtagctcatgcctgcaatctcagcagtttgggagggtgaggtggatggatcatatgaggccaagagtttgagaccagcctgggcaacaytgtgaaacccaaactctactaaaaacacaagaaaaatagctgggcatggtggcacacgcctgtaatcccagctgcttgggaagctgaagcaggagaatcgcttgatcccgggaggcagaggttgcagtgagccaagatcgcgccactgcactccggcctgggtgacagagtgagactcaactctcaacaacaacaacaacaacaacaacaaaagttacaatgtaaataaaacaattaagtacagaatcacacttataaataaaataaaataattttartaatacaaatgtttaaacaatgttatttaaaaatatttcatttttaatattttatactactgttagcagtaataatcctataagaaacactgattgtaaagtagtagcttggacattccatggtacattaattccaaaccttggacatagattatgtgcttttagtttgttcatagtttattatgaatcagtgacaaatacctacctttatatttagtgtttccactgatttttcaggctacctttcctttttgcctaatgagttgttaacataagatatggtacctttatcttcatttatttctstccttatagcattcctacaagacctacattaactagtcaacacagtgagctctgaagtcttggacttgctttatgtaaaccaatcactaatcacagggcccttccactgccgttttctttcacctgtgccataacttcaggccccscctccatttcattttaattaatattgtggcataccaattctactaatgatcaacacatgccttttttcctcctatttcatttgatttcttatgcaactctcacccattttatgtatctttgttttaatagagacagtgacctgcaataattaagaattaagagacctggattcaaattttgtcttgtctttttattgggcaagtcaatattttaagccttaattactcaattttcttatctgtaaaagacaactctgtaaagttattgtagattttgaaaataaatcacttaacacttcccgtgacacatggtacttgataaaagctgggtagtcacaggcagatggtcccttacccatagcccttagtttagatgcatttttagaattcagaattcatggactttaaaaggtatgcatatttcatatcgtacttaatatatccaacaggatgttagtcagcatctcaaacaagttgataattctgtaggacaatgcttatgtgtgaatttttacacagaaatattagcctcccattaattcaagtcaggtattgttaccaaatgagttatgaaaaaaccattattcaaattttggaattgaggataagtgactaggaatccagaaaacaagaagaaatttttcatttttcttattggaaactaaactttattctttcattttgactacctggatgttttctaggtttcctaaatatgggaccataagcacttttttttacctacacttccacaactcatccctttccccaggtaccctcaccactccagatgtcttctgagaattaagggagggaatgaaatagagttatttctgtaggagcataattgttgggcatggaaaattaatgtcacattaagaatttttttctccctggaatttgttagggtaagtatatattatctagggagaaaatgacacaaaaaagcattagtttttgtttcttcctttgtgattaaaaactggcttttcttatatatattttaacttataagaagttttagcaagacttgtagttaaatgaaatacactagcaattttaacgtgtgtaatttattgttttatataagtatttttgggttttagagaaatgtagattgtcttattgacctgttgacattgattttttttcttccactaataaggatctatatagattttagtctgttccttcctgttatctattgatatgggggacttgctatcagggtaaaagttataattgaattatactttcatattatgtaattattaatcacaattgattctagtattttttttagtgtccaactgaaaccaaagcaacatttggggttcatcttaaaatagtagaagactggacaggtatgtagaacatacagttttaagatacattctttgaaaatagtggaatgtaataatttgaatgtgttttaatataactaccagyatgtatagagatgtgtatgtgtttcaagctgttctggtttttttttttttgcttgtacagttttgacatctatgttttctcttttaagttgcatttttgcaatcagaatacctttgatatcagtaattattaataatatattgttcagtgtgcttgcaaatcataggtttctacctacttgtcaggtgtgctggcaatagtgggaatgctgaaatgtgtttcttagaaaacatgagtcaaaataatcaacacctgatattgagatcacacaaatcttccagttcttgcatgacattttttgtggtgttccagtatatagagcaacttcacagtaactttggaatagatacttttaacagcaggcctgttggtaaatactttttattacctgagagatgcattgtagtaagagctttgagtaaataaaagaaacattattcaytcttatattaatatttccttgacccgccagaataactgacaagtgagtactcagtaaatgttggcttgttagttggttggttatgttgttaggaaagaatgcagatataaacatgaatgcaaaagtaaatttaaatattcttatacttaggtgctaaacaacgagttggtaagtaaaatctgtagggaaccagaaaaatgtagattaaatgtggtctagggctgtaagagaagctcyacagaaaagacagaatttgaactgaagcttagaagtcaggcaaatgaagaaagatggaggtaatttaagtgaaagtcacagtgttgccaaaaatctggaaaggcaatgattaactctctttggaaaggatgaatccaatcagtctttaatcaattaaataaaagcaaagtcaatccaacaaaatgaaacaaaagacaaagtcaatcaaacaaaagcaaagattttgttctgggtagtagcatagaaaagccatttagggccagcttggtgaagattatgaatgcctcagcaaaatattagagtaaccaagggaatttagggaatttttgaagcatttgaagaactatgatgaaaatggtattaattaagttgctagttggacagattaaaatcaaaggaagacttgaaggtacttaaaggcagaggggaaggaggcagaggaggggtgrgggtggaaattggaagtaatggatttgtgaacacaagttaagaaggtagcattagaaggaagaatctaatttctgtaaaaaccagggaaggataagatgttggataataagaaagatgtgttttgaaatgaggagaacaatagtttatataaggaggttatttcatagagttaaaaaaaataataatggtatgtataaaatgtaatgtctttagaaagggtagccagcttggaattggagacttaaataaaaggaaggaaatctgcaacataggatttaatgggcaaacatctaagtgaattaaaaagatctttgagcagtaataactcattcagagtcatgaaaaaccaggcttacatggataattttcagatggtagcattgaaaagagatcatggtcgtcttctgatagatatacactggtggagtatgaacatatgaataatcacaatatgcccaatataagttgatactgtcacagtgttgtttttttttttttctactgttttggaaataaagaataaggaaagttcttttctggtgagaatcccaatatagtaggaattaaattcagtcatgaatggtaaattgatagaattctatatctgaaagaaaacatacaatgaaaacataatttaattcataagattaagcagaaactcctgatggtttattattagctattgttaccgagttttttcacaaagttattttctattaccagtagctcattaaaataaatgatgtcttactattttaatcatctctattaggaacacttaatagtgttaattttattctccctttttaatgtactatgccactgagagaaacaagatcattctattcagagagytcagttccagtcagatgcgttccaattaatagaccttctttgttgttgacttgaaatatttgttgacttggaaaaaaatataagcagtcatgcggagaacacctaaatagtcatgtcattatctgacactttagttcaaagagatttagctgccttacaacaatgagattacaactattgaaggaaaagtaggagcattaccttcgaaatcaagaatcattggtttttattctaaaagaattgattaaaactcggtattaagagcagtaggtataggaaataccaaagagatacctaagaggttgaatatcaaaggtttatttttttaaactgacttagagatatttaatatgactttttacttgctgaaatatgttctgcattggcagcatacagggactaaagagcaggtttaaaatagctccataaatgatctctccaagactaatcaactatacctagctatagagtgctggaggagcaagggaagaagctatgcaacacaagacaaagaagtaccaagtctcatatttgttgtctagattttcattttcacctgacctctaattgcatctcctaaatacgtggaagacctgttaaagtttagaagacccttaaaacattttagacatgattcagcgttttttcttgaaatgatggtagtacagtagatggagtggattacccaagtagatttctcttttaatcgaatgaataccttattgctcttctagaagcagtcattctttccagtttcaaatgtatggtcagagattattgacttgattatcattttaagtgtacaaaaatgttttgttaatttcttcgttacatatgattagtattgattaatgtctgagataatgctatacccttgcttattttggtggtctaaatagccacttattccacaggtgtttgtgttgtgctacaacagaattaaatacataacatccacatgtaattaatgtaaactttctgccattgatcccttcagcagttaatgaattagcaataattgtgagtaaatattcaataaaggacttgtagcatgtatcacatgatgtttctatgaatcttgggtataaattcccctgttgtctactggaaaagttttctacagtgagaagatatggttatcttttaggattaaaaatgagaagacagggccatatattattgtggatttgcctcagtcacataatatattgacttctcacagtgcaagtaatcttaaatatagggttagttaaggactrggccacaaaagagtcgataactctcttatttgtttctatatcactgtaggagccagtcgtgttataggctttattcagatttttcatgaaaagatttaaacagaacatgtgytacktgtttaaagtatttttcttttcatttttggaaactcctttaaagtcagattataaccacactaatttatattaatgttattactttattatgacaacatattttaggccaattacatcaaccaccttgcactagatatcactgtgaatggcttttggttgctgcaagaagccaataaataaataaataaataaataaataaatcatatttggatatatggaatctcacagattttacataattcatattcatacaatgtaaactttaagcttacaacaaatattcattatcaactgctgtatacccaaaggagtgcctggaagtactctttttgttgttactcttgccatgactagtgaattacaatgattagtcatttgtggaagataatattgaaactattaactttggctaataatcaaatgtatgttaaacagctactgtgttccagactgtttattagtcactggagatacagcattgaacaaaagtgacaaagtctccgctsttatagagattgtgttttggtccatggggagtttatcatttttttggagatgttttggtgtgactctatctcctgccatttagccatggtttatagattgtagtagcctcacctataccctatgtcctaccagcccatgtggatggtagtaattttcttccactctttgtattttttcaccatcctcaatttggcttctcacttcttccctcacctgagtcattagttccctctaatgaatttcttccacttaacttatgcagtcgtgtttctgcctggatctgcactgttacacaaggttagaaaagctctctgaacagagccccgaataaagaggagaaatatataggggaattgcatttgcagygtacaagaactaaagaacaggtttaaaatagctccataaatgagatattttaaaaatatatatcttaaaaaagtttaagagataataagagtaagagagtattttatatctataaaaatatatctttaaaaagtttaagagacactaaagtaagagaggatgtggagttggtaagtatagacaaatctggcagtatgtttgggttacctcctagggcttgagagaatgtgcttctcttcccacctccatagtcagtgaggtcatgtctgatagcttcccatcactcacagtggtagtagttattccacagaaattgaccaacatcattcccatggtgtgaatgtgtcccctgtaattcatatgttgaaatttaatcaccaatatgataatactaagaggtaagacttttaggagatgattaaatcatgagaataaagccctcatggattagattagtgccttgtgaaagggcttgagggagttgattgactctcttctgctcttccaccatgtgtgttcctccccctttgctcttttgctcttctgttatgtaaggacacagcagtaaggcaccatcttagaagcagggagcagactttaccaggcatcaaagctgctggtgccttgatcttgtacttcccagcctttagaactgtgataaataaatttctgttgtttataaattaactaatttgtggtattttgttatagcagctctctaacaaagacaaccataaagtaggtcttatgtatttatctatcattagacctggctattaaacatttgtcagaataccactggacaaattctaagaagtttgtatgtaaagtgaaataaagaaataagtcagcaggtgaaaggaggaaataaggacgaagaagatataagttaaagatatatgattattttataataattataacaatatactaattatgytawaatatatttatacacttatttgaatgatgagaatgaagtggagagaggaagttttatattgctggagagatttaggatatagttccaggagcaaatggaagayrtacaagttkctgggaagaaaacttgggaggctttctgggtcaaactgagtgttagagatatatagaacttgcctagagtgggggattattccagggagaaaaaatagcttgaatggctcagaagggtgaactagcttggaatgtcaggaaaatgtcatgctattgggaggcctggctggggtggcatccaaatattaggccaaggaagagcttgtagatcttgctatgaaacttggtcttttcccaaaagatgctggtgaaatactgaggagttttaaacaggaactgaaagcaaatttgccctttatatgggtcaccctgccaatgttatatcaaatagaaaggaagaagactaggctggaggcaaatacatcacattaaatattttttagtgtcaagcaaatggaagactttatcttttgagttttgagaaaggagtgawctatggttgctgcaaaaagccaataaataaataaataaataaataggactgagcaatatcactgttagcctcataaaaatcatgtcattaggaagatgcaaaggaaaggtctggcgatggtacatattgctgtgaattactgagggcattggcgaccactaagtggagagagttagtgtacaaaaagaggcacatagcaaatgggcctatttctaaattcttcctgtttctacatttccccagaactatgagaatgattgattttatactgatctggcttgtgattagcagcagaagatgaatggcaaatacagatgtatacctgtgtatatacacctgtgtatatatacatacctgtgtatatatctagatggatctgtctcaggatgaggattaacctattgtatcttaaagtatatatgctttgtataatgaaacactgtagttctagcctcatgtgagtcaatgtggaaatcatttaagataatgatgaaacttaatatggcttatttgctatcacaatataataaatcattcaatgaatgtgaactgggcataaattctacagcctcagaaatcaaggaaatttttttatcaggaaaatgagaggcacattataagtgtactacaatttaagtgtccatccgttctcaggaaagaggataaatattttttcccttggtttctcattttatgaacattaattatatgctgtcacactttttagtaggtgacagctcacttaaaatactacagaaatataaaaattgcttagtaaataaagaattcaccagtcattaagttttgttcattccagccattttacaaacccaaatataggagtaaataccaaatttttgttttctatccaattttcacaatgttccttctttttgtttttttcttttcagtttttggagacaggtcttgctgtgtctcccaggctagagtgcagtgatatggtcatggctcactgcagccttgaccttccacgatctagggaaggatctatggatcctcacatgtcagcctcctgagtaactgggaccaaaggctcagaccaccatgcctggctaatttttatattttttgtagaggcagggttttgccatgttgcttcaggctaatcaaactcctgggctcaagtgatcagcccacctcggcctcccaaagtgctgtgactacaggagtgatctactgtgcctggccaaaatgtwactttttagttttgaaaataaacaaatcatacaattactggacctggaagtagagttattrtggtgaagcagtttctttttatggattgttatatttttattagaattgttctgttcctaaaagttgcttagagtctctgttatccagtattttccacttgattttactatgtaacatggaagaaaataagaattatgagggattttcttggtaacataatttattaatcaatgtcaaaaacaccacataatgtactgactgaatggctaagaaggcatatgtcagtttgccaaatgagcctagtgttaatggactaagtaatttcaaaggaagcaaaaggacaagggttttgtgccattatcattattatcaggaacatttttaagtactcattttcttgatacacttgttaatcattttatgtatttgcttgttgtttttccctgatgcatagtgttggtcttcggccaagacatcttctatttaagaacagagaagactcactacatggctattttctattggctttaaaggcccatatattgcatggcattgattttatttgctcgggtctttagatttgaacttcataaaacataaaagaaaatctcctgttttttttttttgcgggggggtggtcttgttcttggataaaatggcctgttttttcttgaatatacatctaagatatattcagtttgtgcagaaaccaggaactgaattagtatggagctgagtcttgatcagtctgaggtgtttcttttgacgaaagccaacattgtttaaaacaatgcatttgatgtgacaaatgaaaatataacatttttcttaaaaggtggattgtagaaagcttagtaacaataatgtgtttacccaacaatgtctgttatttgccttcactttctttgaaactgtttttttttcccaccctcttkcattttttgttatagtttagcctctgtggcaataaaagagaatttatattttataagaaatccagtcctaggtattgattcattgatgtatttaggggccaagaagtctgtctgtagttctttcaaaaactgcttttgatttttttaaaatagtgtgttaaacaagtaagaagcaaaataatgagtatcacagaaatagacttttatcactctgctccccctggaaataaaaggatccattaaataatcttcctttgtgtaatactgcattgtctaccttcagaccttacagtatttaaaagtaccaggtgttgaggygtgcagatggcatatgaccctgctaagctttctcttatcctgtaatccttaggccagaagaaagtaaaaggtgggaggggagaaaagggagtactgtatattctcaggaaagaataaggcagtatgatggcagtggaaagaaccctggactgtgagtgtttttgttttgtttttgtcttttctttaagtatctttgcttctttctagccatgtgaccttgagacaatcagccagctggttggtttttagtttccttgtctacaacataccaaattgaggagttgtttcctaatttctcagttcattattgctgtaaagtggtataattattttgaaagaaataaattctaagatacagataattcaattccgcataatgtgtgaatgatagtagataaattttggtatagttcagaaaatattacaggaatactatggagaatacatgtcaagtagaggatttttatgttgcttattttgttttcctattagtgttcttattcattcattagctctggttgtacacacatctcatcttctgaaaattacatgtatgggtttagggattttttttcccttatgtaagacagtataaaattctgttttttatattactttgacatggccttaatatttgcaaaaaagatagttttatataaccagagcatgcaactgatagggttttttcttctggaattgtaaatcattttattttcttctagaattataaatcattttcatttgaatcctagaatcttatgagacaagatttgtctacatatgtaatatatataggcaaatatatatgtgtgtgtatatatgtatgtgtgtatgtaaacatatatatatatatatatayacacacacmtagagagagaaagagagagagagacagggtctcactctgtcacctaggctggtgtgcattagcataatcatagctcactgcagcctcaaaatcctgggcttgagcaatcctcttgcctcagcttcccaagtagcgaggactacaggtgtataccaccacatctggctaattttttaaactttgttgaagagccagggtcttgctgtgttgcttaggctggtctcaaatccctggcctcaagctttcaaatattgggaatgtagccatgagccaccacacctggcctgcctatatctttaataagttgcaacttgatttcctggtttatgtaaagtagtactaatttgagagcctctcatgtttatctgaaaccaatagtttaaatagcaactgttgttactattataaatattgttactattcagctaccatgtattactctgyattaccatgyattattattgagttaccatggtaatraaggacattcgcttgatttaaacaaactttttagtagggagatgtatgctccatatctttctagttggtatggatgtactctaagtttgccctttaattcttctttttagaaggaatttgtttttctaagattaatatgcatatttctaaggaaaataaacaccaaattttgacaaaccattaatttctttaaatccctagaaataatgtgcttctttccctttttaaataattttgtaattacattctaaattcttttcaagtagctataatggcattgaagttcttttgttgtcctggcattttttgtgtgtgcttaatatacagagctgccttggtgataataatttgttttatttagtgcacacatcacccgagcaatgtacactgtacccaatatgtagttttttatccctcacccgacttccaacattcctgctccggagttcttaaggttcattatatctttcttatgtctttgagtcctcaaatgttagcttagctctcacttgtgagtgagaacacaggatatttagttttccattcctgagttacttcacttacaataatggcctccagctccatccaagttgctgcaaaagacattattttgttcctttttatggctgagtagtattccatgttgtatgtatacattttctttacctacttgttagttgatgggcacttaggttggttccatatctttattgttgtgaattgtgctgctgtaaacatgcatgtgcatgtgtctttttcatgtaatgacttcttttcctttgggtagatacctagtagtgagattgctggactgaatggttgttttactttaagttctttaaggaatctccatgtattgtccatagtcattacactaatttacattcccatcagcagtgtaaaagtgttccctttttaccacatccataccaacatctattgtttttagattttttaattatagccattcttgcagtagtaaggtagcatctcattgtgattttaatttgcatttccctgatkattagtgatgttgaccattttttcatgtttgttagctgttgtatgtcttctttttagaaatgtctactcatgtcctttgtccacttttkgatgggattatttgtttgttttttttttttgctgatttgttttaattctttgtagattctggaaactagtcctttgtcagatgcaaagtttgagaatataagcaaatatttttaagcaactcaaagttaaaaggtggcttaaagatcactgaactcatctgactcagttgtgagttcagaaaaggaattaagaatagaggcagactaaggtcaagaactcaggctctctgacaaccagttgagtgttgtttcttttaattttttctttttccaagagaatttattttctgctttatttaggtataattgacaagtaaaattatgtattttcagggaatacatatctctggtatacatatgcattgtgaagtgattaccacactcaagctaattaatgtatttatcacctcaaatagttacctttgttgtgtgtggtaagaatacttaagatctacttggcagcagtgtcttttctcttatgacctgttgctgctaaatactgcagactgtatgagtgaagaaatatttgtcctttgatatctcctttctcatgtatactctctcataatttttcctgcattaagaagtaatcctcagcctatattgccaaaaaatgtgaaataatatcaatattatggtgcattcatcttattgaccctttttggggtatgaagtactgtctgattccttgcaatataacttctaatactattaataggttacaatatactaggtgttcttaaaactaaggtaaagactttaatagagtcttaatctttaatgtcctttaaggattttgttttgatgccatttaaaaaaaattaaaactggcaaatttgtataatgtgagcattaacagaaagataaaaaaattaacctattaataaaaatgcaaagaacttctgttcaagtacctttggtttagggaaatactgtctcccttagaaatattttatatgactttttttattaccctgaaaaatctaatactcaaaacagttaaaatattcatttttatagaggaggttatagagaggaagttaggaaagggggattacctgaaggaaaacaatgatttggaattggcaaaatctgtctgggtctctctagcaagcaataggtctttcttcagttgctgttaaaaaaacaaattatgtgacagtgatcacatctctagatgcaaaggatatttaggttatacaagaatagcattaatcattgttacttttgttttttatatatttttttctttcttttttttgtagtggtaagacctattcctattccttctcaatccaggaataggtttgcatactgctaagttgcagtgagctgagatcatgccactgcactccatccagggtgacagagcaagactccatctcaaaaaaaaaaaaaaaaatgcctactgctttttattgttatgtaaatccttattgcatttggtatattctgcatattggggtggattagagattggtcattttctgcaaaggagaaaatgaaacatctttgtcacaaaaagatgtagaaaaagtttcaattagaaatggaaagagtattttaattttctcatctttgttttcaaataattaagtatattgtgtcacagttgattaaccagagaatgcaaattaatgtaattgtgtgcagtatgtcatccaggtctaagagcctcataatctttttgttgattgaatgagagaaagaaagagtgggtgaaagtctacaaaagcttgtgttaattaagatatatctcctactggtagaaaatcatgttcagacattatcacatcgttagtcagctcatcacagtatcactttgcagaaaatcctgtttctttgttttttttttccagtggctttaatgaatttcttctaagaggtcctgtgaaaggactgagctgtagtatttggataactgtgccattttcttaaaaaacagtttgagcctgctgagaaagtagatcatctggtttgacattttgctgcaaaagaagtagcattaatatatcttttttttttttttgcttaacaaataaaacatcaaattattttggccttttcctcataatcaaatagacaataagatgctaattaaataactgataggcaaaaatatgtgagactaaagaactaaataatttttccatttacttgaacttttctaaggataattgttatcatttatctatttttataaagaaataaattaatcatcagtatgcctttataagataaaattaattgttcacatttaagaatttattaatataatgataaaaataaaatgtttttaaaagacatgcttttgaagttctgtgtttattttctgtttatgtatatatgaacctttctttwcttttcttttttttttttttttttttttttttgagattaagttatgctcttcttgcccaggatggagtgtaatggcaggatctcggctcactgcaacctccgcctcctgggttcaagtgattctcctgcctcagcctcctgagtagctgggattacaggcacccaccactacgcccgactaattttttgtatttttagtagagacagggtttcaccatgttggtcaggctagtctcaaactcctgacctcaggtgatccacacgcctcagcctcccaaagtgctgggattatgggtgtgagccaccatgccctgcctatgaactctttttgacaaccatgatagctattyaagatatgtttgcttggtattctttgtatttatgataatctgattaaaggatgttccaaatataggaacattaggtatagatttccttacagctttataagtgatgtcttttatgctgcttttgctctgtgtgtgtgtgtatgcacacacacgtgtgcatctgtgtatgtgtttttagtcctgtcaatatatcatctgcagagattcttttctccagaattattgtcatatgtcctttatggttgtataaaaagagaaaaacttattgctrtgaaaaggatgtattatattatagttgtgtgcactaagaattctgatttttgtttgcttttaacaagtttgggagaaattcactaaactttaatttatactattacctttcaaggaatatcataacacatatagctgtttgatttaacagttctttacttgatatgtacagttcttgtttgctgttgggttttggcttgatttttcattttaggaaaaggctaagtgggaaaaaaattgaaaagatagagcattacacattactcatttaatgagtaccccataaattggcaggtagactgaaaaccaagggttatttatcatcagaaagtttactagtcacttgattgaaagaaatgttaattttataaattaaaaagagtaatagcacaaatatcagccaataatataatatttaaaaatgtgaactaatattawwgagtataattagagaaaaacacagagtgtttttttggatttctagactaaagagtgtaagcacatctgtgtttggatctcattagttcctcctcacctatattgtacgaaatgtcagaattttaagagaaaaaaacagtagaagccagttacgtatctctgattcagtacgttttagtaaatatgaagataaaatatacattctgcttctcaggaagcactggccactttgtgactgccgtattccaaataattarcatctagctattcataaactaggaaatggcaattgtcatcaagtgtatattttcatcattttgtggaaatgctcaccttcagttagtgaaggatttactgcagctgcggagtgttagctttgcatactatctaatmctgactgtgcgactgtgtcaagacgggagtatgggtccacttgctattcatggttgatatatgaccgtttggtctctgctgggagttattatgattaaccttaacaaacagttttctccagtaaaaatagatgttggaaagatttcttcaacaaatatttatccagcaccttaattatgtatcagataatgttctgtatcttggtggcataatactcatactagaagaagaaagagggatagagagataaatacatataacaataaaacatagtgtgataaactctgagaaagtggaggcacaagttgtgctgggaatatacagtaggtccagcctattccaaattgggcaggaggagagaacaaaaaagtaatggagggatcaaggaagcctttccataggtatgactctagaggtaatgcatacctattcctgaaaatgtgcatactctatgccatgcagatagctatgcaatgtaagtatttccaaggtaacatctaggattttttcctttgtccttcttttttttcccttttctttctcccttcctcttcccctccccctcctattttctctcttttcttcattatgaattcatatgcactgaagtttactaaatcagttcttagctcatgatatgcagtcattattggtcttttcctggctgtcattcacttattcatttattcatttgtgatattacaattaatacatatgaaacaccaacaattagttacatttacccttttgcttctctcctatttcatccccctacctttcctaaaaataatcattattctgaattgtgcatgtccttcctttttaattggtttgctttatttcatatatatcatacttaaataatacattgcttagtttttttaactcaataaaaattatgttctgttatatgtaatctgctgasattttatttcactcaacattatattaatatgattcattaggtttttatttgtaactaaaatcattcagtttcacttcagttagtacttcattttgtgaataagcacaaatgtccattctctcatgtcaatgagcaactgagctgcttccatttatgttgttctgtgagtggtgctactgtgaacattctcatacttgctgtctaagacacatgttaaagtttctgagggtgtatccctgagaatggaaatattgggccacagactttgcaaaagtaaaacataaatgataawgccaaattgtcttcaaaagctattgtaccaatttggactcccaccagcagtgtataagagcttaggttgatcaacatcctctccaacacttggtcttgggagactaatttctgtcgattgaatgctacatgatgtaaatgctagttaatggtgtctggttttgattcacattgcacgggttactaatgagactgtgcatctcttagtatgtttattggtcatgtatattttctctaacctttcaatgataagatttgatcataaagatatatgttaccattaaggaaaaaaaaatatttttgtatttatatatgagaaatatgtatatgtagaaatgtatatatatgtatatttataggataaatataactatttcaaatattaatccaggcttaattttatgtatttaaaataaatatatacacgaatrtatattatttatatatttatacctattcttaatggctacatatatatttatgattaaattattataatccatctatatacatatacacacacacacatacatacactacatatatattactaatacataaaatggtgggtaaatttctaataaaggatggatatacagtcaaaatggctaacaaaataaatcaataggaaatacttccattttgaaattattttcatgacttttatcttttcacagcttgatgtttacttttcttttgacagaacgatttcgagatttactactgcctccatctagtcaagactccgaaattctgcccttcattcaatctagaaattatcccaagtaagcaaaaggagttcactgggttttgatgaggcartgggcatagtgcagggagagatttgggcgggcaaaaacaaaatgtaatctttcttaagatttctgaaaatcctgaataacttaccctaactaactaagacatcttctgcaatataatgtctcaggctccttgcagctgggtcatagaagaaatacttacttgtaattgcaacccagctttgactgaggagctgctgcacagtgcagacaacatgctgtgtgcatctgtgtctggttctttttgcttgatgccgtatcaacagggacagtattttgtcggtgatacctcatctggttttctatttactgtcctttaaatgcaaagattcatttatattgtagcaagtcattttcaaaatagccatgggcttgataagatttttgacaatctctatacattcttatttatcatattgaaaactggggatgtgaaatcttctgacgctttgttatatgaagcagacctttccttctcatagatgccccaagcgtatgtccttgttgaaggaatatgccttcatcttcctgaaggttaaggaaataccaggactcttataacacatcttcttccctaaagactgatgcatgctgaatcttgatcattcctgtggcatcctggggcctcctctatgagtgtttaactctctttaatagttagtgtggaacaggctaaagaataaataaactaatatctgaaatagaaaagaaaggccatcaacttaaaggaatagaatttggtttatacatatttcatctaatcactatgccaaattctttgatcgctttgagagttttttcaagtattcataaactttgctttctggggaaattattttccctctaatacttacctttgataatactcacttaattatgatcacaaaaataaatgcagaatcctaattatattkcttgtgcattgtttcaaattttaatccaggcttcatttttagcaataaacttgcaatcccctgataacacacacagagacatacatgtgcctatacagccttgaatgcatactttgctctatatgtacatgttgaccaggagcatgaatgtgcccaaaaggattggtgcacacctatttgtatttttacttacagtggctgttggcagaggctgatgatgcctgcttttctgcctcttaggcttacagtttgcctaatgcctttgcttgaagagggtagtcatagtagtttctcaggtggttatctatttgcagctacaggaatacctcagagatattgagggtttgattctaggccactgcaataaagtcaatactgcaataaagctgtcacactttttttttttagtttctcagtgcatataaaagtaattttaacagtattctgtagtcttttaagtgtgcagtagcctcgatatgtctagaaatactatttacatcccttaattaaaatatactttattgttaaaaatgctaaaaatcatctaagccttcagcaagtcataaactttttgctggtagaggatctttcctctatgttgatggttgctgactgattaggaaggtggttgttaaagttaggggcacctgcagcagtttcttagtataaaaccatgaagtttgctgcatcagttggctcttccttttacaaaagatttctctgtagcatgtgatgctgtttgatagcattttacccacagcctaacttctctaaaaattgtagtaaatcctctcaaaccctgatgttgctttatcaagtaaattgtcatttcagcattttcatagcttctttaccaggagtagattttatctcaaaaaaactattttcttcctgtaatcccagcactttgggaagccgaggcaggtggatcacctgaggacaggagttttagaccagctttgccaacaaggtgaaaccccatctctactaaaaatataaaaattagccggctgtggtggcacacgcctgtatttccagctacttgggaggctgaggtgggagaattgcttgagccgaggaggtggaggttgcagtgagctgagattgtgccactgcgctccagcctgggcaacagagtgaaactctatctccaaaaacaaacaaacaaacaaaaaacaaaacaaacaacaaaaccaaaactactttatttgctcatccatagtaagcaacttttcatttattaacattatatcatgagattgcagcaattcggtcatatattcaggctccacttataattctagttctctatttatactatgtttgttgttacttcctccactgaagtcatggacccctcaaagttatccacgagggctcaaatcacttcttccaaactcctattaatgttgatattatgacttcctcccatgaatcatgaatgttcttaataccatctagaaggtgaataattttcaggatgtttttaaatttacattgcccagatctaccagaggcatcactgtctatggtagctatagccttatgaaaagtatttcttaaataataacaattgaaagtcagaatttctctttgatccatggaytgcaaaacggatgtaatgttagcaggcctgcaaacaacattcatctccttgtacatctacatcatagctcttggttgactaggtgcattgtcaatgagcagtaattttaaaaatttatttgtataaatgtatgtggtacatatgtaattttgatacatggatagattgtgtagtagccaagtcagggcttttagggtatccatcaccagaataacatacattgtatgcaataagtaatttctcattattcacccacttcctagcccccctgcaacatttcaagtctccactgtctatcattccatactctacgtccatgtgtacacatcatctagctcccacttttaagtgagaacatgaagtatttgactttctgtgtctgagttatttcattcagggtaatggtctacagttttatccatattgctgcaaaagtcattattttgttcttttttgttcctgaatagtatttgattatgtatatatacagtattttctttatccaatcatccattgatggacaattagtttgaatccatttcattgttattgttccggtgtgagctttgcttactgcctatgtgagtagtaatactttagatagaatcttctttttttttttctggtgggcttaaaatattcagtaaaccacgctatctataaacagatgtgttttcatctggactttgttcttttatttatagagtacagacagagtagatttagcataattcttatgggccttaagtttttcagaatggtaaatgagcattggcttcaacttaaagtgaccagctacattagtccatagacaagagtcagtctatcctttgaagctttgaaaccaggcattgactgctcctttccagctgtgaatgccgtagatggcatctacyacttgatggctgtcttgtctacattgaaaatctgttgtttagtatagtcaccttcatctattatgtcagctagatcttctggataatatactgcaacttctccatcagcacttgctgctttgctttgaacttttatattatagagatggcttcttttcttaagcctcatgaaccaacctcttctagcttcagacttttcttctgcagcttccacatctctgtcagccttcatggaatagaacagagttarggccttgttctggattagtctttggyttaagagaatgttgtgttgtggctggtttaatcatccagaccactaaaactttctccatatcagcaataaggctgttttgctttcttattattcatatgttcactgaagtagcacttttaattttcttcaaaaactttttcccttccattagcaatttggctcactgtttggcacaagaagcctaactttatgcctatctcagctttcaacatgccttcctcactaagtttaatcatgtccaatttttgattgaagtaagagacatgcaactctcctttcacttgaaacttagaggccattttagagttgttaattggcctaaattcaatattgttttgtctcagggaagaggatggtcccaggtaagggaatgagaaggagaaatgattggtagttgcagtcagaacacacacatttaattcatcattgcagataactgaaagtcaaagaatttgtagctttgtaacataaaaaaaattctgtaaagttgaaaaatgagtcaaacgagtcaaacaattagaatgtatttcattcacaaccactgttatatgtatctacattgagattttttcctcatttttctgtttgaaatatgttttaagacctaaaatatgggttacaaagcaacttccttgccctataaaattataccatatcacagactatttacagatcattgcataaccaacatagatcataatattactaacatgaactcattgtgcactggttagtgtgagctgtagtagtttggatttggactggggtttctatttagtcaacatagtgtccctataatctttaactttctgttaccaagagacgtctaacaaatattgaaatatggaaatgtatgtcctttatttaggtgaaaaatattcatgaagagaactgactagttctgaaatgtatatgtgtatgtatgtgtatgtttaaaggaaaggcatttaaaaaatatcacctgcaatggtgcttgggaacactcttctaaaatacaagaatgttcattaatcaatttttacatttgtgagctcttatttgactcattgccaaagccagggcatccattctcctcaggatgtaattgtagacattgttccatgaaaattctcagagcacgaataggtgtgataattgtcagaaagagatagatgagtggaaaggaataaaaaaagaatgtgtatctaatacaaaatgcmtattgttgacttataggttggaggaaacaaatggagataaagaaacaagttttattgctaataaactctgaaggatttaggttcataacatatgtagactagagagtagttataatatatttttatccttgtaaatacagcttggacatgtaaaatgtttaagtacatctgatataattttatccataaattacttgcaaccattttggcaattaaaccagcaaaacatgacccagtggctctggaagttttaaccacaacgtatgtaaaaatattgtgaaaatacaagaataaactgtttctacttggttctcataaagatcaagttctctgagcttcctaataccagaactgtttagagaggggaatatcatttatgacaaattttagagctgttcttttttgacttggtttgctgccaaagaacaaccttcattgtttggacaataaaagcaatgttctacctcaatctcatttctaatgggctacgtaaaaatgacttcaaatggtgatttggggtaatacccttaaactgcaaagcctcagatgacctttccgcagtctgttctccagcttatcctcctttctctttcctagccaagttttgagttcttcttcaagacatcatctatctttaataatttctgttcaatctgcatgtctgtaatgtacttgtcatctgatcctgagccaagttattttattatattttattttattttttagacagagtctcgctctgtcacctaggccagagtgcagtggtgtgatttcggctcactgcaagctccgcctcccgggttcaagcaattcttctgcctcagcctcccgagtagaagggtttacaggtgcgtgccaccacgccgggctaatttttgtatttttaatagagacaaagtttcaccatagtggccaggctggtctcgaactcctgaccyggtgatctacctgtcttggtctcccaaaacgctgggattacaggtgtgagccactgtgcctggcccaagttatttttgtttgtaatagtaacacataatgaacactacgcatgccaggaattgtgctttatatgcattattaatttaattcttactattcctctataagttaggtagtactgtttccctaattttacagataaggggactgagattcaaagaggtaaatgccctacccaaagtcacatggcagagctgggtctccaatccagatgtgtttggcccctcaaattatacttaacttagaagtggtgggtcattgagggcttactcccaggtggctgaaaactgtgtatgtgtgctagcacatgtgtgatgcatgtgaagcacacatacacttggagtcgaggtataaggagaaatgtggacagggcctagaataccttttgttttctgaggcaaggtctcactctgtcacccaagctgtagtgcagtggtgcaagcacagcccactgcagcctcaacatcttgggcttaagcgaacctcatgccttggcctccagtgtagctgggaccacaggtgtgtgccaccaggcctggcatacatatatatacartttttttttttagatacatagttttttttttttttttttttttttttgagatggagtcttactctgttacccaggttggagtgcaatggtacgatctctgctcactgcaacttctgcctccccgattcaagaaattttcctgcctcagcctcccaagtagctgggattacaggcgtgtgctaccttgcccagctactttttgtatttttagtagagacaaggtttcaccatattggccaggctcrtcttgaactcctgattctggtgatccgcctgccttgacctcccgaagtgctgggattacaggcataagccaccacacctggccagagacataggtcttatcacattgttatcacaggcctggtctttgttgcacaggctagtcttgaactcctagcctcaagccatcatcccacctcagcctcccaaaatattgggattacagatatgagccactgcatctggcctggactgccacttaaatgaccttggactttgttgtaaagacaatgaagacccatgaaaggattttaagccaaggagaaagataatcagacttacagttttatagatttctcatgaaagtagagaggtacatgaggtactacatggggccagcacacaagctagttggcaatttcatattcaggcaggaaatgataatggattcgtactgtggtaatagtaatatggaagatcagatagatgtctaagggtgttaggaggcataattaacagaatgtgatgactattatgcaagaaggagaggaggagagagagggagaaggaaggagctttgggtggcttcaagctttttcacttgagtcacattctggtttaagtcctcatgattgagggagagtggctatctgagcaactttatgttgactttttgttctgtattacaaatgatgataatggagatatcttccttctaatgttgctttgaggaatgcccaatgcatgacacaattctttcttgtaagtctttgcgatatttaaataaaagcatagaaagcacctggcctcttgcaaaagtgaattttcatcaccattctcattgtcagctctgttatgccatttctcaaaaccattgcttgcctcagggcagggggaaaggctctgccatgtgggctgcttttgtatcttcaatccattctaaatcctgtcagaagggatgcattgtcctatctggtagaggtggctctgggtgatatgctctgcttggattagtcaggaaggagccctttcccttgtgtgtctgcctatttgtggtagtggttattctggtacagtttctacaagcacagtaattcataagattttccacagtatacatattgtctttcattagagaattactgtctttcatcttctaatccttaaatttaggctttcttttatatagtatgtgaaattcgaatacctggatggcaagagatctaaaaggtagtattctgactagagtgtggaatgtagttataagaatgcctaatgctattgatgtttgcaaaactaggcaagtaggatgtccaaagaactctggtctatcagcgggtagtggatcccaacccctgggctgggattcacaaggcaaaaccctgtcatcaggactgtaaaactgaggcactgcttaaattgtaaagattttggctcagagatgtaagtcaagaagctgtgttagtgcaaggctaatgagcaagcaataaacgagccttagtgctgactgagagcacaactcattcctgactcagataagaattggttgaaggacagggccaagctgagtctatagctggaggttaggtggctaaaatttcagaacaagttggggatgtagccactttytggagatagattaagcacaggtaattctccgtctagtgcctttgagagacattttctttctttgttaccccatcctgcattcagctgccatacatcttttcagactctttagtttttaggtttgagggatttttgttgtttatttggggttttttgttttttttttttttttttttttttttgggcagagattgtcagtcgacaaagtagcctgaagtccttcctttgttaaaaaatcttatattaaatgtatccattcataatggttattggagtataattttgttagcatgattattttatggggactccttgccaaagaacttttatccttgcagactttaaattaattaatttgtaaggccttgactgaatcattcagaattccaagagataaacatcaaattgttatttttccagtgttccttttaacatgagattgcattagataataattacaaattattgtaagtgggcttgagttcttgatttggctctcagcttgaayattactggtatatggaaatgctgctgatttttgtgcactgactttgtatactgaaactactgaagtcatttatcagttctcttggcagagtaggtttttctaggtatagaagcaaatcatcagcaaagagagatagtatgacttcatttcttatttggatgcctttcctttctttctcctacttgattgctctggctaggacttccagtgctatgttgaataagagtggtgagagtggacgtccttgtcttgttctggttctcaagggaaacacatccaccttttgccaattcaggatcgtgttggttgtgggtttgtcatagatggctcttattattttgaggtatattccttatatgyscagtttattgagggtttttaccataaagggatgttggattttatcaaaaactttttctgcatctattgagatgaaaataggttatttgtttttatttatgtttacatgcaaaaacagaaaactaaacattgggtacacatagacatgaagatggaaacaatagacactggggaatacaagatgtgggagggaaaggggcagggattgaaaaaaattacctacctgtattgaatgctgctgtacactgcagagtacagtattggttgtttaagctcatgatcatgtgtctggctggaagctgtggcagctgcccagcatcatgagagaatattgtaccaaatactactagtgcaggaaaaggtcaaaattcaaaattttaagtacagtctctattgaatatatattgctttcactccatcataaagttaaaaaaaattaaattgaaccatcctaagttggggaccctctgtaaaatcaccacctgcactagctcactcctgatcctccttacctgctctatcagcaacatcagtagctcctgggggaatggtgaaaactacaaatgctcagatttctgagtcagcaagtctcggggtagggcctagcattctgtgttttaacaagcctgcaggaaattttgatacacagtaaaatttgaaagccatcaagggagaaccatcgtgagctttctaaactcactccttttgtttgttgtttctattgatatgattagctcctgagactagaatggtctaaaactgcaataacatcctctcctgaggaatagtttatcacactcacttttttcctacatgaagagagaattgttagatgataattgtcctggaaactttttttgtttttacctttatataatacccctcaccaaaataattggtaattgtaaagattattatctgattattaacaaactaagctttggagttagactcagaatgaatttagtaaaagtcatccccccttaatataagtgtgaccttaagaaaattatttaaccttttttagttttagttcccaatgcaataaaataggcattatactttcctatgaaagttgttgtgtggattaacagtgaaggtatacatagaacattcagtaccaaccttggattaaatgttcagtgaagagtatccattgttaatatagcttattttaggtttctgaggtaagagtctcaggcatgtcttgaaaaagaaaaaaaattttggacactgagttttactctgtcacccaggcaggagtgcagtggtgtgatcatagctcactgcagtctcaacctcctggactcaagccatcctcctgcctcagcctccctagtacctgggattacaagcacgtgccaccgtgcccagctaatacttaagacaagggtctcattttgttgctcaggctgggcccaaaattctggccctaagcaatcctcctgcctcagcctccctaactgctgggattacaggtgtgagccactgcaccagacccttgaaattttttattaattaaaagaactgtttaaagtgacacatgatcagagaagattttaaaaggcaaatatttttcraaaatttacacttatatgaacattaaatgttgtaaattacaaacctttacttttaataatagtataatatttattatattattcttaaatatctaatatttatcaggttcttactatgttcaggcaccatgttaaaagctttaacaagtatattcacactcagccacataaaacagaaacgtagcttgaaactcattaagcttaataaaaggtttaaatcagttttttaaaatgtaaataaattctactttcaaaggagaaacttaaatgtcaaaaaatgtttatatacttttgagtgggtcagggaagaagatatctcttatccttagaattatcttagatacacaatccttcataaaggatcttttcattagttatcaactgaaatttaaaaatatatgaagttcatttcatctctactatgttatagcaagactttaaagagttgcctttaatttctacaatctggttacatatattatgacaatagcaacataacattcttttaaagaacatgtactatgtatgatagggagaaagtcactgctcataaatgaaaggcagtgtatttcacacattaatcagattaaatatgtaaaaaaaagtggtttaagtagtttccatttccatctccctcaaaaaactagatgtcatgaagtaatcaaatactaataattttatcttcttattttttccaagaaaagcaaaattttctctctcctggtacaaaaaaaaaaacaaaamcatttcaaatgaaaactgattctctaagggccttgaaaccaaattcccacctacatttcccagctcatactggacttagcccatttcttgcatcaatactgggcctcacagaaggcctgtcagtatactgtaggtactcattgatgccgttaacaaaatgtatttctgatatttgtgtggccctctacaattcttagcacactttttttctgtagcatcccatcttattgacccttttgtagatgaaagaaatccactttaggaggacaagttacttgtctggaatcccagccttagtaaatgactagaacgctgagttctagtcgtcctgtccaaagttatttcaaaacaccaaagagtagctttgtggggagtggggtgtgtgtgtgtgtgtgtgtgtgtkgggtgtgtagctcagaaagcagaccagtaggaaggagggggcagtggccaaaatatagtcacacaaccaaaacagatgtagggagtctgagaaatgtagtattttggctggactttatgcttccctgaataaaattaattgtctgttactaagaaagaatgggaggatgaatattatatgaacaattagcatttccattgcagttaagaaggatttctctatgctctctctctctctctctgtctcacactcacatacttgaatatataaacatgagcagagtagttagagcttcagagcttcctttgtgattgtcctttacagctaaagaactatcggttcgtaagtaaagttctatacttatgaacaaccagggcaagaggagggacggtgttagattcttttccttactcctcattatttttctgttcacatagtaaatgtttaaataagtatttcctgtactgatctagccattgaaaaaatgtttattgaatttagatacagtaaagcaattcttactttaatttagtcatatatagtaatctaatatgatcagagcttagtccttagctacctggcatgatcatatttacattaccctatacttttaattaatggttccctcaaaaaaggcacacttagaaacagatgtatttgttttaatcttgacccttcataaacaacatctgctactcctttaaactaatcactatgagaaaccatgaaataaggcctgacccatcacaaaatctagagattgcattcagcatgtttgctctatggtacagaaaattaatttcacttattttcatttttttcccgcctttttctgactgctctacaggctgtatattgatggtccttttggaagtccatttgaggaatcactgaactatgaggtcagcctctgcatggctggagtcattggagtaactccatttgcataaatactcaacaccctgttgtatgtcattttgatctattttgttaatccaaatagagaactgccaatatttctgatatctctctttttagtataaaataattccttattgaattattctacttgttgatcaaggacctccatttactgattgatgaggggaataattcagtgattctcaacatgtggtctgtggctcctagcatattctcttgtagaaagatgtcatatcacagttatgcactcctctgtccttttcctttgttaaaagccattcgcctccatccttcattttctgtgtcctcatcagyggcaagtggttctactcattcattcagtcaacaaatatttttgagcacccatgtgccaataggtcttacaggtattgggaagacagcaatgaatgaaaacagagaccctgcccttaaaaagcttgcgttcaaatggggcaggtaaaaaagaaagcaatgaaaaatataaataaaattatttcagaaaatattagaattttgacaaaaggtagacattaatggatatggaaataaagggttgggtttattgttgaaatatggtcaggcttttctgagatgacaactgaacacatcattccttcatttgttacttagcaaatttacaacagactaaagaaagtaacttcaaaggtgaaattgtggccgggcacattggctcacacctgtaatcccagcactttgggaggccgaggcaggtggatcgcttgatggcaggagttcaagatcagtctggccaacatggtgaaaccctgtctctactaacaatacagaaagcaaccaggcgtggttgtgcatgcctgtaatcccagctactccagaggctgaggcacgagaatctcttgaacctgggaggtggaggttgcagtgtggggagacggcaccactgcactccagcctgggtgacagagcaagactctgcaaaaaaaaaaaaaaaaaaaggtgaaattgtctgaccaggaaatactaaactaaaacttattttagtttcaggattgtaagcaaaagttaattgattgatattcttatgaaaacacaaagcaaaataaaaagtagaaagttattctcatatctattccatttacttttttttytgcagaaccaaaaaagcaataataaatttaagtgatgtggttgaatgatattttatttcagttttaaatactagatgtaaatttggtactttctggtggttcttacaaaaatgatcatgctccaagccagaaatagtttgtttctgacaacacattacaagttatttggatacctaatgttatgaaaaaggaagaacattttcttaacctcaaacctactttataaatagggatccaaacttggaattatgagttgctggaatgcattacatcatacatgattgtgaaatctctttctttaatgatttttaagaggggataaacaaccaagtttctggaatggttttggctcattttgccaaaaatccagggcaagactgaatgacctttggagccctactgagtctgtgatagaattcactgaaagttgaaaacttgtttttttctgtgatgcagagcccaatattattctggtccagttcagttatggccttcaactggaaatggatgatattcatacttgtcaatattattcacacttaaattcatttaacacttaaacacctaaattcatgaagtatgtcatatccttgagtcagtatattgcatattaaattcatttaggtcttgtgctatcagatgctagaatgtaaatgactgatttttctattggtttctattggatatttctattggttgcttactaatgaaaaggaaactttcaaagatatatgaattctttaatatttgtgtttgccatcctaatcactatcatgttattttaattttaaagggatgactggaaaccatacaagcttagaagactatactttatttgggcatgcagagatatccagtccttccattggtttgcagacttactctgtatgttgcataacaaggtaacattagggttggttctagttttgcaatttttcaaattaaaaatgttatagcttttatattacaagagcaataaatgctcgccatagaataaaccatagaaattatgcagataagtagcaaggaaagaaataagtctcttaaacataaaaaatcagagataatatctgttagcaattaggcacacatcttttcagatatggatatttgtgagtatatattttaacatagaaacattcatttctatgttttaacatagggtgtttcacattgaaatgtatgcatatggctaaaggtgatgagggaagacaatggagggaattaccagaaggctcctgctgtaacaccttccatcctttgttctgttagcacttacccttgattgccatctttaatactgcaaatcaccagactttttggtatacgatacaaatctcaacaatcccaaattctgtgttttattttttgcagagataaagcaggaatcttttcctatcctacctgtaacatttgacctatttatctttattcacattatacaagtgatacacatatgcatccttgctacaaatatttcaaacaattctgataaagtaaaatcctctcttactaccttccctacctaatctatgtaaacagaggtaactcttaagtgttctataaattatatcatactatctatattgtttatgcaaattcctttattaattgattactatgtcttgactattttttggtattagtgcatatagaactgcctcattgtttttcccggtgccaacaattagagatgatagacccacctgattcttttagagtatttcattgtatagatatatctagcttactgaacaattctctaatgttagatacttttttattacaaagaatgctgaaatggatatcattatatatacctctttgtgcatgcattcactcattcagtcagtcattctatcattcagtgtatatttattaactgctaactatcaatctgaaactattctaggatctgaaacctcatcaggtggcaaaataaaaccaagtttctgatctcatgtggtttacattctaagggggcaagatagacaacaaccaataaatacattgagcatcaggttctgagattcgggttaggacaaagaaggaagggaaagtaggagtaaagcagcrtaaacagtagagagtgtgttactttatattgcacgttcaggaacaaccatcaaacaaaatgctataatgccatttgagcagacttgactgaagtgaatgagcagactagacacatattttggagaaaaaaaatcaagatagagaaacctaacttcataggcaagggctctgaggcagcggtatgcttggtgtcctgaaagaagagaaaggagatctgtgtggatgaagcagagtaagcaagagaaagaatagtaggacaggcaattagagaggtggtatctgtgcttttctgggaagaggtggattatgtaagtcctccagactttatgcaaaataaataaataaaaataaatgaaaacattcgttctggatatgtacctagaagaattaaaagcaggcaattggacagatatttgtatgccaatgccaatagaagcattattcacaatagccaaaggatggaaacaacccaaatattcatcaatagttgaatggataaacaaattatgatatatacgtacaatgcaaaactattcagccttaaaaaggaaggaaattatgacacatagtacatggatgaactttgaagacataatgctaaatgaaatatgccagacacgaaagcacaaatatattatgctgtcacttataggaggtccctagagtagtttaatttgcagaggcaggaagtagaatartctctacatatgcatccttgctaaaaatatttcaaacaattcagatacagtaaaatcctctcaggttgccaaagccttcggggagcgggaaatgagggggttgttgttccatatttttttctagactatttatttttgcaggtatatttttgcctcgtgcatttttgtgcaagagaaaccagagcccattgctgaataagcggaaggcaggaacaggaaaaagtatctatttgcgttgttttatatttgctagcatgcataaattaaatcactattgtctttttttctcaagaaattcatgttcttgatgagtaaactggtacaattttgagactcttaaggaataaaataaggagtatttcagaaagactaatatttgtatagcatttagcatgctaaattttctatctataaagataacagaaaattattccctaccactaccatcatcagacctaattcataccaagaggccagattattaacattagaatctgttatatatatttgtgtgtatgtgtgtgtgtgtattcattttcttatagatattgactatgataagctaggttgtgttaaattctagaatcacatgttagaataggagaaaatctgagtatacccacagaattgtaataagtctattcctttttctgtcctctcagttttggcaagagaacagacctgactatgtcaacatccagctgtacctcagtcaaacagatgggatacaggtatgtggttgatgttatcgtaaattaaacaagcctgttgataatagatttactgtaggagctgtggtggaagaaaattccttcaggtggttcgaacagaagtttcctagaggaaagcctcctttggaatatgtccagaaaagtcatagcttgtccttgaagtcaaccatattatgccttccatttgtcctcacagggagctggggcagactcataaggtctgcccctcccctcttcactatcgcctcaagttcttctgaaattcagactacacatgaacagccttgtgatttctttttattgagggcacgttttatgtggagtgagaagatgagttcatatacaattaagcttatttctagacaaagaaaactaaaaaataatgatagccatcatrcattatttatttactgttttaggaactgtgctaataatttcacatatattagtttatgtaattaaaacagagttaagcagttaatgttattcccattttgcaagtgatgaaactaatatttgaagacaacattgaagagctggactggtgtataaatctaggcatgaatgcattcacaaattttattttagtactttttgtcatacattttcacaatactttgaatataaaatttgaatgttttcagttacctcaaaactaatctaactctaattttcccagtcatatttctaccctacttggtrtgtaaaaagtatttcattttascagtctcatgaagtaagtcaatatcacttttcctcctggtattgcgataattaaggtatgaagcataatttgtatctggttctcagtttgcctgcctgggactcagatacttcctcctttctccgcagttcactctgactcttcacattgatttagatctaatgctctcttaattgcaaacagaagcccgttcacagccatttgttgatagacccaattttggagttctgctrttgtgagctgtcttgtctaggatcatttccccaaatttacgatgacaatttgtagtattttacttacataatgagccaaatatgacaactgtatctgtggtgccaaaatacttcaattgaaatccatgtgctgagcctttttgagaytgaccaattagaattcattctttgtcttacattgcagttctttaaagatgaaacgactaactgaaatctaagaaaattagccatttgtcagaatggcattcaaggagattagttctaacaattagttctaacaattaattcatttaaaaatcaaatttttgtacctttttaccagaatagattttgtttgtttgtttaaaaacaaacacatggaattcaaggagataatggattttaaaagaaaggagaaaggaaacgatattttgaaataattctacgtaataggttgccatttgatacttacattctttatatcacagcaatttggtgggaagccgcagcaccagtagaaacgatgttagagaactaggttacttaactaaatctcgaataatatagtgctttctttttggcagaagataattggagaaaaatatcatgcactgaattcaagactgtttcttggacgtcctcggtggaaacttttgtttgatgaaatagcaaaatataacagagggtaagtactatacctcaaaaatttgatatgtggctaataaattaattaaaatattttcaaataattacatgaagtttgaaaatgaattggcaatgagtttacaaatgacaaattcactgaaacactctttcactatcaaaggaagaagtaaggcaagtatcgtcctacatttctgtaattccaaataattaaagtttggcttagaaatagtctataatgtatttatgaactaaactctcctatctgattataaatttgtataggcctatattaaaaatgggtattcgctcccacagcatatatcaggtgatcctaggaaaagttttcaaaatcatgtttccaaacaaagaactttacaattagttctaacaatgaattcatttaaaaatcacattttttgtacctttttttaccataatgaatatgttttttgtttgtttatttgttttttaaaaaaaccctctgcattgtaatatgccgtctttaaacctagaatatttccaaaaatattatttagaaactataattttataaagaatcttgttcttatggactatgtgtctatgatctgaagaaattactgagaaggaaagctttcattttagggcacagaccagccagcccatttgtcttttgtaaatttatcatagtgcagagcactgatctataagaattctaagaagattttgaaaactatataaccactcacatatttttaggtttacatctaaatagtttcatcataagtttacatagttgtaaaagatgtgatttctaacatatcgcagatattgacattttgtaattaacataatttctttaaacatatccactggaatataaatatagctagatgatattatcatttattacaaaaatacataaacttttcttttagcagttggatgttttacatcattctttttctttcatttaagttgtatttctgtcccattaacccatataattttatcaaaattcaattaattttttacatttgaactaatcatatttttattgctaacctaatcctaatcatacttcagcaaaaagaatgaacataaattaaatatttcattttaaaattttctgtaattataaggctctagtattaatttttacttctggcttgagttatcatttcaattactttatatagttgaacacttcataattttaaaaatatatttttataaacatcaaaaggatatttgattataaatgcacaggccagcttattaaatggatttttttttaaaaatgcaatttaggaaatcatggatgaatataatttattgaagaaatcactgattcaagatgatccctatctctaccttcaaagattttgttttagaaattacagaatggagcctgggaagcaaaatttatgaaggaataatgttacccatgtgattcagattacagtcatgtttaaaacacttttgtagtattagggatgaagatgtaagcatgatttacaaagcagaacttttttgtaatattcagagttgaaatttagaaaaaaatgatttcaacccacttttggctatcttcctttcccatctttctccagtatcacccatcttagatgtgataatcttgtcatactcatctgtctcttgctatgcattgcagacatgttcctctttagtgccatttactgcttctgacaagaatttttttgttgattttcattgtatattgctgaaaactgataggttctttggctgaattcagaaaccaaatccctaaagagcagattatttacagggaaatagattgaggctgttggttcctactgttagttctcaagaagtctcatttgttaggctgtttgtgttttagagccatttgtgtgtgtgtatatatttagtagtttgttctttttctggaaaaaatggaaaacttgtttaagaagagcaaatgtgcaccatctgctgttgacattttgtacaacactttgactttgtgtatttgttctcaggcaggtgccttaaatgtgtttacattttctgaaggatttttatgtagcatacttaggaaaagaatgaatcaacattcttcaggtcttattaactggacaaaggcactgtgtaaatggatggtttcatttacaatgtagcattttgattaacctcatgcacacaaattgctgaaaacatatggagataacagtagggaagacaggcatataagttaagattttaaaatatcatgtgttgggcaacaytttttaactttcagaaaatgattacatatttttaccagtaggcattcagaaaatgattaccagtaggcattaggttagtatactatgtagaatacaaatttaaattgcattaaacactcctggcccagaggtaatgattggtaactcttcgttatgtattcttacagaagcttttgtaagtttgtgtgagagtgtgtgtgtgtgtacttatgaaagtatatgtaaacrtatgtttgtatgtgtgtgtgtgatatatatttaaaatcaaaaccttagttttttaacaaaaattgaatctatgccaagtaattcttcagcttactttgttgttcttgttgttttatttttttcttggctttgctaggaagaaccaactaactttttaatgatgtgcttctttcgatcgtggacaatttctgtgtaattgtacctcaaagtattctagagtatgaataacatgactgctactaccctaattctttatatttagattacttatatttctttatagttaaaaatagtgctgtggtaattatctttgtacatactttctcatgtgagagtattgcagtagattaagatctttgagttggaattgctggctcaacaggtatgcacatttaggtactgctctacaaaaactaaaagtcagaattaatttactttccacatgtgtgtgacagtcattcatttctttgttgctttttttaaattcagaaactgaattatatgatggtattacatgatcatggaaagtgaaggagctttaggagtcaacctgccttcatttttattttacaaatgaagaagctaggacctcaaaatataatgatttatcaaaagccatggttaatgagccagaatgcagatatgaacacaaatgtcctgactgcaagttcattgtgctttacagcaggtcataatcagcttgtcacagataaagagtggcaatcttattttagcatgttccccttagatgggaggtagggaggtgctccaggaaactcccatgtttactaagaatgctgtagcagaatgttaactgtaacactaaaagaattaataactaattttgttgaaatacagatattctaaatattacattgtaaaccatttagtatttaataaactattagaaaattatttattatatctaaccccaacttggtttcctattgtttgtaattaaaatgtatatcctgttttgagctgtgaagtttatgcatgatgcaaagagagaaagaaaagttgaactttatttggctttttgagtagagaattactactctgggattgggtgaaatctttgagattatatctttattttactgccttgtagtgttttcaaacaatacaaattaagaataactaagtttagtctctcacatttactcctgtgaccctgagtcaagtgactcagttctcctggatctgtaatacaacgagtgaataagctctccggagtgattaagttctcattaygtaagattctgcgtttacaagtctacatgaaaaagcaagtatgaacatttatagaactagtttctaatgtctaccccaaaccacattttctacttagtacccgaatgtacctccactcattccatcaaaggtcgtgtagacaggtctccagataattgttggattgcagcattctaatgcaaatttagtacaaatgaattgcaaagattccttgtagaattcgaaaaagaaaaaaaaaagtaagatttcattaagttagtgagagtgacattagggaatcctcaaatcgcacacacacaaaaaggatatcagagagttaagctagttaataattgcaaaagaaaatgttaaagaaacacaaaaatcataatatcctgtgtgatttaaaaataatgattttattattatttattttataattaatacttgattttattatcaagtatttaagaagtgcctttaggaaatctgaaaaacttgccaaactaactctacaattgccctgtcaaagccaagcaagaaaataatggtatcttattgccatcatatggtgttgacagaaagtttatacaaagaaacaaaatgactcaattctcttttcattttaatggaagctacattatgtttcagtagtaatttaaattttattaagtatagcatcatttattttcatatatttttatttcttttgctcattttgggtttaattagcttttcttaatttttactagtttcttaaaatggaaacataggtcattgatttcagactgtttttcttaataaaagtgtttaatgctrtacattttcctctaaacaccacttttgctaaatcttatacattttgatttgttttcattttcatctcgttcaaatatgttttattttttatgttttttctttgacccatgggttatttaaaaatgttgtttaatttccaaaaaygcagaaattttccagatatctttttgttcttaatttctagttcaattgggatttgatctaaaaatgaactccttgtgattctaatcccttaaaatgtattgacacctgttttattgcccagaatatgttcaatcttggtgaatgttccatatgcacttaaaaagaatttgtattccattattgttagatagaacattctacaaatgccaattagttccaataggttgatagtgatgttcaagttttcaataggcttactgaatttctggctgcttgtattaattactgagagaagagtattgaaataattaactataattatgaatttatctgtctttacagttccatcagtgtttgctttatgttgaagctttttagtttcggtgtttaaatcatttacatttaatttaatgaaaatacagttggctttaaatctagcagttcaccattgctttgtacttatctatttsttctttctttgttttattttctttttttaccttgatttgggttgagtattttttataattccacttttttctctaaagttagacatgcctctgtattttttttttcttyttagtaattgctttaggttgttggttcctgaactggattccttagaccagcatcaattggaatcttgttagaaaagcaaattcttgagccctatccaagatctgccaaatcagaaactagggatggggagacctaactatttgtgttctatgaagtctctaaaatgattctgatgaagccaaaattaaagaaacattgttctaagtttacagtatacatcattagcttatcacagcctattttattttttatgtttatgtttatgtttattttttagagacagagtattgctctgttgcccaggccagagtgcagtgacatgatctagactcactgcaaccttgaattcctgggctcaagagctcttcccacctcagtctcctgagtagctggaactacagttgcataccaccatgcttagctaacttttaaaattttttgtaggaatgggatctcactctgttggccaggctggtactttgaataatattgtaacacttcatgtacttccatttcttccatcccttttgctatttttgcattcatcttacatatacatatgttataattctcattattagtattttttgttttaaacatctaacatatattaaaaatattagaaattagacaaaataaatattttatatttactgacagattttactattttggtgtccttctttcctttggttgattcaaatttctatctaattttatattcctacttcttgagtagttttctttagtgtcctttatagtgctggtttgctgacaattctttcagcttttgtttgtatacagtttttattccatcttcatttctgaaaaatcatttttgtttggcataaaatttgcttgatatataatagttgatgtcttgatttatattttagtactttgaagatatcacttcattgccttctgacttacacagtttatgacaaaaagttcactttcattcttatatttcattcttatattttctgttgatgatttgtaatgtgtcttttcccctagtctgtttggttttttgtttttctttttgtcactcgtttttagtattttattatcaattgcctaggtatagtttcctttgtgtttattctccttgagatttaatgagatcttttattttttttttttcttctcccttggtcttctctcatgttggactgcggttacatgtatttttgactagttggtattgtcccacaggccacttatgctctgttcttcttctttttttttttttttttcagtttttsttctctgtgggcttcaatttggatagattctaatgctttttcttcaagtttactttttcttcagcaatgcctrttcttttattamctcatctagtatatttatcatttcaaatattgcattccatctctagaatttatgtttgggccttaaaaatattccatttatcatctcatcatgattatgcttttctttgaatatatgaagcctgtgtatcatcactgtttcaatgaccacgtctgtcgtctctatcattctgagcctgtttctgttgaatgctctttcttcttgtattagtttgctagggctaccatagcaatataccacagactggtggattaaacaacagcaatttattttttcatagttctgggggctggaagtttaagatcaaaatgcaggcaggactggtttcctgagatctctctccttgacttgcagatggctatgttcttgatgcctcttcaggtggctttttctctgtgcatgcacttccctggtgtctctttttgtgttcamattacttcttgtaagtacaccattcagactggattagggcctaccctagtaccttcattttaacttaaattgcctccttaaaagccttatctccagatgcagtcacatcctgaatcactgagggttaggacttcaacatatgggttttggaggggcacacttcagcccataacactcttagttatagttcatactttcttgctttttgaattcctggtacttttttgttgatttctgtacattttaaagtttaaatattaggtgccaaattttgatttatttaatagtgttggacttgttctgacatgcagttaagttactcgggttcagtttgatccttacaaggctcacttttaagatttgttagtggaagttcagagcagccttcagtccaaggctaattttaccaatatcccctctactccttgcaaataaggtggtacatttctgagaatacaacccattgccctgtatttataggactttctattctggtgtgtgtgaatacaaattatttgcagtcctgtgtaaactctggcaattatttgtcctattgatctctgatagctctttactcacattcatgaagtttcttatcgtatatgaactgattattaatcaaagacttgaggattctccgctacgaatctccgaggcgtctttctgtggatctcccttcccttccatattctgctccacaagttccagctgtttggtccttaatgaactccgttctttgtctcctcagtgtaatcaccaatctttgctggagtttcccctgtctgctgcagccagtagattgcctccaggcaataagcaaagagggtgactgtgcttagcttgttttcttcccttttctcagggatcatagttccatgctacctattattcagtgtccgaaaatacttacttcatctattttgtttgcttttttctagatttttaatgtaagagggtagatctactccctattaccccatcatggctgcaagtaaaattatattttcacagcttttagtttcatttttcaaggtaaaaagttttaataactttttttttcagtatttactattaatttttggtaccagttttaatggattcaatgtcttttgttcagcatgagttattctgagataattaagtcatactggattttcccaagatatgagatgaaatattaatcattttgacatcctaggaagaatcaaatgcaaatcaaacttgggaagaaggtcaatttgaaatattatttatttcctgggatttatttagtctatttgttagagatacgtattatttaactactaaaattttatrttagagaataataaaaactgcttggaatttgttaccattattgcagtgcataaataaaaaagaactagatgaatatgtttttcgttttactgtgaatataaattarccacttaaaattattatttcaaattggtaatatcttttttctttccttccttattcatcactgcttttgcaaatccatgtaggaattttagataactatgtgtaaagtgtctaataaaagaagaatgtacattgtccagtgtggactgaacatctattcagaggtcacctgtttagcaattgacatctatcaattactgctcttaatgaggttgctggtttcaccgatgacaagtcatgaaaagactaaggcaaactgataaatctctgcctgataataagcatatttgtgctcataggtacattctttgaattatcctaaattctagaatgaaaagtatgaggtaaataaaatattttcctggttgacatttatatttggaaataattagaaaattgttttcaatatgtaaaatagcaagaaatcractttgttaatactttaaaccatgctcataaagcatacttcttgtcatgttctgcctaattttgcacctgattttccattttctccgctcttgttctaggaaaacagttggtgttttctgttgtggacccaattcactatcyaagactcttcataaactgagaaaccagaacaactcatatgggacgagatttgaatacaataaagagtctttcagctgaaaacttttgccatgaagcaggactctaaagaaggaatgagtgcaatttctaagactttggaactcagcggaatcagacagckgtgttatgccaaagaatagtaaggttttctaatttatgattatttaaaatggaaatgtgagaatctggcaagatgaccggtcacattacatgtttaatctggaaaccaaagagaccctgaagaatatttgatgtgatgattcacttttcagttctcaaattaaaagaaaactattagatgcacactgttgatttttatggtggattcaagaaccccctagtgaggagctgaacttgctcagtctaaggctgattgtcgtgttcctctttaaattgtttttggttgaacaaatgcaagattgaacaaaattaaaaattcattgaagctctaattccattttctatgttgtgtataaatagagtagctttaatttgcaagcactccaggcaaatatattagatgtttgaaaacacagcacaagactctgtatttatacgggtactttgtgtcaatatctaatcgtctccactacttatgctaatacctctatttgatatctgaagactatatgctaactgaaccttcctcaaacgttgttatagtatctatttttatatattttttctttttattcctctctctagggaaatatgccttcccttagcatgcattagacataatgatttaataggttcctttcatctttatttaaatctatcacaattgcatggtaatgaaaatattcctactataaattataaagggatatattatatatatacacatatactgataactttttccttttttcagcatttttgtctctgttattattattgtttttttcccaggtagggtttgtcttaggctgtagcctctaaggatagttagttaatttgcactttgagaacaaaggacatcatgtgtgtcagtagggactgaatataagatttatctcctttgtcacacattggtttatgatggagatattgaaagtctagtcacattcatgaacagtaaaacctgtattttaccttttaactaagaggaaatatgatattcttattcaaacttaagtttagaatccagaatattacagttgcactttttggtatcctgagtttccatagggaactattgggtttaaagttactgttggaactacactgtgtgatcttataaacttatgttccctggctatcatattcttggctcagaacaatattccccattactatcttaagaattaaggcattcatggctcacacctgtaatcccggcactttaggaggccaaggtgggtggatcacgaggtcagtgttcaagaccagcctgaccaagttggtgaaaccccatcactactaaaaatacaaaaattaggcgggtgtggtcgtgggcgcctataatcccagctactcgggagactgaggcagagaatcgcttgaacccggtgggcagaggttgcagtgagccaagattgcaccactgcgctccagcctgggtgacagagcaagattccatctcaaaaaaaaaaaaaaaaaaaaaaaaagaattaaaacattcatacagttaagtgattttgtttagtagtcagctatcaattgctatcaaatataacacattgctgaaatcagcagtgtgacttaccttgccattgttaaaatgttacatgaaacataacattatagatgctaaggcctttttttgctataattcaccaatagcaatcaagcatgctaacccatactgaatgatatttacttgtagatatttcttcctttccttgaaattctcctttctgtggaaagaagatgaaccccaaaaagtgacaggaaatgtggaatgctcatgcagatttagctctgaaggcatatttaataactagtatgtcttgacaacagtctttagattaaaaagaattttcatgaaaacatttaacagaaagaactagtgaaaagaaacttcgagttagtccaggcttaatgtgcaatactgactctatactgctcatatgtttatgtgattatattaacagacctaatttcattaaaacaggtagaagatttttcaaaagaaagatgatgtttcaaagcttgtctgccattctagatgagcctccttgcttatttaagttccagtaggtgttcaaatgttaaatgacaaacataggtcatctttgcttctgcagggcttcatcttgcatgtttaagagaactttgttttatttttgagggattatttctctggggatcattcttatattacaagccttacatcactaattttagtagcaataaatgttaaaattgaaatggtgtccttgaaatttctataagctcactataactttggaactaataaagcagcaacatttgttcacaagatgatgcaagtttaggaaacacactctgcttgtcaggaattagcatttgcaccggccgtggtggctcacacctgtaatcccagcactttgggaggccgaggcaggcagatcgcttgaggtcaggagttgaagaccaacctggccaacatggtgaaaccccatctctactaaaaatacaaaaattagccagacatggtggtgggtgcctatagtcccagctactcgggaggctgaggcacgagaatcacttgaactggggaggcaaggccgaggttgcagtgagctgagattgtgccactgcactccaaccctgccctggcaacagagtgagactctgtctcaaaaaaaaaaaaaaaaaaaaaaaaaaaggaattagcatttgagtgcacactagcatgagaagccttaggaatctgagttctggaactatcaatgttgttgcaggctaatggtgtgactaagtcaaattacttctcatacatagactaaaatgtgtcattttattaatttttggatagtgtatccttttgagaatctgattaaaatgtttagtatgacatacagcacatccctacaattttggggaacctacaaacacactccagaaagaagcacacctgtttaagaacctctaaacaaaatggctattgctataggtctttctactcatacacctcttttctttttctgtctttttttttttttttcctgagacagggtcttccagccacactggcatgcagtgatgtgatctcagttcactgcaacctccacctcctgaactgaggtgatcctcccatctcagcctaccaagtaactgggactacaggcacacgccaccaatttttgtatttttagtagagacaggggtttcacaatgttgaccaggctggtctcaaactcccgggcttaagtgattctcccaccttggcctctcaaagtgctgggattacaggtgtgagccaccacgcctggcccaaactaccaatttctataggattataccaagacatttattttgtggacaagagcattctctttatatgtttccaaacagagaattcaataggactttccattggtttttaatcttgctgtatcaccctgatttatgcaagggaaggctataatttttaaatataaataattctaaaaaactatgattcatacacacacacttgtacatatatactacataaatccatacatatagatagatacaattgggacttcatttgcttttttaaaaatttcaagttaaaagagaaatgcttgatagttcttcattcagtgacgttaaaatgccagttgggtgactgtggtagtataggcatttaaaacaacagcataaaagcaatgtagacaaggaacaggctgaatcaatttaatctacacagccatgtgatttataaacccacaaatcagtgtttacttggagcattcacagcgggtgatggatttaaattatgagccgttgttaaagagattcactggaggcaattggactgttgtcattaacagataatgctagtgatgaagaatattcattataaaaaagagaagacattttaagaaaaaaaggtttgtttcttaaggatggttatactagacaaaaagtgagttttctaaacaaaccaaggggaacatttttaagttgctgttcactttaagaagtttccttttcttgtgctagctatgactttttccatatacagttatattgttgaatataaaatactgaaggtaggagtagtcttattttacgattgggaaaactaaggcctaaaattgctacaagtcatctattgagtttgtagcagacctgagactggaattcagttatttttatttatttatttatttatttatttatttatttatttatttatttatgtattttgagacagagtctcgcagtgtcgcccaggctggagtgcagtggcgcgatgatctcggctcactgtaagctccgcctcccaggtccacgccattctcctgcctcagcctcccgagtagctgggactacaggctcccaccagcacgcccggctaattttttgtacttttttttagtagagatggggtttcaccgtgttagccaggatggtctccatctcccgaccttgtgatccgcccgtctcggcctcctaaagttctgggattactggcgtcagccactgtgcccgtcctggagttcaatttttttaatctcttctattgaaaggctcttcacctccccatgaaatcttcatctaataaaaatatcttgcgctgtgagtttgaatctccctgttaaaccctgtttagtgccatgtggaaaatatgatactgagtgttaattccagattctgattcagaaaactatactcttcttacgaatctatcttcttattctaaatttgttagtctagtatgttttgcctattaaaaaccattttcatatacctgtttttaagtatgataattgtggtaaagggactgtgttctccagagttttgcattggagaaatctgtaatagtgtagtttctagaaaatgctaataatataattttaaattcaagttgatagatgaaaatcataacttcaccagctttctaaccacccaggaaaaactggtgtcaaaacaaatgactattgttcactactcacatgaccataactcactttttgcccaggagaaaagagtcagcattttgtaaactagtgagacaggaaataaatgaaatcaaatgtactgagattggcatttacttcagccacctcaggacaatgagaactcactgttatttctcttctaaatatcctctctattgcgctaactttattgttctattctgtaagactctttattctattctatactattatattctttattctcaaaggacagaattgcaaagactagctaaactaagttttctaaagagaaaaagcagaaaacatctaatacttaggaaagaggggtttattataagataagagaaaaaaaggccatgtggatcttttataaaaattagcagaaagtttaatgttgctttagaacggagaccaacaacctgatgcaaagtgttaaaattcacattttggaactaggaagggcaagaaatgtctcataggaggaataaaaattgtcagggaaagcaaaatcatttaacacatcaggacataataatgtttttccttttataactcaaaagatgcttaaatacatagtaaactggctatttctctggtttggaagaatgtgaaagaatgtgatgtttggctagattttaaggaacttttcacattttcactgacattagaattttagcaagaaactttatcttagattaaaattacatctaggttctttaagaaataaagcattgacgagctgctatttgacctagagaagaccccgacacttagatgagagccagcactgcaaaatactctaatatacatagcaataaagaaggccaggatgccatgcattgctttagtcacatacacaatgcattaaaattctgtcattgcaaggtcatatttcacaaccgttatcctttcacccagggaatgaaaaccttcttaacaattgtagacattgagatacacacattgtctctgttgtaacataaaagtatatatatttacttataacagcatattcgcttgaacctagtatcaatttagtatgactatgtaattcattttagtggtgagaaatatccacagtgcataagatgggagctttgcttacttgcttaaaaatttactgcagccaacacattggctaaagacaaagctgttaaattttctaggtttctatctgcagctgaacctcaaaggaatgtaaaataccttaccgcatgtatgttagaacatgacctgggacataccctacactctgtgattggatgtgctgcacagtttattctttaggttcccagggactaacaggtttaggaaaatacaatctcttcagtcagtgtggcatttttaatggcagaactgggtgccr

SEQ ID NO: 94386 - DNA, 75521 bp, Homo sapiens
  misc_feature (1)...(75521): n = A,T,C or G
cgtcatatccccattcaccatccctgtagggcccctatcaaaatcaactggaccgtagcaaatgacagtaactgtcttaaacttaatcaagtggtagccccagtagtagatgtgctgtcttcagtgggctttggcacttggtatggagcacttattctggaaaattcattcttctttatccccatcaataaaacagtctgcccttacgtggtcgggatggcacaatccactagacttccccaggctgtgtaaccttcttctctctgtcacatgtgatctgcaggtacagtgctcatccagaccttccacacacatcatgctgttccgccatattgatgttgtcatatcagttagacctggtgccgtaggaagacactcaggaagacacatgtgcaccagatgggagatacaccctatgaagattcaggagcttcaacactgaagcttttagaagtcctgtagtctgtggcatgccaagacagcgattctaagataaaggacaagttgttgccctttgcggctcctaccaagaaaaaggcacagcatagagtgaacctctttggattttataggtggcacagacttcacataggagtacagatccaacccattctgggagtaacttgaaaagctgccaatttcaggtaggctcagaggagaaagctctgcaacagatccaggctacaggttgccctcccactccagctgcatgacccagcaaatgggatggtgccagagggacctgtgatgaatgaggacactgttgcagggtggcaggtggtttctggcaagccccataggagagctattctgcagacttattagagtttgagagcatggatatgcctctctaaaaacagctcctggcttgaaccctgatagacactgagcttctgatcattagataccaaatggctgtgtgactacagctgcccattacaaggtgggttttatcagagtcactgagggataaggtcaggtgggcagagcaacaatccaccaaatgatgggaaatgttatacacctgagagggtgagttggcctgaggtacaaggatacctggagccttggtcagtaggaaatgtcctgggattggaaagagtacaatggaaagaccagaggcaacgaaagcctaagaaaggagcttacttatcccttttcagtccggagattggaaagaggatgatggaaagaccagaggcaaagaagtctgaggatggacccatgctggtggcacaaactgagcacaccatagtgcctcgagttaatgctcatcagagaatgtccacctgagcctctccttggtcaccagtgctggtgcaatgctcctgcaacagattatacaagaagagaccattcatgaacccgacaacgtggtctccctctcaccaaggccgattcagtcactattgctgctggatagccagcctgtctatagctaaaattaaaaagagtgacaacgccaaatgggagcacacatggcactagcactttagtagaaggtctgaccacttcttaaaagactaaacactcctgggtgtttactcaagagaaccgaaagcgtcagtccataaaaacatgaacgagaatttcagaatagctttattcgtaaaggctccaaactggaaacagtgtggtgctatcaactgaattgcatcccccccaaattcatatgttgaaatcctgacccctagtaccttagaatggtactgactgtgtttaaagataaggcctttaaagaggcagttaagttaaaatgaggttgttagagtgagccttaatacaatcggattggtgcccttttaagaagaggacattacaacacccagagagagaaccccacgggtgtgtgcacacctaagaaagagcatgtgaggacacagcaagaaggtggccaactgcaagccaaggagagagtcctcagaggaatccaaccccactggcagcttaatcttggacttgtagcctccagagctatgagaaattaatttcaggccaggttcaatgactcacgcctgtaatcccagcactttaggaggccaaggtgggcagattataaggtcaggagttcaagaccagcctggcatggtggccaacatggtgaaaccccatctctactaaaaatacaaagattgcccatgtctataatcccagctactcgggaggctgaaggagaagaattgcttgaacccagaaggcagaggttgcagtgagctgagatcgcgcctctgcactccagtctgggtgacagaacgagagactctgtctacaaaaaaaaaaaaaaaaaaaaaaaattaattttggttgttaaaccaccaagcctttagtactttgttatggcagcctgagcaaactaaactacccaggtattcatgaccaaaataatgaaaaaacaaatggtatggtatgattttaatgataaaaatctactcaccaataaaaagtaaactactgatacatgaaacaataagtctcaaaaatattatgctgaatgaaagaaaccttacacaaggtttcctaccacttatcatatcctttcagttacatgaaattctatagcaggcaaaactaatatatggtaaataaaatcagaatagtgcttgcttctggggccagatggtaatgggcactgacagcagagaaggaccgtgtaggaactttctaggttctgtaatttttaaaagggttcagttacacaggagtatgggcttgttagcctgagaaacagaaccagtaagagaaacacatgaagaaatgtattgccaggagttggctggtgcacaacggtaggggctggcaaggcaagtctgaaatcggtagggcaagccctaaggaagggctgttcatgactcgttttcctttcccttgggaaaaatcttggaaataaaaattctatggtgtagctgctttataaaacagtctggcaattactcaaaaaattaaacctggagttaccacatgcaactctactcctatgtgtatactcaagagaactgaaaacttatgtccacacagaaatgtgtacaggaatattcatagcagtactatttataacacccccaaagtggaaaccagctaaatattcaccagctgatgaatagataaataaaatggggtattttcaaacaacagctcattattcaggcataaaaaggaatgaaatactgacaaatgccacaaaatggatgaaaggtgaattgtacgagatgtaatatctcaattaaaaaataaagttccaggccgggtgaggtggctcatgcctgtaatctcagcactgaggctgaggggagtggatcacgaggtcaggagttcgagaccagcctggccaacatggcgaaaccccatctctactaaatatgcaaaaattagctgagcgcagtggcgtgcacctgtagtcccagctacttgagaggctgaggcaggagaatggcaagaacccgggaggcggagcttgcagtgaactgagatcttgccactgcactccagcctgggcgacagagcgagactctgtctcaaaaaaagttcgggcacagtagatcatgcctgtaattgcagcactttgggaggccaaggtgggaggatagcttgagcccaggaattcgagaccagcctgagcaacatagcgaggtcttgcctttacgaaaactaatataaaataaaaaaattagctgggtgtggtggcacattcctgcagtcccagccacttaagaggttgaggcaggaagattgcttcagcctgagaggtcaaggctgcagtgtgccatgatcacaccagcagtggtgtgatccagcctgggcaacagagcaagactctgtctcaaatatataaataaaaatataaataaataaacacaatttgaactattgtccttgaatacggtatatgtgcacctttctcagaaagaaagatttcagtttgttacaccaagcaaactgtgtaatggttgcaaaactcccacaataaaatctttgtccaaaagttgtgttgactcactttttttccctcgtgttttgaggatacgacatacatacagtgaagtatatacactttcagtgaccagcccaatgcacgtttgtacaagtaggctccgtgaagccttcactcccccagatcaagaagacccagaacattccagcactccaaaaggctctctcctgctccctctcagtaaccagcaatcctgttctggctcccaaacacagctacttgttaccgatagatagataaactgctctatcactttagagtagctttgccttttcttgctcccttccacatgctgtaggaatttgggttgtgacctcagcaagccctcgttctgcagaaacttcacagaaatagaatcgcgctctcccatgagctgcttcggtctcacgccatgtctgcgagatgcatccatgttgtatgcagctgcagtctggtctttttcactgctggtttgcattgcattatatgaatatgccacagtgggtccattctactacagatggacatttgggttttttccagtttgaggctaatatgaataaaagcttacttttatattattaatgggcaagaaggaccttcccatcgagcctgcagaaaggagactcatgagtttggcttggacgtcattaatgcccgtccgtctgccccaggaggtcattatagcccattatgttgttaccgagcaaaagaggtcactgacccgtgcgctagaagccaataaatactaagacactgggtttcagagaaaagaaaagcttttcattgcaaattgaccaacacggagacaggagtccagctcaaatctgtctcgctgtgctgcctttaaggaaataattttattagaaaagggttagagggtgggttccgggattagcaggagatcggtggaaggaaagaggaggtctggcaagtcctcagacatgcgcagttatctcttcatgcttcctcatgggtgctgtgtgcaaatcaaattccggggcagttaatacgaaacatgcgtggaaattcaggctgtgatatcagcaagctctttctgcagaaactccagttggccatattgggtccaactgatttctgccagttttgttatcacttgtcacagtttcagtatctaccccaggaggtcacgattgcccattgtgtctgtcccaggagaggttgcgagaggttcccacccaccccccttccactcacagaccctgaagcagagcttgtctggtttcaggcaaaacagagtcagcatcctgaagcggggagggtcaagtctcctgggatgcgttcagaagaaatttcacaagcatttggctgaacttgtgtactgacatctaaatgttgagtaacgtagagtaaagaattaaaaggcaatcaaataaccctttggctcatctttaagtttcttcatgttttctgaaagcttgttctttttcttaagtttatttcaaaaatgctaaaaattagccgggcgcggtggctcacgcctgtaatcccagcactttgggaggccgagtcgggccgatcacgaggtccggagatggagaccatcctggctaacacggtgaaaccccatctctactaaaaatacaaaaaattagccgggcgtggtggtgggcgcctgtagtcccagctactccggaggctgagacaggagaatggcgtgaacccgggaggcggagcttgcagtgagcggagatcgcagagattgcagagattgcaccactgcactccatcctgggggacagagcgagactccatctcaaaaataaataaataaataaataaataaataaataaataaatataatataaaaagctaaaaattaggccttgcctagagaagagagtcaccctggattctagcctcacctaatatgaggctttccctattttctcagctgaggggtaaggacccttaggaccttggaactcctggattccacctgctggttggagcttacaggcaggggcccctgtggggctgtgacgccctgtgtgatgtcatcaggctttgtgaggsggactgtactgccctttgagtactactgtgtggcccsgcaacccagcacaaccaggtatctgcttggaacccagccaccataaagcctgctagctaaaaaaaattttacatctctcagttcattcggcacagacccctgcctcattcacctgtgactctgcttggaaaattcatcagttacaaagcagccaatgcaattatctcaagggtaggtgaagtgagccccatgtgctagaagtgggaacaaagatggggggaaacgtctttcactttgaatcagcggaagcagtacatcaaatcactgcgtcttraaggaggtgctagctctggggattaggtttaagaagatttattttattttttaaagaaggagtagcctccwagctggttacaccaccctaaacgtggactgggcattgtaatggctttagttcatgaaaaatagggaaacttttcattacatgtgtctttatgctggtaatgtttatacagtgactgtattacttatttgaaaaaaatagggaaataaaggcccttagcagtgtcataaagtcctagatcttatatggagatcagtattaagatggtcctaggaaagctaggggttaaaaatgctgattataaactgggcacggcagctggcatctgtaattccagctcctgggaggctaaggtggcaggaccatgtgagtccaggagttcaagatcagcttggatgaaagagtgagactctgtctcgagaaaaaaaaaaaaaaaggaaaaaaagtgttgattattgacagaagaattagttgtgatattatctaaagcatggtcatgttttcctgattcaatagactcgtatttttttaaaaacttggccaggcatggtagctcatgcctgtaatcccagcacttttgggggccaaggcagaaggatcacttgagctcaggagtttgagaccagcctgggcaacatagcaagacctcatctctatttaaaaaaaaaaaaaaaaacaggcgtggtggcactmaccagcctgtagtaccagctacttgggaggctgaaagaggaggatcatttgagcctgggaagtcaaggctgcagtgagctgtaattgggccactgcaccccaacctgggcarcagagcgagaccctgtctcaaaaaaaaaaaagaaaagaaaaaawaaaagaaagaaactcaatgactgtaaatgcagatttaggctagggttttggcgtgttggygggggcatgttggtgactattagctgcattcttttctctacaggattcttttgatcatctgctaagtctctttaatgcacttaaaattttatttgctgtacatatgaatcctcrttgaaatatattttacaaattctgtgcttttctagcattgaattctgcatcttttagtgaagaaaataactgaacatggttttcttctgaagacacaaagtccaaaggccaatcacacacctcttacatcgatctcttgataggaggggttttctgtgttttgtgggagtatagggggtgggttgggaggtgaggtgcttgtcacagagaaaacataatataagaactcatattagtaaaataagaaaattaaggaggttggggatatgttcataagtgttcacgtctaaagagaattccccccaagttttcctgatgtattagaatctttctagagaataatttatttttcagtaataatcctattgagacaggattctttcaatgtcactttgccagctggacatttcccggctggcagcacccgtccttgggcctcacttggctctaggctcacctctgggcttgctctccccactggacgcagcaggctgcactcggctggcrctaccgacctagattctgcacacacacaccactctgtgcttagcccatggctggtctgagtgtgccacaaccatcttccaccttgggcaccagcatctggatgagggggaacatggtggtgcctgaaaactcagagatgccaaccgccacagagccccaaggggtgttacagctctcacctggggagtcccaaggtstgagcccccaaggactgttacagctctctstctccttcctgccacctgcagcatagtgaaacggggttggggaggggggtgtgttatggcttgtttggttgcrgcaaacagtgcaaggggtgtgttgcagctcatttgtgctacagctcattctgtcccaccatcctgctccagcccactggtgctcctaggctggcccagccctaccaccacttccyatkatgtggggtggccatctggcactggcagaaggtgggaaggttacagtgttacagctccttttgcacccatcattcggtgggtcccaggtcctkgtcctgcrtccaagaagaatgaggttacacagacactggagagtcagcaaggcagagaagggttttattgagcaacagaacagctcttgacacaagaggggatccaaagtgggtagccctctgtgtgagagggggctcaaagatggatagtcccarcatggggctgagtctggrgttttcatgggctcagaatggggaagtacatgctggaaagagcaccagtccttccaggtgggcctggaaataacaccrtttgattggctacaaggcattgaggaagttctcactccggtcgtggactctggcaactcagttttcaggctttaagctgtctttggcttgaaggttggatttcactggggacctgcccctctctgcctaggaatttgtctgtctcctgttgctatcactatcatattagtgcatgtgtttattttgtatattacatttggttgtctccccttaccttttttttttaactagtttctaattgcttttggtttttggagaaagttgacatggaagttaactttagataactttaaaatttagatatttaatagggagatatggtggtaatgtaaattaaaacagctttattctcttttcaggcgtcctaattcgccattttccctagttagaagttgccttcttctctttatatatttgatacttttaattggcataatcaaatatttcatttgtaaagtgctatttattcaatcaatgaatctctattttgcacccaggatcttggccagagtgttaaagcctgtgtcctgggggatattcctgttgtaataaatgctcccaaatcaaaatttacattccccctcccttaatctgtatcctctggactcagtcccatatatacaccctgcgtgcctgctggttcaagatggctgattctgcagctcctttgggaacactctccttcttcccttagcakrgtagcastttcccacacaggctaagttgtaatgtgaccctacttattgatctggtggccaggagggtactggggggaaggtcctgaggcagggcacgtgttgccttgcaaagcagaggaggagagctagccttgttggggagcagtgggccatttctgtaggctcagagggttcctgtggacctgggccttccaggtctctggcgtgtctctacccagacatccccatcccacgtgtcagagccttcctccttccctggatagaagaccagccaggcttgagaattcaaccttccctggagttctgctgcccmgataatcaggccctgggcatgatcctcagctctccccgcccttsggttgtaggaaatgagatccttcatatgctaacaagggcctctgactctgttaatttgctttaaattggtgattaccaccctcagccttccttgcctttttcagatgcaaccatggcatccggcaatagccatctaccttgcaatatttataattactcctccctgttcctcagtcaagcgcaccaaccagaaaattcctttccacctatattccatcctgattcacagccagtgagattttaacaagcacatatcagccacagtatgccaggggctttcagaacaccacctttccaccagcaatgggatgctcagggccagccgcctggagggtggcttagccctaaaatcccctttacagcccattttcctggaccattagcaaccatcatactaggtcaagttccccaggaagaagactattcgactaagatttgcatggaaaactttattcggagcagatctggggacaaacactgcaaggcagggacacaagtaggttcaatcagaggaagagsctagatggcagtgcagcttccagaagagactccacccaccccacaggcagcttgcrctctccagagtccccccagatagacaagggagctgcacccattgaccagtctttgaatgcgagatccccagrgagggggacacttgggcaaagcggcttgcctcggtcatgagctgtgagcctgtggcagctacttctcatggcagctgggagaatgggtgtctctgccctgaaggcggtgtctcggtagcgcagcacagcatcccatgtagaagacatcttgtccaggtgagttcaagtctctttgaggggacaatgtcctattctggtgctttgatgccatggaattgctctggataccaagttctgtcaagcagcgtgggtttcctactgaagctacaatgtatatgcaagccagttcctgggacatgcctaaggtcaaaaccgtagaagtcaaagccaagcatgggggcgtgtgcctatagctccagcactttgggaggccaaagacggaggatcacttgaagccaggagttcgaggctgcagtgagctatgatcatgccaactgcactccagcctgggtgacagagtgagacaccaactcacaaacaaaacaaagctgtgcacagtggctcacacctgtaatcccagcactttgggattaatcccttgggaggccaaggcaggcagattgcttgagctcaggagttcgaaaaccagcctgggtaacatggcaaaacgccaactctacaaaaaaaaaatacaaaaactagccgggtgtggtggtgggcacccgtagtcccaactacctgggagcctgaggtgggaggatcrcttgagccagggaggtaggtcaaggctgyagtgagccaagattgcaccactgcactccggcctgggtgacagagctagaccctttctcaaaacaaaactgtagaagccaaattctgttctcaagttagagagaggacaaaaatgggagacaatagtaaatattcaaaggccaagaggatacttgagcaaatcagagtgtgggtcgaaggaggacagacgctgacggtcctagagcttggacttacctgcagggcctaaggctcatttcagggattaccttttccaggtgcagggatgacatgtgatggaaaggggcagggtccaggggacaagtggctgatgtattcttgtgtttaccagtatccatgctgtttgatatggtttgcatttctaatctgtttagaaaatctttattttaaaaatatttttcagtgtaatgcatacatataaaaaataaaataaaaacaaaatcttataaagaaaatcagcaggtccctgcccagttcctgcccagcccccagttcaactccctcttacaatcacttttgactcttcaatctgtttcttatgatagttaccttctttttttttttttttttaatggartctctcgctctgttgcccaggctggagtgcagtggtgtgatctcggctcactgcaacctccamctcccrggttgaagcgattctcctgcctcagcctcctgagtagctgagataacaggcgcatgccaccacacacagctaatttttgtattttcagtagagacagggttttaccatgttggtcaggctggtcttgaactcctgacctcgtgatccacccacctcagcttcccaaagtgctgggattacagacctgagccacagagcccagcccaccttcatattttaaacggagttcttagacttctattttttwaattaattttatacatcaacttcatttttattacatgacctccatttcttctagtttatttttccttaaaaaagtctgtgtgatttttttttctttttttttttttttttttttggttaatgcagtaatcagtgtttgcatcttatcactctgtaaatactgttccttaatttttaccatcagctgtgtcatccacctaaacttctccatcccacatactcttcctctcaacggggttgcattcaatgtcctgggtccatgtctgggttttktttgtttgtttgttggtttaatagacagagtcttgctctgtctcccagactggagtgcagtggcatgatctcagctcactgcaacctccacctcccgggttcacacaattctcttcctccagcctcccargtagctgggattacaggagcccaccaccatgcccagctaatttttctatttttagtagagacaagctttcaccatgttggccagtctggtctcgaactcctgacctcaagtgatccacccacctcggcctcccaaagtgctgggattccaggagtgagccaccatgcccggcccatgtcttctttatttgctttttcctttattgccatttgcaatccacaggtagtttcccaaaaaaaagaatacatggagagtaatttttgtgagccctttacatagctraaaatatttttattccactcccaagcttgattaaattttgactagatcaagaattgatgcataaaatttcaagctgttttatagtttcacaatccagtgttgctgttgagaagtttgatgtcattttgacactctttctagtctcattcattatatggggcattctgtgggcccctttagttctgcaaatgtttgtatgattgcgttgacaatttcctctccatttttctctcatcactttgtggaactcattactggatagatgttctttctgccttctagaatgaaacaccacaggtctcaactttctcttaggcttccctctgccattttcttgtgcatttcaaaatattcctttcccaccatttttctaatgatttttattatgtatttattttgagacggagtctcactgtgttgcccaggctgaagtgcagtggcacaatctaggctcactgcaatctcggcctcccgggttcaagccattctcgtgcctcagcctccagagtagctgggattatagacgtgggcaatcatgcccagctaatctttgtatttttagtagagatggggtctcaccatgttggccaggctggtctccaactcctcacctcaagtgatccgcccacctcggcctctgraagtgctgggattacaggcatgagccactgcgcctggccatttattctaatttttaaatgtgaacaatcrtgttttaaattgcagcttcccctttttattctctcaatgctcctttttgatagcctgttcctctggttgtatgactgtagcaccttctttgatctctctgagcaaccaacatcaatgttttgatattttcaaagttctcatttctttcttcccctttctggttctatttgcattttctttccttctggagtctttcctcaaatgtctcaggcaatccttggcagctgtaggagtcagctccggctgccataaccaagtccaacagactgggaggcttggccaactctgattttcctacagttctggaggctggagtcggcatccagctgccggcaggtttggtttccctgaggcctgtcttcagggcttgcaggtggttgccttcgcgctgtgccctcaccggtcttttctctgtgcaagcacctgcctggggactcttcctcttcccataaggacactggtcctattggaattgggcccaccctgtgacctcatataaccataattacctctttaaaagctctgtctccaaatgcagtcgcactggggcttggtgcttccacatgtgagttgcagggggacacagttccgttcattgcagcattcgattctgatatggtttggttgtgtccccacccaaatctcatcttgaattcccacgtgctgtgtgaggaacccaggggtaggtcattgaatcatgggggcaggtctttcccatgttgttctcgtgagagtgagtaagtctcacgagatctgatggttctatcagggggaatttccctgcacaaactctctctttgcctgctgccatccatggtgtggcttgctcctccttgccttccagcctgattgtgaggcctccccagccacgtggaactgtaartccattaaaccccttttcctgtataaattacccagcctcgggtatcttyatcagtgtcgtgaaaacagactaatactgattccaatcccaaagtgagatgccaaccagctgattggaatagctgagtgttgggccaaccttggccacaggtgtgctgtcttcagggggacgacccagggagccgcctgccttattggaagctcttacatttcagcatgtggaggtcttttctccaggccctgtcttctcatcccagaacaattctatcaatcccacctcagacgtagcaacctggctgccgggatcctgtgtgggaggaagggaagaagacagatggacccagacactccacatccacatattctaagtgacactcttggttttagccccaagttttcctttgtagaggctcagcctctaccagtctacttctccaaagaagaaaccactctgactcctgcctgggttttgctgtgcagggctgggcraagagagctgactattctgaatactaacacgtggctttccccaagcccaaagccatgtgtccactgactcaccaggggcatccaagccccaagctgctccagggttagcagccttgtttccacatcagagtcctctgtctttccaaattgttaccacacgtccaataacgttctcgcctccagacgtgttaaaatctcatgtgcattgatgttccctctaccgctctcttttcccatgagagtttttagctttattcttattcagttgagtcaagagggagagaagacacacacacattcaatctatcatctttaaaggaaacctcgcaagactttcttctttctttttaaaataaattacaatttcaaacagaaggaaaatatagagaaaaatatcatgagcactctgtgttctcatttatcaagctcaatcaaatcacatcattttgccacattttcttcagagcttaattaaaaaatcagcgttaacagtaggaggctggacatggtggctcacacctgtaatcccaacactttgtgaggctaaggcggcagaattgcttgagcccaggagttcaaggccagcctgggcaacatagtgagaccttgtctatacaaaaaaataataataataataattagccacgcgtggtggcatgtgcctgtggtctcagctattcaggaagctgaggtaggaagatcacttgagcccagaaaatcaaggctgcagtgagccatgtttgtgccactgcactctagcctgggtgaggggagtgagacccagtctcaaaaaaaagggatacagtaggagttctttattctcctccccccaaccatggaggtaatcactgttatgtaaattcactattatatatatatataatcactattatgtaaatttgggtacatcattcacatgcatggtttttttcccatgcatttgctacatattggtgtacccataaataattgcactgcttttcatgttttccaaatttatatcacaccctacttgctttttgcacatgatgttttttagactttacagcagtagtacacatagctccagctgattcatttccatcattgaaagagtagcctcactttattagttctcctgttgagggaaacttcagttgcatctagttttcttttgttcttttctttctttttttttttttgtttgagacggagtttcattcttgttgcccaggctggagtgcagtggtgcgatcttggctcactgcaacctccgcttcccaggtttaagcgattttcctgcctcagcctcctgagtagctgggattacaggtgcctgccacaatgcccggctaattttttgtatttttagtagagacaggatttcaccatattggccaagctggtctcgaactcctgacctcaggtgatccacctgcctcggcctcccaaaatactgggattacaggcatgagccaccacacccggccagtgtctagttttcactatgacaaacattacttcaataaacattcttgtacctgtctcatgatacatctctttagatgagagctgcaacttatgagtctctttaggatatatccctaaggatggaattgctttgtcatatcatatacatatcttcaacatgactagatattgccaaaacgattgtgccattgtgccatycatcagtggtgggccacagtactcactgctccctttatttccagcatgtgattgtgtgtttttacatttttaacaagctgcttgaagtcagatcagattttttagagatccatactatcactccaaggtagactggatctggataagggatgagtaagccttctttgatggtatttcctatatgtacacgagtatgggccaatgacttgaaatgacaccgtatgttttataagcatgttatacattttgatgttaaataatcttaggaatatcagttttaggaatttgtgctaatagaaataaggacacactttatgtatatgataagggccatcaacgtgattgtttttaaaacactaaaaatggaatttaarccaagtaggtgatctacaaaccattggaatatctaatgctgctcctcttaaatcattctgatttaggaaattgaaaaatggacctttgaaaatgctagatttacaatgagaaatgccataattcaaggtttattctatgggtccttgacatttgggatctggacagctctgttattcatatatttgcaccataatcatgtgagcagctggcagaagaaaagccaggagcctctgtcagcttggtcccctggaaaaaaagtgcatcagcaaattatctatggctcagagcaaataccaaaacctcatgtaatagtcaaaaggactgatgaagataaagcaaagtctatgttaggtaagtatttggatttttttccgttagccatttgaaggggaaaatgtacaacaatatttaatatttggaagagtacgagactatcctttttaaagcaatttactttttaagatataaattattttatatagtgtatatatctatacatagaaaataataaaacaagtatgcatgtatttaccacttaaatttatcattttaaatatcatttggctatatttgcttcagagagctttctgtttttccaagaaataagttgtaatagtacagtaaaaactscacctccctcccgtccccacgccaccctcagaggttgtctgacctgaattgatgggtgtctttctcatgtatgtctttccacttcctctgtatattatccctaagcaaaatattgtgttctatatttttaatatatttttaggtattctgatacacatatctttttggaatttgcttttgtccctcatcactatgtttgtaagattatttttccatgttcccacacatgaagacctagttttgccaggcatggtggctcacacatgtaatctcgaccctttgggaggccaaggcaggaggatcacttgaggccaggagttcaagacctgcctggggaacatagcaagacaccacctcaacaaaaatagtaataaaaactagccaggtgtagtggtgcatgcctgcagtcccagctacttggagagctgaggtggaaggatcgcttgagcccaggaagtcaaggttacagtgagctatgattgggccactatactccagcctgggcaacagagtgagatgctgcctcaaaaaaaaataaataaataaaatacaaatatgaagacctagtttaacaaaataaacccaaagaaagatgaagaaaataagagtagaaattaaagccttaacacacaggcctactatttctgtggatccctgctctgaacggccctcccactagatgactaggtaggtgtgggcctgaaaccctaccctaagcactactccagcgtgtgacacacgacagccccttggcaggtctcctgctcatttccccgaggtcacaccctaattctggctctcagtcttaccactcggatggtgagagaaaggagagaaacagcaaaccaagggtgagtgccagggggacagtgttgctttctgggatgtgagtagaacctgattctctgccaagtgaaacaagtattgggatggccaaactgttccccaaagtagctgggccactttacgtgagtgtacgagaatcccattttctctggatctttgccaacacttgacatggtccagtttttaaattttagttattctaatgggtgagtaaagccatcactttggtcttaatttgtatttccctgatgactaatgattttgagcacattttcatgtgcttgataaccactcatatactgtcttttgtagaggatcttttggaatcttttgtctatttttaaatggcatgtttttcttcttaatttttaagacttctttatatatcctaaattcaagtttcttgatatgtgagtttcaaatgttttggacaaatatgtagtttgcctttttattctctttaatggtgttattcaaaaagcacaattttacattttaaaattttcggttttttatttttcataagtccccaaaatgcctcacaatgttacattttggtgctgttcaattcatcccattttcttgtatgatttatggtttttatgtttcatctgagaaacctttgcttacaagttcacaaagatttcattctatgttttcttttggaaatgaatttaaagttttaggtttcacattaaggccatgatctatttcgagttaatttttgtgatgatgtgaggtaagaataaatgctcattttttccatatggatattgtgagaaacaaactcacccatccaaacccaatgaatggactcagagacccagagaatagtcaaagtgagacttttaatggcggtgatgcaagagcgggtgtctggcacgcagacacagccagcacagtttcaaccagcaatgtatcccctagtgcgcagatccctccccggttcctcatagactgagtactatgaggtcaccatcttcccggatgtcgcctattgattgttagacaggggcttcaagtatgttctttagggtctttctgctgcattttattgcagcccacaatgcattgcaactctctcaggactcttcaaacatttgatttatggccctagtggctgcacttagctgataagaaagggtacaattacctatgttgcaagctaaacaaaactaaatttttgttttgttttgttttgcttttgagatggagtctcgctctgtcgcccaggctggagtgcagtggcacgatctcggctcactgcaagctccgcctccggggttcacgccattctcctgcctcagcctcccgagtagctgggactacaggcaccagccgccacgcctggctatttttttttttgtatttttaggagagacggggtttcaccgtgttagccaggatggtgttgatctcctgacctcgtgatccacccacctcagcctcccaaagtgctgggactacaggcgtgagccaccgcacccggccccaaaactgaattctttggtgggtggggagggggtagttgggggggcccccaccaatagacgcctggccgctgggtgaaagggaaagcaggaaggggcggggggtgggggtgggctcagtacattctgcttctttatctccctatttccatgtagcctgcttaaacctatactaagccacttagaattgaaaatggaccatcacatataggttattttctacagataatccagatgatccaacaccatttgttgataaacttccctttccccactgatacaatcagaatatttatccctccatgtctcatgttgaaatttgtcccacaatgttgaaggtggagcctggcaggatgtgttkgggttacgtggccagatccctcatgaatggcttggtgcctgcctacagtaatgagctctccttctattagctcatgggaaagctggttgtttcaagagcctggcatcccccgctccttgctccctctctcaccacgtgacctgcctgtttcccttttacctcctgccaagattggaagcttcctgaggcccccaccaggagcagatgctggctcaatgcttcctgcagaactgtgagccaaataaatctmttttctttataaattacccagyctcaggtattcctttatagcaatgcaaaatgtactaaaacacccacctttgccaagaattatttgaccatttttgcacagatcgatttccgaattctattctggttcttttaaaaaattgttttggttattctagatctttcctttcctgcatcactgctagtaagcctttacttatatgattctaattacattttcttgcaggtacagattttaaccatacaaacccagaacttcrtaaagaacttttaaaatatggatttaatgtgattatcagtagaagcttgggcatcgaaagagaagtgccagataccaggagtaaaatgtatgttgtctctctctttctctcattctctagatagatagatagatagatagatagatagatagatagatagawwgaaaacagttactaaycagattttaatttgatcatactagaaatgttatagattcctatttttaggacttgaagtcagataatgtcaagattctakttcaagattctaatgcttatagtgtagagaatgtcttcttcgtgggcacaaaatgtgttctagaggcttccaagaattgagttacccacagatctttttattaaatcaccaayaagggcttctggccaaaggggcattcattcctgatagaaaatgctctggacagctactttttattccccaaaatttacttttttcaaaaaaattgttctttcaattgttgcattaataattattatgttaatgattaacataatcattgttatgtgataaaatacacataacataaaatttgccattttaatcctctttaaatgtacaatacagacattcacattgtgcagccatcgataccatccatctccagaactctctcaccatcccaaactgaaattctgtacctgatatggtttggctctatgtccccacccaaatcttgtcttgagttgtaatcccaggtgtcaagggagggacctggtggaaggtgattggatcatgggggtggtttccctcatgctgttctcatgatagtgagggagttctcatgagacctgatgattttaaaagtagcagtttcccctgcattctctctctctctcycttctgccaccatgtaagacatgccttgctttcccttcaccttctaccatgattgtcagtttcctgaggcttcccagccatgtggaactgagtcaattamacctcttttgtttagcaattacccagtctcaggtagaatctttatagcagtgtgaaaatggattaatacagaaaataggtaccaggagtggggcactgctataaagatacctaaaaatgtagaagcaacttgggaactgggtaacaggcagaggttggaatagtttggaggtctcagaagaaaagaggaagatgtgggaaagtttggaatttcctagagacttgttgaatggctttggtaaaaatgctgatagtgataaggacaatgaagtccaggctgaggtggtctcagatggagatgaggaacttgttgagaaatggagtaaaggtgactcttgttatgctttagcaaagagactggtggcattttgcccctaccctagagatctatggaactttgaacttgaggtttggaaaatttgcaggtgactatgtggtagaaaagaaaaacccattttctggggagaaattcaagcccaatccagctgcagaaatttgcataagtaatgaggagctgaatgttaatagccaagacaatggggaaaatgtctccagggcatttcagagaccatggcaactcctcccatcacaggcccagaggcctagaaggaaaaatgattttgttggccaggcccagggccctkctgttctgtgcagcgttgggacaaggtgccctgtgtcccagccactccagctccagccatggccaaaagggaccaaagtacaactaaggctgtggtttcagaggttgcaagctccaagccttggtggcttccatgtggtattgggcctgtggtgcacagaagacaagagttgagctttgggagcctccacctagaattcagaggatatatggaaacacctggatgtccaggcagaagcctgctgygggggcagagccctcgtggagaacctctactagggtaatgcagaggtgaaatgtggggatagagacaccaaacctagtccccactggggcaatacctagtggagctgtgagaagaggaccaccttccttcagaccccagaatggtagatccaccaacagcttgcaccatgcacttggaaaagacacaggcactcaacaccagcccttgaaagcagctgcgggggatgtaccctgcagagccacagaagcagaactgcccaaggccttgggagcccaccccttgcatcactgtgacctggatgtgagacttggagtcaaaggagatcatttcagaactttaagatttaggggccrggcactgtggctcaagcctataatcccagcactttgggaggctaaggcaggtggatcacgaggtcaggagttcaagaccagcctggccaggatggtgaaaccccatctctactaaaaatacaaaaaaaaaaaaaaattagccaggcatggtgatgcgtgcctatagacccagctacttgggaggctgaggcaggagaattgtttcaacccagccagcagaggttgcagtaagccaagttcacaccactgcactccagcctgggtgacagagcaagctccgtcttacaaaaaaaaaaaaagaagatttaatgtctgccccgctgggtttcagacttgcatggggcctgtggcccctttgttttggccaattggccaatttctcccatttggaatgggaatatttacccaatgcctgtaccgctattgtatcttgaaaataactaacttgttttttattttataggttcataggaggaagggacttgtctcagatgagactttggacttggatttttgggttaatgctggaatgagttaatacttcgggtgactgttgggaaggcgtgattggttttgaaatgtgaaatgwgatttgggaggggccaggggcagaatgatatggtttggctgtgtgtccccacccaaatctcatgttgaattgtaatcctcaggtgtcgagggaggggccaggtgggaggtgattggatcatgggagtrgtttcccccatgctgttctcatggtagtgagggagttctcatgagacctgatggtttttaaagtggmagtttcccccgtgctcgctctctgtcctgctgccrtgtaaaatgtaccttgcttccccttcaccttctgccatgattataagtttcctgaggcctccccaaccatgtggaactgtggtcaattaaacctcttttgtttagaaattacccagtctcaggtggtatccttatagcagtgtgaaaatgaagtaatataatacagtacccaataaacaacaactctccatttcccaaccccagcacttcctggcagtcatcattctactttgtgtgtctatgaatttctattactttaagtacctcatataagtggaatcatatagtatttgtctttttttgtgactggcttattttgcttagcatgatgccctcaaggttcatctatgttgtagtgtgtatgtgctaatgcgtttttagcatctttaagttctgatggtttccagacaaaaagggccaatattctcctttaactaaatgagaagtacttacattaaggatatccatgaaacaggagaaagcagggccactttgccttgttgcaacttgtgtgcaacgcaaacatttgaagccacaaatatcactcatgatgtggtacactcaagagacgtggagtttgtacatgatgacacaatgtatctgggtcatgataaaataaaaaacttaaatttactcaaaccatagaacatggtattaacatagagaacaatatttcactgaactgaatatttactacaaaggtcaccattttaacatatcttttaggttatgaatttctctctgtatcatcatttgttctccctaaatctcaccttctaaaatagtatgattgcttttgcttcccttcccccatcacatgattactgttcagaaaaacaaagtttagagagatttgtccagaaagaaaagtggacttggcagttttaatatttaaaatataacttatttaataggaaattcaattctgtacaaagarcccactactatgtttaaaaattaacttctaagagcaactaccactatctggagtccaaccagatttttagccattattgtaatagccatattatttcattaaatggaattttcattttagctttcccttactttttttaaaaaatgtaatttggtctcataaaatgagtttggaagtgtttcttcctccttaattttttggaasagtttgaaaaggattggtatttattctttaaataaattcagtagtgaacccattaggtcctggagttttctttggtgagagatttttattcctgattgaatgcccttastcatttttagtctgttcagattttcagtttcttcatgattcagtcttgataggttgtatgtttctgggaatttattcatttctcctaggttatccaatttgttggcatataattgttcatagtagtcttttatgattctctgttttttctgtgatatcaattatgtctcttctttcacttctggtcttgtttttttgagtcttcttttttcttaattagtctagctaaaggtttgtcaaatttgcttatccttttaaaaacccaactctttktttgrtttgtcttttctattgttttcctaatctctatttcatttatttctgcacttatctttgtcattttctttcttttactaaatttgggcttagtctgctgtctttttcttgttccttcaggtataacattaggttgtgtgtttggaaactttcttctgctttgatataggtgtttattcctataattccaaaacttagtactgcttttgctgcatcccatatgttttggtatttttttttatttccatttgtcaagwtatttttaatttycattttaatgtctttttaaaaatttcttctttggcccattggttggttaggaacatgttgtttaatttccatatatttgtgagttttctgaaatttgtctcattattgatttctagtttcataccattgtggtcagaaaagatacttgatatgatttcaatcttaaattgttaagacttgttctgtggcctaatatttgatcaatcctggaggatattccatgtgcctcagagaagaaatatatgctcttcagctgttggataaaatgctcatgtgtgtctgttaggtccatttgatctaaagtatagttgaagcccagtatttccttattgattttctgtctggatgatctgtacatagttgtaagtggggtattgaagtcctctacttttattttattgcagtctatcactcacttcagattattaatatttgctttatatatttaggttctctgacgttgggtgcagatatatttacaacatgtcttcttgatgttatatcttggtattatattaccaactggcaatataatattgttatatcttcttgatgaaaggggccccttatcactataaaatgacctgctttatccatctctttttgcaatttttgacttactgtctgttttacttcagtataagtatcctctgctctcttttggtttccatttgcatgaaatatctttttccatctcatcacttttaatccttgtatatccttaaaggggaagtgagtttcttataggcagcatcagttaggtcttgtttttttaatcatgtttttcaagttgagatttatgtatgtattttcagaagtctgcaaattcttaatgagattctccatgagaattctaaaatttcatcttcccacttttatatatatatattttttgagayggaatctcgctctgtcgcctgggctggagtgtagtggcacgatctcagctcactgcaacctttgcctccaggttcaagcaattctcctgcctcagcctcctgagtagctgggattacaggcgtgcaccaccacacccggttaatttttgtatttttagtagagatggggtttcaccatgttggtcaggctggtctcgaactcctgacctcaggtgatccaaccaccttggcctcccaaagtgctgggattacaggcatgagccactgcacctggcctattatttttaattaatatatatttatacaggaggacagcctgttactattgtcaccaaatttcagtaagtaatgagaaaagtattagtaaacttaataggtacattatacaaatgatgtcaaacagaggcagaccaaatacctaaattatatgttatgacaagttactttacaatatggccaatagaattttttaaaccaatatttcaaatacaaaaataggactgagagatttaagcaaacacacactacatagtaggaaagtctagtcaaattaagaaataaactttcctataacaagtagaaaataagttataagtggtgatgtcatttcracaaaacccaacctgaaattaaaattaatttattaatttgattttaacccttctagccatatttyattatttttaactgttttgtttatagctgggtacgaacttatgagcacaaggagattctgagctcatargttcacatatttaagaaacattaaagtaacaattcatctctggaggttaagaccttattttctcttcaaaaaaagtctatgtatgattcaagtttttaaaattgtgatttatgtttttcttttttgtattatcttcatcagattttgatatcagacttatactagctttataaaatgaatttgaaagtttttgactctctgaaataattgggataatatgataatcacctattatgttgaaatagcacttgcttggtaattatgaatcaccagtgcattttttagtggtagacattgataaacttgcacattactctaaagttattgttctactcaagctttctatttctaggggctatttaggacactgttgtaataaaactttattccacctatttctcaaatttattggcaaaagttgtgtatcttatttccctaattactatcatctccgctagtaccataccttctttctcattttttattgtatgttttcccactctctttttaagtttgatgtgcattgttttgtctttcaaaaagccaacttttgattatacttactaattttacttttttgtcttccaattcattaatttctagttatctttattggttcatttttatttcttttggtttatcctgtttttcttgctagtttataaggttagtttgattattttaccgctttgtggtataataatacatttataaatattcattttattcagatttaaattttagccatatctcttagatttaacatgataggctttcatttttaatttctatataatttacaatttttaacttcctctgatccaaaaattatttggagaaatccatttttttaattggatttgaacaaatgaatagccatttacaaattagcttagcagtcatctatcaccatctttttctaatgtgcttaaaagattgtcgttgtaagagtgcctgtgcctggtggactatttccactcaaaatacagcctgaaaaccaacagcactgacagcccctgggagcttgctagccatgcagaatctcaggcccctrcccaratctccttaatcagaatctgcagtcagcaagaaccccagttgagactgatgcatggtaaaatttggtatccaaatattggtttggtagggctgctataagaaagtaccatcagctgggtagcttagacaacaaaaattattctctctcagttttggaggccagaaatctgaaatcaagttgttggcaggattgctcrcctctgagagctgtaaagaaattaggctctgttccagacgtctctccttggcttatagatggccgtcttctccctataactcttaacgtcatcttccctttgtatatgtctgtctctgggttcaaatttcccctttttgtaagaacatgagtcatattggattagggcctaccctaatgagctcaccttactaattatctctacaacagctctttttccaaataggatcacattctgaggtcctggggactagaacttcactatatgaattttggaagacacaattcagcctaaaagagtcctgctttgtactgaactattattaatgtataaggtcagcaatgtgtaaggttagcaaatttatatgatcagctaattgaggacaaccaaaggccatccaaattacttttactcttttttttttttttttttttggagatggagtctcactctgtcacccaggctggagtgcagtggtgccatctcggctcactgcaagctccacctcccgggttcacgccattctccttcctcagcctcccaagtagctgggaccacaggtgcccgccaccacgcccagctaattttttttttttttttgtaagtagagacggggtttcaccatgttagccaggatggtcttgatctcctgacctcgtgatctgcctgcctcagcctcccaaagtgctgggattacaggtgtgagccaccacggccggcctccttttactcttaaaaacagctttcttaggtcccagcaaggattttttttggtggggggaggggggcagagttttgctcttgttgcccaaggtagagtgcaatggcaggatcttggctcactgcaacctccacctcccgggttcaagagattctcctgcctcagcctcccaagtggctgggattacaggcacccgccaccacggctaattttttgkatttttagtagaaatggggtttcaccatgttagccaggctggtcttgaactcctgacctctggtgatccrcccaccttggcctcccaaagtgctgggattacaggcatgagccactgcmcctggccaggaaagtttttatagacataccacagcaacatttgttgatctatttttgagaaacccacacacaccaggttctcttgggggtctaaagagtcctcatgtgagtttcaggctcctccaccaacatcaaactgaagggacgcagtttatttccagttttcttaaagtgatacacccaggactgactataacatcagagatgtgattttagcagcagaagtcatcctggaccaccacttctcttattcatggtattggccttccgttaattcagtctagtatcatattttctctttctctcctactttctgtctctcaactcaatgatcttactggaatatttttttgagacagagtctcaatctgttgcccaggctggagtgcagtggcgccatcttggctcactgcaacctccgccttctgggttcaagtgattctcctgcctcagcctcctgagaagctgggattacagtcatgcaccaccacgcccagctaatttttgtatttttaatagagaaggggttttgccatgttggccaggctgctctcaaacccctaacctcaggtgatctgcccgccttggcctcccaaagtgctaggatgacaggcgtgagccatttaagccttttaattatttttccacatgtttctgcacagccgcattttcccactcaccgttacagacccaagtgcagacggtgcaggtgccctcattcccatctgttccggtgcttccttggccctgtccctcggactctccattcccttgagtctgatgtcagttccactcagtgggcatgacttctctgtcttcatcttgtcttggataaaaaggaagacgaggacaaggccctctccttccctggtgacttcattttgtgagtaccctgaggggactgtccaggatgcccataggattgcctgcccagcactcctttcccactgtttttcccctttccgtgtgattgcagtgctaacaatgatttttttttttttttttttttttttttgagatggagtctcgctctgtcgcccaggctggagtgcagtggcgggatctcggctcactgcaagctccgcctcctgggttcacgccattctcctgcctcagcctcccaagtagctgggactacaggcacccgccactgcgcccggctaaatttttgtatttttagtagagacggggtttcaccgtgttagccaggatggtctcgatctcctgacctcgtgatccgccctcctcagcctcccaaagtgctgggattacaggcttgagccaccacgcccagccacaatgatttttttatttcaactcaattttctggccccagttgattaacccagggatggggcacctatggcaagctgggccagtgaatcttttccagtcaatatttgatcttggaaaaggtaaagtcccaccagtttctccttgggtccttgcctataagaaatgctgatgtcaatcacatttcccactaaagaagtggaaaaagcccaggtgcagaggaagaatcataatcatgtaatgcgccttctatctgaatacttactgcgtgccaggcactgctctaagtrttgtaggcatgttaattcattgcatcttcacagcccttggaggtaggttgatatcgctattattatttttcccaaatgtaaacacaaaagcagagatagagagtgtccagacatcattcaagcctctagttctaatcattccttgaggctccagctgctgcagcttctaggtcctgtgagacatttgagtcagctcacaatacatctctcttcccttccttccttccttccttccttccttccttccttccttccctccttccttccttccttccttcctccctttctctctctctctctccctccctccctccccctcttctttctttcttttttttttttttttggatgcagtggtatggtcttggctcactacaacttctctctcccaggttcaaaatattctctgccttagcctcctaagtagctggaactacgagtgcgtgccaccacatctggctaatttttgtatttttagtaaagacagaattttgccatgttgtccaggctggtctcgaactcctgacctcatgtgattcacccacctcagcctcccaaagtgccaggattacagacatgagccactgtgccagccacacctccttttcttttgctaaagttagctccagcagatttctttaatttacaaccaaaatatttcagtatacaactaaataatatatctaaataataattaataactaatattactagaattccagaattcagcttctatatttccctcatatgcacacacacaaaaaaataaagtattctggggccagggacattggctcatgcctgtaatcccaacactttgggaggctgaggcaggtggatcacctgaggtcgggagctcaagaccagcctggccaacatggtgaaacactgtctctactaaaaacataaaaaattagccaggcatggtggtgcatgcctgtaatcccagctactcgggaggctgaggcaggagaatcgcttgaacccaggaggcagaggttgcagtgagccaagatgacaccattacactccagcctgggcaacaagagtgaaactccatctcaaaaagaatgaataaataaaaatgaaataaagcatttttgtcaaatattcagaagaaatccaattagaccatatctgctatacttttttgttgcgacagactccacaaatataagaataaagttggagttttctctgaagacagcacaataaagttaatgtacactttttaatgtgtgagcttaataattcatttttatctgtcctgccatggtgacagcaaaaaaaaaaaaagataaaactaattcatttttataacagaagctaatacatgaatataatttgtgtttatactatgtttaaaatagaactgagattatcaacacagtctcaggaaagagcaattattactgacattaagaagggggaaattattcagaaaatattagaacaacataagaagttaaataaatttttgtgtttttagatgtactgtcaccttattaccataattatcagttgaaggagtaaagagtcaaaaagatgcaaataaggagaagtgtttgaacgagatgacacaacatccaaggcatttagatggatggttttcttcatattgcttctgcctgcaggygtcttcaaaaacattacccagcccgcctcccgactgccagcattgtcatttgcttctrtaatgaagaatgtaatgccttgtttcagaccatgtccagtgtcaygaacctcacgccacactattttcttgaagaaattattttggtasatgacatgagcaaagttggtaagatagaacactcattatctcatctactttgttgttgttgttgttgagatttccctctgtcacccaggctggagtgcagtggtaccatctcggctcactgcaacctctgcctcctgagttcaagcgattctcctgcctcagcctcccgtgcagctgggattacaggtgcatgccaccacgcccggctaatttttgtatttttagtagagacggggtttcaccatgttggtcaggctggtctcgaactcctgatctcaagtgatctgtccgcctcagcctcccaaagtgctggaattacaggtgtgagccacgacgcctgaccatctaatctactctgaaggtagtgcgctccccgatggcacttgagtattttgtacaaaaaaatctttttggtgggtattggggcaggcactgcactaggggctcttggtatatggtggacatgtgagacctgggccctgtacttgggcccatggcagaggggtggaggggcggtgcttccataaggcaaacataggggcaccggccacatccttggagataacttcaggaagaagtgacatgtcaactgaggtctgaatgatgagttgtaatgatctaggtggagaggaaggaaaaagtgtttttggtagcttaagcagcatcgtaaaggcccagaggtaagagaagccatagagagcttgaaatacatgctaccatattttatgtagtttatgcatgagtatagagttgcaggggggaggtgggcaaaaccagagttattaaaagggaactcccagcccagcctggtggctcacacctgcaatcccagcactttgggaggccaaggtgggcagatccctcgagctcaggagctccagagcagcctgggcaacatggcaaaaccccatcacttaaaaaaagcrgggyacggggggtaactgctcataaagcgcattatttgaattttatcttgaagctatgaggagctattaagggcttaatgcaggaaaatgagatgatctaggaattccatgaaagaagcggaatcagaccaactgcagttaagtgtgtattctttcatgcttactggttttaaagaattgtgatactagcactagttaactacacttagaattggaaattactcacctaatttacaatggagtacaaaccttaggcaagccaggagtaccaaagcaatgatgtcaatattaagtaagtttcaggctgaaagtcaacccaatccactctaaatgtgacccactatgagctcagaaacaaaaagatgaggagaagcagtaggaagaacaggcagaggaagaaaccatcccatgaggttcaccctgcggggaagtgactctaggtgactcctgaatgtgactcaagtcactggcagttgtgtggtggaaatgtagatgttggccaggcacctatcgtaaataacactgtttctaagggggtcaccaatgtctgagggcacaggactgtctatttctagccttgtgcatgggaagagtgtggagtgagggcctggcttccctgctgcccctgtgacccacgctgcctcttctgctcaaaagactgagcagcatgtttggtracttgctgggcaagaagtcacygggaaagccaccagcaggggacagggtgggataacctgatggattgtggaattctaacttctcacccagaagtacaagaatgctgccatggagacacagtgccaggaatgaccaggggacggatacctcccccagcctttcagaaccacaccatgaatttggagacgtaactggtgtcttatcagcttggctgctgtaacaaaatgccacaaactgggtggcttmaacaacaaacatttatttcttagagtcctggaggttggaagtccgagatgagggtgccagcaggatcgagttcttagagtgggccctcttcctgggtgatagacagccatctttttgctatgtcctcatgttgtggaaagagagcaagctagctccatcacccagttatgcctctgcaaggccccacctgcaaataccatcatactgaggggtactttgaattttggtggggacacaaacataccggccgtaagatctgtcaacgttctcatacattcatcacacattgtggtcccctttatgagagactagrgggtcgctgctgccaacatgtgggtgtgyttcccaaccagacacctctgcttctcctcctctatctgagcctttgacccacacagagccttaaacacaggactagggtgttctaggctctgatggagctcaggttgacaccttcctcctttaattcacggtgacttcatcatgggtttaaggacaatttcttcaacaaaaccctgtctgtcccagctgacacctataggtatggccgatagactcctcagcttgggggagcagggccaggggcccagggaactgctcccactgagctacacaaatggcctgtccatgacctgctgccatccacttttcccatagtcctggtccctctagactgcaagccaacaacatgaccatcttctgaaaaacccacaccctccacttcatgtcagtgactgctgctgccttaactgcctttatctcctccagggcctggctcatggcgtcccacttttccctcctcttgctgcctyctacatcctggatgtgagtgaggtgtctggagatctttgagctgagatgctgcccaggcctgcaagtgcagctatgcagcctgtatccctgcctctttctaaaaacaaggaagaagatccctccttctgctgggattaccatgaacctgttcctgttcaacctgcccctgacccagattgctgggacttaggaatttagacctctgaggtacctgcatccatctcacctggtcccagcctcctttatcatcattgtattaacttccaaatattaagtgactattgggtgccaggctctgtgctgggtgatatatttcttcttcctcataccagagtactgccgggaacatgatggtcatcccttctctcagctgaggaaactaagactctcgtggttcgataactttcccaagagctactgaaaaattagaagcacagatagtagcaaacccagattgcgccaaagctctataatgcatgctttttctattaaaatgttaatagtgatttactaaaatagagttatttcactagaaccatagaataatatttacagggcgaggcgtggtggctcactcctataatcccagaactttgggagaccaagatgggaggatcccttgaggccaggagtgcaagaccagcctgggcaatgtagcaagaccctattgctacaaaatatttaaaaattagccaggtgttgtggtgcacacctgtagtcccagctactsaggacgttgaggcacgaggattgcttgatcctgggaggtcaaggctgcagtgagctatgatcatgccactgcactccaacgttggtaacagaatgaggccctgtctcaacaaaaacgaaacaaaaagaaaaatatttacagttgattttgataatgaatcacttgtgtttctctcccttaaatgggataaaaattctatcttttttttttttttttgagatagggttttgttcttgttgcccaggctagagtgcaatggggccatctcggctcactgcaacctctgcctcccgggttcaagcgattctcttgcctcagccccgagtacctgggattacaggcacccaccactatgcccggctaatttttgtatttttagtagagagggggttttcaccatgttggccaggctggtctcgaactcctgacctcaagtgatctgcctgcctcggcctcccaaagtgctgggattacaggcatgagacaccacacctggccccaaaattctcttttaaagttagaacttctgtggaatagcatggattttaggaatamgtyataatgatgatacactgtttcaatttctatagttgccgtttatacattctcatgtgttgaatatttttccagatkatttgaaagraaaactagactatcacctggaaacttttcggggaaaggttaaaataataagaaacaaaaagagagaggsgctgattcgagcaaggctgattggagcttctcatgcttcaggtaggaacattcctggggacaagagccagtgacggcgtcacagagatcttcccttctgagcgggactcctctgcagggagaccttctatgtctgtgtctgcttcatcagaagagtggaaatctattccagccatatgagcctttaatcttcttttgcctctgaaagtgttctgctttgaaatgtcaatttgctattttgggttgaagatattctttcgcagggacgttaatgtcagcccctctcacaggctgagttccccagtacaaactctgaaatggagtttcaaccacaggggacccactgggagccacaagagtgaggagagcaagactgggggtggggtgggcgggagggagctgcagcgctcatccacggggacctctgaagccaggaccccacaatgaactaagagaaagagtttatggggcaagagataggagaacagaagaaaaagtgtgagctgatgcttctgacccgacacacgtggaggaggacagagaaggaaggaagtttatcttgaagcgcttcagacaaggtgcaggtctcagaaaggctcagtgggctagggggagccccattgcaaaggctgcccgttagggagacctgcaatgggaccgggtggcgcatctccacttcctcccamccaccaccctcacactgtgcttggtcattgggtggcagcaccctgggaacggcatgaccttgacatgagcttcagtagatccgaaaactttggcagtgggaagcactcaaatccgtcccctgcagcaggttcttgtgaagggacatccgagcagcacactcccagggctgccccaagagccattcagagggatccsagttccaggtaaggggaccaggcatggaccagtcattggatatgaacactgccctcccctgggggcaggtatgaccttggtagccatggctggccaagggcagtttctggggagggactttgttgtgaaccattggctgtcaacgctgctgggcggctgagtcccaggagcatctgagcagcttgatagagagcccaggcctcctacgatcacgcctcctgccgcatgtaggggaatgttggcagaacgctgagctggaaccacgggaggcgaatcatttgtaagggcattcctcargcygcattgcaagctgatgaaatgtccctgctccttagcaggaaacacctccttaaggaatggaaggacaaaagaaaaaaaacaaaattggactctctttttccatgttgccctggtcggtggacacattctcttatttaactgcaaagataatacatgttcattgtccaaaacccaagagaaaccaaacacaatatggagagcatcttttcagacccgcgtttttatgcatttatagatatatacatatatatgcacgtgtrtatacacagggttaaggatttttatttattttacttttttttttttttttgagacagtttccctctgtcacccaggctggagtgcaatggcacaatctgtaacctcctcccactgggctcaagcaattctcctgcctcagcctctcaagtagctgggattacaggtgcccgccaccatgccggctaatttttgtacttctagtagagacggggttttgccatgttggccaggctgctctttaactcctggcctcaagtgatctgcccacctcggcttcccacagtgctgagattactgtcgtgagccaccacgactggcctgggatttttaaatacatggaatcatactgtctgtactgtcctgagacttactcgtttatttttaatttttggaacttttcccatgacagtacttaagagttacttcagttttgaattgctgtgttgtatgatatttcatatggattttattttttctcttttttttttttagacagtctcgctctgtcacccaggatggagtgcagtggtgtgatctcagctcactgcaacctccatctcccaggtttaagtgattctcctgcctcagcctcccccaagagctgggattataggtgggcgccaccacacccagctaatttttttgtatttttagtagagacggggtttcgccatgttggccaaactggtctctaactcctgacctcaaatgatccgcccacctcggcctcccaaagtgttgagattacaagtgtgagccactgtgctcagcccatatggattttataattgattttcataacttgtttagccatttctgaataggttatttttcttttttactattacctaaaaaatgcagcagttacaattcatgaacatgtatctttgtgtgattgattgtgcctgtaagataaattcctaaaagtggaattgctgggaagaagggaatttttattttaaattttgaaagataatgccaaattgtccttgaaaagtttcaccaattaacaatctcatcacacagataaattgccctttctctgcagccagagatgaatatggcccgtctttttaatgtttgccacagttggccaaaaaataggctaccttttcttttcttggtattaccagccatcaaattttttcatattttcatagattgcttacagatcatttttctgtcgatttatctgttcatattctttgccaatgtttctaatgtgttgtttgtctttttgttattgattcaaacatggccttataacagaaattctatattatgaacactgagaatatcggtcctcaggctagagcctatcttttcttctcctctggggttgtcttgtgttgagcagaattttatttatttatttattttgagatagggtctcactctgttgcccaggctggagtgcagtggcacaatctcggctcactgcaaccttcgcctcctgggttcaagtgatttttgtgcctcagcctcctgagtagctgggattacaggtgcctgccacctcacccagctaatattttgtatttttagtacagaaggggtttcaccatattggccaggctagtctcgaactcttggcctcaagtggtctacctgcctcggcctcctgaagtgttgrgattacagscatgagccattgtgcctggctagaaatttttaagtctttaagttcaccagaaagcccacttcactggctaacacagtgaaaccccttctctactaaaaatacaaaaatattagccgggcgtggtggcgggcgcctgtagtcccagctactcgggaggctgaggcaggagaatggcgtgaacccgggaggcggagcttgcagtgagccgagattgcgccactgcactccagcctgggcgacagagcgagactccatctcaaaaaaaaaaaagcccactttctcttgctgggcacagggctagactgaacttcctagcctctcttcaataggaatagccttgtgactaagttttagccatgggatgtgagtgcaagtaacatgtaccatttcccgaccaaggctcttaggaagctggtctgtcccctccacactcatttcctgttctggctgactggggccaagatgactaagtgactttggaggctctgggttgaagagcctccgccagcctgcatccctgaatgaccacatggagggcttccctcaatcaggagcacccgccttggatggctaaatgcgtagaaataaacttccattgcatttgagccattatcattttggaatcttattattataatagtagctagctttaacataataaaaaacaaacatatcaatatttttcctttatgatttttgggttttgtctcctgttcaaaaaaattcttccttaccctgcgatcatgatgatactgttctttttgttgttgttgttgtttgttgttgttgagatggagtctcgctctgtcgcccaggctggagtgcaatggcgtcatctcggctcactgcaacctcagcctcccgggttcaagtgattctcctgcctcagcctcccaagtagttgggattacaagcacccaccaccacacccggctagtttttgtatttttagtagagatggggtttcgccatgttggtcaggctggtctcaagttcccgacctcaggtgatccgcctgcctcagcctcatagtgccgggattacaggcgtgagccactgcgcacggcctgatactcttctttagtttcttcctcatgtaaaaaaaaattgatttttacattaaactttgagtctacctggaactgtttgttctgcaaacggtgtaaattaagaatgtaatgtaatttttttcagaatgaatagccagttttcccacaccgttcattgaatagtccaccatttcttcattggttgcaatgctatttttatcattttatcaaatgtctatgtattcctgggtctatttccagcatctctcttctgctctatgatggtatttttgtatttctaggctaatcacgctgtctcttgattagtacagcttgataagaagtttttatatcttcttattttcttgataagaagatttgtaggacaaatctttccacttcattctgcaagtgtcttagctaggattgtcttatcaagttccaggaaaaacgtgttgagattttcactggaattgtatagagatgatagattaaaatgggaaagaatttacatatttttgatgataaatgtccccacccatggacatttattcagatctgcttttatattcatttggtgttttgtcatttgctctatagatattatgtgcaaagatttatttctgtttatcttgattttttggttgttgttttaaaaattgtgatttgggaccttcttgttatatttttaaattattactggtacataggaatgagatcttttggtatatttgatcttgtaaatagaaacctcagtaaactcttagtcgttagtggttggtgggtagagtcgcttgcattttctatcacctgaaggtaattttccttctacctctaatgttgattagaagtggcggcagcaggcatcctttctgcttttgactttcatgggaataattctgacttatcatttagttactatgttgatgtgtattagtttcctaggactgttataatgaagtagcacaaacaggtggcttaaaacaacagaaattcattttttcccagttctagaggccagaagtccaaaatcaaggtgtgagcaggacctcactccttctgagacctgcaggggaggctccttccctgcctcttcagcttctggccgtggctgccagtcccgggctgcagcggcgtcaccctcggctccgcctctctgttcacaggcgtcctccctgtgtgtctgtgtctgtgtctttgtctcccccaaccgaatctcagaaggactccagtcacattgaatgaagggctcgctctaccctggtatgacctcattgcatctgcaaagactctgtttccagataaagacacattttgaggttcctgggttaggacttgaaaatatcgttttggggaacacagttcaacccgtagcactacggtctggattgtttttgtttaaaaggggagtcttattttttttattttgaaaattttcaaacccacataatacccatagaaatgctcccctagagtcactaggtgtagatgtaaatatctcacaacacccacttcacacacgtgctctccgccccttctcaccccacgcacacgcatcgcatctgtgttcaaaagtaagatgcggactggacacgatggctcatgcctagaatccccgcactttgagaggccgaggcgggcggatcacctgaggtcgggagttcgagactggtctgaccaacagggagaacccccatctccactaaaaatacaaaaactagccaggtatggtggcacatgcatccatagctactcaggaggctgaggcaggagaattgcttgaacccaggaggtggaggctgcagtgagccaagatcatgccattgcactccagcctgggcaacagagtgagaccatgtctcaaaaaaaaaaaaaaaaggaagatgcgtttatgattttctttgtttgtactgtgttcttatacttttcactttaccagactcatagaacaaattgtatggtttttctttttttctaaaaatttacataagacagagattgactgtgtgtgggaacttgcagagaactggccaataaactgcacaggcactggtgtcttttttggtttcctctttaatccacattgtcttcttttttttaggagtgattttgaaagtttccaaacgattttcagagattttaaaaattatttgttaattatttattactaaactgtattgtggtcagaaatttgaaatttctgttgtggcttaagctaggtcagtttttcacaatgtctatgtgtattttatactttttttctttctgagacaggatctctctctgtcacccacgctggagtgcagtggagtatcgaagctcactgcagcctcgaactcctggggtcaagtgatcctcccaccttagcctctcaaatgttggaattgcaagcaggagtcaccacacctggcctatttttttaatttttggtagagatgtggtctcactgtcctgcccaggctggtctcaaactcctggtctcaagcaatattctcccatcttaacctctcaaagtgctgggattacaggcatgagccaccacacatggctcttctatgtgtattttcaaagaatgtatattttttctttttggttgtaggttctgtgtgtgtgtatatatgtataattttgttcatatctttgatgatggaattcgacttcatttctaagtttcttagagttgtactgaaaccttcagctatgactgtggatgtgtgcacctacttctcctggccctttgccagcacttgccatctctcagcctgtctgttccctacacccccaagtgatgtaggtggctgcctgagccaggcgtgctcctgagtcacaagtatgggatcctgttgtgtgggcaggtgaggcagcagccagcggcccttccttaacttatctcttgccgactgtgtgctacccatgcacatttattcttttctttttttcttttttatcaactctattgagatgcaaactgtacctactgagcctggagacgggttttcacgtgatgttcatgtgcgcacactcctttggagccaggtcatcttcctgggagctatttgcattattacaaagcgacgctgtctctccagtagggcctgccgtgatgtgctccctgctttccctgacctttcccttccttcctccctcacccacccaccagctgcacgggccttcctgcttctctcccagcctgccaagcctcatcccatctcagagcctctgcccgtgattggcttcccctggaacgttcttctctcaggcatctgcatgacctgttatcttactttgttcagttctctgatcaaatgccactttatcaccatagtctttcaaaccaccccatattaaatagcagactcctgtccctctctatcatcacccttacccccaatttttttttttttgacagagtctcgttctgtcccccaggctggagtgcagtggcgcgatctcggctcactgcaagctccgcctcccgggttcacaccattctgcctcagctcccgagcagctgggactacaggtgcctaccaccacgcccggctaattttttgtattttttagtagagacggggtttcaccgtgttagccaggatggtctcgatctcctgacctcgtgatccgcccgcctcggcctcccaaagtgctgggattacaggcgtgagccaccgcgcccggcctcccccatttctttctcttcataattctcatcactatctgtccatttctctgggccggtggtgctgtccacgtggctgttgaagtctcccacaggttgcaggagctgaggtgggcagcctgcggtgaatgctgtgccgtacctgcagggcatgaaggaaaccgcctgagatgcaggcagatggataaccccgcagaggaggagaaggcaggggttttgcaaagtgaagaagaaagagaatgttgcaatcagatggcttgaatctaaagaaatctacgatcagttggtatgaatttttttttttttttttttttttttttttgcatgggagcggaagtgtcatgatttggaggcaaacatgggtgatgattaaaccatggatagtgatgaaatgctagtgttgcttctggatgtggggttcatgcagtttgagagaaggagtttttttttcttctatcagcaacattgcagggaagcagtgtcttccagggagaattagacaagtcactcttctgagcctcagcctgataatccaaatatgggaatgatgctatcgaactaacatggctgttacaatgatcagataaggacatcacctacattttttttggcattatgtactaaataaatgcttattatacagcaattaggacaaataaataattaaaacataaacattgaattttatccttcaaaatgatgaaatacataaaagtaaaagaaatacagggtaaaaataataaaatacaaaatattaatggtggaaaggctctcagaggttttagaactcatcagccttttatcccagttaaagaagctaagctcccgaaagattagagactggctctaggtcacgttactccaggctcaaacccaggaattctgatgccatctcagtagacagcatcatcccaccaccagattatgaggatgtagcttacaaacaaaatttgggatatttaatagtatagttgcttcgatttctttttacaaaatccagatggctaggtttaacagatttatagtgagttaaatagaaatgcttatgtattttacaaaaactggtcatacgcttaagcacagattctctgtaaataccctgacacagattttgcacaccacattctttttttttaattttattttattattattatactttaagttttagggtacatgtgcacaatgtgcaggttagttacatatgtatacatgtgccatgctggtgtgctgcacccattaactcatcatttagcattaggtatgtctcctaatgctatccctccccactccccccaccccacaacagtccccagagtgtgatgttccccttgcacaccacattcttraacatcaataccaaaaaattggaaagatacagcaataacaggctgggtgccgtggctcacgcctgtaatcccagtgctttgggaggctgaggcgggaggattgcttgaggccaggagtttgagaccagcctgggaaacatgagaagacctcatttctacagaaataaatgaacaaataaaaataagctaggcgtggtggcccgtgcctgtaatcctatttatttgggagggcgaggcaggaggatcgctcgagcccaggagctcaaggttacagtgagctatgactatgccactgtgctctagacagagcaacacatcacaacctcatctcacaaaacaaattaaaacaagatacagcaataacataacgtgtaggtaaaaaaaaaaaaaagaaaaaatatttttaagattttaaaaatgcttggttgtagagaccaaactgagaattttaatgtgatgtaaaataaattatatataatgagttacgtttaagggtgaaaatgtggacactaaccaaagaacgaaaataaatacaaaacagagaaaaacaggaaatactgtgaaattgatacatacgctatttgttgcttttcaaaaaacaagttaacaaacgttgcaatccacaatccctagagaaatggtgcaaatagactacgacaggagagcagaaaataagcttctacacagggtaagatggaggacgtagctcccaactccaaactttagggagcaatggaattgtttagaatatttccacaaatactctttggaagcaagtaggggaagaattcctctatcaggcaggcttgacctcacgccctttactcatcacaagcactaaagagaatctgatgaatgtctgataggtcatctagcacatgaatgataggccatctctaaaaccaataaatagcacggtccttcccgaaactctcgaagrcagcagaagtagagcaaccgtcctttcctagcaccaaactttaggttyccacaaaatattcctgtgaaggagagaaatcagctgaagagggaccctcactactactttgctctccttacaggatgtaaatttcccctgttaaatattttatgatgagtgaaaataaaacctcattgaaatgtaggtgctaggtggcctgttcccacgtttttaacttaaatcarmattcagtaataccccatattaattttgcataaagtataattttaaattattttgcaatttttaatattgcatttatggtctttctgggtcattagaatcctcaaagttgcaaatatttaaatctttcaatattaagggtacaagtgtacactgtatacagtaaagagataccacaaatctgtatgggaaaaaagacttttaaaatgtttttgttgcagttgttgtttaatgccacttaaacaattagccatttgggaaaattttaggtctttatttcataccataacccaaataaattataactggattaatgttaattttattttaaaaaatcaaaccatagccaggtgtggtggctcatgcttgtaatcctagcgctttaggaggccaaggcaagaggattgcttgaggccaggagttctaagaccagcctgacaacacagtgagacaccatctctacaaaaatttttattaaaaaaagtaggcgagtgtgttggtgcacacctgtagtcctaagctactcaggaggctgaggcaagaggatcgcttgagtccaggagttggaggttatagtgagctataatagcaccactccactccagcctgggcaacagagtgagactgtctctgtaaaaacatcatcatcatcaaacttcttaagggataatttaaaaatataaaaacatagattaatacttgcctgttttatgaataaagaaatttcaaagcttaaaaccaatggaaaaggtgctaaaaaaaagtctatttttttaacaaaaaaatgtaaaattgctgcaaataaaaaataataaaattaaataacagtaggctggggaaatgtaacaggactaaaagttaatatttttagtatgtaaaatgtacatttaaaatccattaaaaatacaactccaagctgggcatggtggctcacgcccataatcccagcactttggaaggctgaggcaggtagatcatttgaagtcagaagtttgagaccagcctggccaacacggtgaaaccccatctccactaaaaatacaaaaattagctggacatgttggcaggtgcctgtaatcccagctacttgggaggctgaagcaggacaattgcttgaagccaggaggtgaatgttgcagtgagctgagatcatgctactgcactccagcctgggtgacagagcgagactctatctaaaaaaaaaaaaacaaaaaacaaaactactccgataggcaaagtacacgacaatttcatttacaaatggctaatcatgtggaaaattcaacctcaccagcgattaaaaaaaaattaaccagattttttaaaattgaggcacgattaacataaaactgatcatttaaaaatgaacaattaagtagcatttcgcaccttcacaatgttgtacagccatgacctctaactccaaaacattttcattacctgaaaagaaagtcttttagccattaagcagcttccttccctccagtcyctggmaaccacctatctgtgttctgtctctttctagatatttcatatcaayggaatcatacaatatgtaactttttgtgtcgggcttctttcacttagtatatttttgaggttcatccacatggtggatgtgtcagtgcttccttttttatggttgaataatattccattctgtgatacaccacagtttgtttctccattcatccattgatgggcatttgggctgtttccctcttttggctgttgtcaacagtactgctgtgaccatgcacatayatacatttgtttgaattcttttgggcatgttcctaggaatagaattgctgggtcttatggtaattccaggtttaattttttgaggagctgccaagctcttttcttcagtggctgcaccatttacactcccaccagcaatgtgtaagagttcaaatttctccatatccctgccaaaacttatttttcattttttaagttctcgtcatcctagtggaagtgaagtggttcttcacgttggttttgatttgtgttttcctaatgacatgatgtttcgcatctgtttgtgtgcttgctagccattcgtacatcttcttaggagaaccagatgttatttttcacctatcaaatgagcagacatgattttaaaatgctaataatgttacgtaatattatagaagctattttaggtgaaaaatgtgaagtataaagctgtgtgtgtgctgccaatagtatgaaaacatatgtgttaaaaatgggactcttgttagctcagttttggttgaggcatgaaaatcatagctgtaatattccaaagtgagttgttagactgaccacgataaagatatttcaaaatagagatctgagaaccaatgagatggctcagccarattgagtcatgttgttagagattaaaggagatttttggagaaagctactgctcaaagcctggtgagagagacttgatatgaattcagcacattctcagacatcaatacaataaaattggaaatatattgggattgaggagaagtgaactaatgttagttttytgccgaaaatcaaaaggataaaaagactgtgaccagctgtagaacaaaggacacttgcttttagattagtagctgtatttatggcagagtttgctttggcagtgttggagagagagctatagggatcatcttagatggtgtccggtaggactatctagaagaatggacaggcctcagcagagaagctggagacagaacacaggatcttaaggagctgagaagacagattgagtcaccagaatagaatgcacttgcccagtttgtgggaactgctgaccagagaccaccagggatgagaagggaggtcctcaaagttgctattgccagccacacaccctcagagaactcagcccagagagtgcccttcaggcaagagagaactttcctgttctctgtactcctcccctcccacccatcattcccaacagcactggacaagtgtttcaatttctccaccacctccccaacacttgctattgtctgtctttttcattcttgccgtcctagtggatgtaaagggatacctcactgtgatttttattaacgtttttctgatgactaatggtgttgaacatcttttcacatgctcatcagccatttatacgtctttgcaaagatgtctattcaaatctcttgcgcattttaaatcaggttgtctttttattactaacttgtaagaattatttatatattctcatacaagtcctttagtatatgtatgatttggaaatactttcccccattttgtggatttttttctctttctttgtttctttttcttttcttttcttttttttctttcttttttttttttttgacagagtcttgctctgtcacccaggctggagtgcagtggcacgatcttggctcactgcaacctccgcctcctggggtcaagtgattctcctgcctcagcctcctaagtagctgggattacaggcacccaccaccacacctggctaatttttttttttttgtatttttaatagagacggggtttcgctatgttggccaggctggtcttgaactcctgacctcaggtgatccacccccctcagcctcccaaagtgctgggattacaggcataagccaccgcaccagccatttttttttttcattttctcgattgtgtcttttaagcacaaaagtttttgcttttgatgaattccaacgtatatrttttttcttatgtcccctgtatttttggtgtcatatctaagaaaccattgcctcacctaaggtcataaatatatgcttatgtttccttctgagttttataattttagctcttaccttaggtctatgacccatttgatttgatttttagtatgatatgaggtaggggtctaacttcattcttttgcatktggatattccgttgcctcagcacaatttattgaaaagactatactttctccattgaattgtcttggcccttgtcaaaaatcaattgaccatagacacatggtttatttctggtttctgtgtctatccttacaccaatggcacactgttttgattattatcactttgtagtaacccttgaaatcagaaagcccttcaaccttatttttctttttcaaaattattttggctaatctaggtccattgccttttcatatgacttttaggatcaatttctttaaaaagagccagctgggattgcaatagggattgcactaaatctgtagattagtatgggggttattgccatattaagtcttctgatcaaaacatgagatttttttatacctttctaatgattttacactggctacaagaaaaagtctaaactctgctacttgaagtttggggttccttctacatcaagcccctggtgtacttcaataatacactttctctactttaaccatgccaattattcccatgtcctctaagcagaataggtccccactgaagcttgaactcaaaggctgaggtgggcggatcacctgaggtcaggagctcgagaccagcctggccaacacggtgaaaccccgtctctactaaaaatacaaaaattagcctggcatgttggcaggcacctgtaatcccagctacttgggaggctgaggcaggagaattgcttgaacccgggaggcggatgttgcagtgagccaatatcatgccactgcactccagcctgggtgatagaacaagactccatctcagaaaaaaaaaaaaacttgaactcaagagcaaaagtcgtgatgcatgtctgcatcccatgcaccaaactcaatgcctaagaaggtgtcctttcagtaaaaatttgctaaatttaagctgatcagtcaagaccaagctaaaatcattttttaaaatggaaatccagttcagttccacctgctcctttagaattctccccaaaaccactctctaacccacaattactggcttcccctcaacatctatggcacatgatgttgcatatttttgtacataataatgtatttcttgtttccttccaatgaaaatgaaagcactgtaagagccaaacacatagtaaatgctcaagaaatattcatcacattgaactttgatttggattgccgtattttttcagctatgtggactaacattgccctgttcttgcctccccaggggatgttctggtgttcctggacagccactgtgaggtgaacagagtatggctggagcccctgctgcatgccattgccaaggaccccaaaatggtggtgtgccccctgatagatgtcattgatgatagaactctggagtataagccctctcctcttgtaaggggaacttttgattggaacctacaatttaaatgggataatgttttctcttatgagatggatggaccagaaggatctactaaaccaatccggtgagatttcttctggttttggaaaaatatagcatacgtgtattgagacccagggggaaaaagcctccagagattattctttcaagttcttgggcttaatcaaaatgttatgttacttgtttctagaagtctttaatacagtaatagaattattgttaatagaatcacttaggactcaatatataacgtgatatgatatttatcttcatatcatctataactctttgattctctggtactgaacacaatcctatatggattcaatcatgactttcaggagcaatatttcatttgactaaaagctcaagtcaaacagatctggtttgaaggagagactccatcatttgttagcagtttagggctgccatgtacagttgcaccagctgtgcactgcacatctccaggagatactgttcacacaaagaccacaaggtcaatggcatgtctggaattgtacattaagatggccctcagttggcacaattacctctctcaacttcaatgtcgtcctcatctgttaaacagtgatagtaataattaacacatttcttaggatcgttgaggggattaaatgagccaatacatgtaaaacacatagcataaggcttgacacagaggaagtgatctgatcaatatcaacattagctacagtaatgtcacagactttggaacaaagaggaacaaaagtgtactttattgtaataaaatgtaatatgtagaaatctcaacttaataaaaataaacagcattaatcttttgagttatctcaaaactattttaaatagttacttttagtaagaaatagctatggtgttccaattacacaaacttggtttataatttttgtaatatttccatatctcacatataaaacatttttaggctctaatgtaaaaataactgatattcaacagggaaactgtattcctaatatttatttgctaaatggtaaaatgtttagaattctaatacactgctcgtgtgtatatacattggatcattctttttgaaaacaatttggcaatgcaaattaagaatcttataaatatccttattctttgatgcagtaatccacttacttgaatttatttgaagagagtcagaaataagcacggagatatatatagtgtgtcaatatttatattcataaaaaactgaaaacaacatattcaatactattgaaatgggtaaaaaataaagtatattcatttttatggactatcacataatcattaaagttaagttttcaagggctaattaactagaaagaaaacttctcatgtgttaaattaaaaaatcaaaccataaaaaatgttctgtcagtatacctttgtgtgattaaatatgtacctattatatgtaatatatattatacatattacatatattataattgtatgttacattaaaatatataatatgtataagaaaacataagttattttttaaaggttaaaagaaaaaataaattttattttgttattttattgatttattattatttgtataaatataaggggtacaagtgcaattttgttatatggctatattgcctagtggtaaagtctggactttccaagtatccaccactcaaacaatgtacaccggacccattaagtcacttctcatcatccattgccctcctgtcaccacccttctgtctccaatgcctgtcagtccacactctatgtccatgtgtatacattatttagttcccacttataaatgagaacatgtgtatttctctttctgcttctggattgtttcacttaagataatggcctccagttccatccatgttgcagccaaagacatcattttattcttttttatggctgaatagtattccattgtgtatatataccacattttctttatccagtcttccactgagggacactttagttgatcccatgactttacagttgtgaatagtgctgtgataaacatacaatggcaggtatctttttgacacagatgatttctttccctttaggaagatacccaatagtgagaatgctggattcaatggtagttctacttttagttcgttgagaaatctctgtattgttttccacagcggttgtactaatttacattcctaccaacaytgtgcaagcgttcccttttctcctcatcctcgccagcatctgttacatattagtcatggtattaattagcattcatatctgaagatacatttttcccttagttctaatgacgaccaaaaaagctaggtgcaatgagttttggaaaacttaacacacacacacacaaaaagcaaaatcatgcctagggcttaagccaatgataactcaagacctccccagctccctgacatgcaggcatcaccatgaccaaggatcatgcccttttcccccagccacctgcccttttctaagggcagagcaaggccctttcactttctccctgctgtctcagaccacagctgactccaacgttttcggcctgcacaccaaatggacggaactgcagtgccctgagatgagaaataccatgagtggagcaggtttttggcaggaagattctctttggggcatatttgagatgtctatttggcattcaagtggggatgtgaagtaggtagttggatgcagttggatacatgagtcccttatgagatggatgggccagaaggacctactaaaccaatctggtgagatttcttctggttttggaaaaatatagaatatgtatattgagacccagggggaaaaagcctccagagattattctttcaagttcttaggcttaatcaaattgttctgttacttgcttctagaagtctttaatacagtaatagaattattgtcaatagaattacttaggactcaatctataacatgatatgacatttatcttcatatcatctataactctttgattctctggtactgaacacaatcctatatggattcaatcatgagtctggagttttgagagaggtcagggctggaggcatcctttgggagtcatggataggatggatgagaatcactatgtgggtgagtggagaagtgtagaggaccagccctgagccctgggtgcttcaacattgacagttgagaggaggagaggaactggcaaaggagatgggaaggagcaaccagggagggaggagaaggaccaggaaatctggttccctggaggcccagggaggcatgtgtgtccaagagaagggtgtggccagcagcatccaacacagtggctggatcagcgagagaaggactggaaatgagcattggactaaaccatgagaaggtcatgaacaagtcttaattgtgaatggcgggaggcgaagcctgatggaagggagtttaagggaattagagatagtgatggacaaatctttctaaggctttaatacgaaagagagaaaaggggacataactgacaggaagtggggtcaaaataaggcggttttaattttgtaattggcagagataacagcatgactggattctgataggaatgttcctatctggtgcactcggcaatgtgtgtcacatctggtgcagtagrcaccccacacccgacccataagcaaatctgttagctccatctccaaaatatgccaggaattcaaccgcatcttactacatacattgctgcattcttatcccggatcccattatttttctctgcagcccctctaattggcttccctaccctttcccctacacatgggtcttggtttgtgtgttgagtgactcatatccctaaaacataggtgctcaataaatacttatttgaacaaatgaatgtaaacttgtgattatttttctttttcttttttttggggggggcgggacagattctcactctgttgcccaggctggagtgcagtggtgcgatctcagctcactgcagcctcccaggttcaagcgattctcatgccacagtgtcctgggtagctgggattacaggcgcgggcaactgcatctggctaatttttgtatttttcgtagagatggggtttcaccatgttggccaggctggtcttgaactcctgacctcaaatgatccaccagcctcagcctcccaagtgttgggattacaggtgtgagccaccacacccagctgtgactattttcaaactacttagtttggtattatttggccctactattggtggacaaaacaagatgcttcttaatattatggtttgtccagaagtaaatattacaattcacctaatgtctttagaaagggagagctctgagccctgctacccagttcaattgtcatcctcatgggaaacttacattccaaatatcattttccttctcattaggaaaacatttagaatatatcgcatacacattttggtgagaactaagtaaaagttattgcctacttttgttgtggtttttagtaattttatatacttaaatgtataataggataattttagtattaatgttttctcttttttttttttttttttttttgagacagagtctggctctgtcgtcccaggctggagtgctgtggcacgatctcagctyactgcaacctctgcctcccaggtacaagcgattctcctgcctcagcctcccgagtagctgggactacaggcgcatgccaccttgcctggctaattttttgtatttttagtagagacggggtttcactgtgttagccaggatggtctcgatctcctgaactcgtaatgcacccgcctcggcctcccaaagtgctgggattacaggcatgagcctccacacccggcctgttttctcattttaaactataagttattactaatttaatataattttgaggaaactacagaatgactttctctgtgaaattaatttcatatttatgtcccctttctaggtcacctgcaatgtctggaggaatttttgctatacgtcggcattattttaatgaaattggacagtatgacaaggatatggatttttggggaagagaaaatttggaactttcactaagggtaattcagatttcatttttaaaatagctatagagagtgaaacctaactttgtcacatacaatgctgtggtaattatgctcaattttcctacatgaacatccagtaccattccagcagcacatgcaataaacaatttatggggctccttgtaaaaatggaaaacatttaataaaatattagattcttggcctggkgtggtggctcatgcctgtaatctcagcactttgggaggctgaggcaagtggattgtttgagcccgggaatttcaagaccagcctcagcaacatagcaagacccccatctctactttttttttttatgagatgtggtctcgctatgttgcccagggtggtcttgaannnnnnnnnnnnnnnnnnnntaatcctcccatctcggcctcccaaagcactgagattacaggtgtgagctactgtgcctagactctacttcttaaaataaatatatttaatttaatttaaaaatatttggttcttataccatatgttttgttatttctgatgtatggtatatcaaattaatataatattttaaatctattgtctttattgtctcagtagttgtgttttttccaattttttctgttttggattttattttctctctcttttccttccttcttttggccagttatttgttcacttttaaagttcccaagcagacttctttcataatgcttcagatacttgattatgcatataaaaatatctagaacaatatagtttcctccaagcctctatctgatggtccctcttaagcttgttgtttttgttgtttgtttgtttgtttgtttgcttgctttgtttttttcattctcatgttccctttggacgtaggcattattttataacgctcatgcctttggcgcattttattctgtttagttgattattccttgttttattatattgcactctaagaaaatggctcaaggagttcacctcctttcaggatctaataactgtgatcagttttgtgtattatacaggcagagttggagagtcagtatattcctttttctggccctacattccctatagatagcaaatgacaactaatttattattyaaacattaattattcctactccaatatttcaatggcgcctttcctgatggcctgtcatatcttttaaatatacttgggtgtctttttataaagaagtatgtaaattaataagtagctgaaatattctcttgacactggcagctgtctctaaccacgacaagtaaccttgtctttcctgagaaaagaatgatctctgcacctgcatacacctcttcatttctcgtttactcctcattccagtaaatcgatatcctggaaggccctcagctttccgtgacatcgttccaggaactgccaccagttttgtagtgatgtccttaatggatggcttttgatcttccatctatctgaggtcattgcagcatctgacactaaactgtcttttctggaagttttcttggacgttaggacaatattcctggtttgccttccattgctcagttgttctcagtttcctttgtaggaatttctgctgtggctcatctcttagacacaggtgtccccaaggtttccatccttgtcagactttgcttcttaccccatgtgctcttcagggctcagggctagcatccaggtcctctgctcctgtgaagccacactggttgttaacataatgcagtctttctgcatctggtgtgaaaaaacctctactctgagccaaccaaataccttccacctgcagcccaaccataggtctacgctccctggaccttcccatgttccagtaactaagggaatagcacttggcagggcaagtctactctgatcgccgagggtctgtgccacacccttgttgatatttttagtaggatacttgcatcagtccccatggctgtaactaatacctgtatcacgataatatccaactctatagtttcagtttaggactatctcttgagagtaatatttaagctcaatctagccatcatttaaggagcacttcctttaagtcaaactgtgctgtatgctgagcattgagaagaagacacagtcttcattaattcatccatgcaacaatatgtattgagtactgttatgtatgaagcactgtgctgggtgctaaaatacagtggcacacaatacgaaagtggcttcttttttttttttgagacggagtcttgctctgtcgccaggctggagtgcagtggcacgatcttggctcactgcaatctccgcctcccaggttcaagcgattcccctgcctcagcctcccgagtagttgggactacagacatgcaccacaacacctggctaattgtttgtattttagtagagatggggtttcaccatgttggccaggatggtcttgatcttctgaccttgtgatccgcctgcctcggcctcccaaagtgctgggattacaggcacaagccaccgcgtccagccaaaagtgcttctaatgtcatgaatcttctatctattgagtagggtgagattatcagatatttaattttatttttggcccaggtgcggcagctcacacctataatcccagcacttggggaggccaaagtaggtggatcacctgaggtcaggagtttgagaccagcctggctaacatggtgaaaccccgtctcttctaataatacaaaaattagctgggcatggtggtacacgtctgtaatcccagctactcaggaagctgaggcacgagaattgcttgaacctgggaggtggaggttacagtgagccgagatcgtgccactgcattccagcctgggcggacagagcgagactctgtctcaaaaaaaaaaaaaattatttttgataaatgcaatagaaaaatacagagtattatgggaccctctaaaaggagaacctagccttctcttgggggattatgtgtcttagatggcttccctgaagaactgacatttaagatacatgtaaaggataaaatatattttatttaacaagttcttatatctgacatgcactgctctaaaatcttacagatattaactcatttaatcctcctaacaaacctgtaaggtaagtaccaccattatctctgacttctagtggagaaaccgagccacagagaggttgagtaacttgcccaaattcacagaactagtaagcactctgctcccaacctgttgcttcctgcctcatgctgtctactcaacttcaggtcttgagaccccaccagctcagttccaccctgtttctaagtcacttccatctgaggccggcaatgtattggaagcctccaatgctctgaattttttttcagttgccctgaactcagtgctactattgctcgtggaaagtgatggttcgtggatgcccacaaagctacaggttcacttccagtctctgaatggttctggtaactgagcttcaacatggcatttcaattttcctggcaaaacagaggctggcctcaaacagccccaacaatctgcagtcttggttcacctgatctccccgacacctgcagtccatcctgccatccccagatgctggcaaggtgtgctgctccaggaaccagggccttgccctgcacttgaaagattatccctagagaagcccttttctctgcctctcccccatgctgaacctcttagatatcaatgccagtttagactccacccaaggttgctaaatctccttggatgctctggtgtgaaaacaaaccatatgttctgtaatagagaaatagtcaagcaaattctcaaacacctgcacaagggagaattaggcaagtcactcaacagtctcctccttctctgcctggaacactccagtacctcagtgggttacccttggcccatctgctcagaatttctattcctaagagttttaggattcaggcagttattgtcacagcagcagtcagctcttgccatcatgatgctatgtaataaaccacctcaaaactgagtggttgagaacaataagcatttactttttctttcatctgtccatggttggccaaagtggctctgcctcagaatacaggttgttgggctgggctctagtctctgaattggattcagatctgattatcattctaggagtagcagcgactcacagcatatccttctcatgctgaatggcaggaattcaaaagtcaagccaaaccacacagcacatttatacctctgcatgcatgatgtgtgctcacgatccattggccaaatgtgtcaaacagagaagcccaaattcagtgggtcagggaaacacgctgttctgcaagatgagggacaaggactgagctgtttattgaacaagatttcaatctatcacaccaagtttctggaatgaccagctaagtggatggaggtcttatttacttgagtaaataaaactggtgttagccagtcagaatggctattactaaaaagtcaaaaaacaaacaaacaaacaaaaaaacaaacagatgctggcgaggctgtggagagaagggaatgctatactctgctgtgggagtgtaaattagttcaaccattgtggaaagcagttgggagatttctcaaagaatttaaaacagaactaccatttgacccagcaatcctattactgggtatattacccaaaggaatatacattgttctaccataaagacacatgcatgcctatgttctcattgtagcactttccacaataacaaagacatggaatcaacccagatgcccatcaacagcggactggggccaggcatggtgattcacgcctctaatccgagcactttgggaggccaaggtgggcagatcacttgaggtcagaagttcatgaccaacctggccaacatggtgaaaccccatctccaccaaaaatacaaaaatgagctgggtttggcagtgtgtacctgtaatcccagctactcaggaggcttaggcatgagaatcgcttgaacctggatggcggggcatccaggctggatgacagagcaagactcagtctcaaaaaaacaaaaacaaaaaccagtggactggataaagaaaatgtggtacatatacaccatggaatgttacacagccatttaaaaataataaaatcatgtcctttgcagcaaagtgggtggagctggaggtcattatcctaagcaaattaacacaggaacggaagactaaatactgcatgttctyatttacaagtgagagctaaacattgtacatggacacaaagcagggaacaacagatactggggccttcctgagggtggaytgtgggaggagggtgaggataaaaaactacctattgagtgcgatgctcattacctgggtgatgaaatgacctgtgctcaaaacccccagacatgcattttacccatgtaacacgcctgcacatgtacccttgaactgaaaacaaaagttggaaagaaaaaaaaaaacaaaaactggtgttaggaggaaaatgctccttcatgtatcagctagcttttgctgtataacaaactatcccaaaacacagtactttaaagcaacargcaatggttatttctcataatccattgtatcgctaaagtggttcttctaggcttagccagaatagctgagttgtgttggtgtgagagctactcacagagtggttagagtaattaaacaaaagagttatggcaagtatactgtaagatgagaaatcaggtgcacaagatttatatcataagcacgttctttggggtattatttttaataataaaaatcagaagctaccaaagtgtccaaacaacataagacttcaaaaataatttcacacaacatcaaatgaaaaaaaatcaagttatcttaatgtttatgtctacgtgagtttacatatatacctgggttaatattgactcactcggaatgttaggacaagaagtgaattgtgttttcttctgtgtgctttcctgcatttgccaaattttcaatggttatattttacttttgtgtagtaaaattaatagctattaaaagtgagcaacataaggagttttaggtattaaaaaagatgaataattgaattcagtcatgatcagcatttctcttgtttcttgcctacatccagcaattcctgtaggtaattatgagagaggcagaaccccttcatcttcattgctggctctcagtcaggctttctaaatttgaaccttgtactctactgtgtaacttctgtgtcattgggcaaacttcttaaccaatctatgtgttagtttcctcatctgtaaaatgggaataatcacagaatctgaattataaggctgttgtgagaattaaataagaaacttaattagccattattatgggtttttgtggttgtcgttttttgtttttgagatggagtgtcgctatgttgcccaggctggagtgcagtggcacgacctcggctcacaacatccacctcctgagttcaagcaattctcctgcctcagcctcccaagtagctgggattacaggcatgcgccaccacgcctggctaatttttgtatttttagtagagagagggtttcaccacgttggccaggctggtctcaaactcccttccttaggtgatctgactgccttggcctcccaaaatgctgggattacaggcatgagccaccgcacctggccattatattggtttaaaagcagttgcctgttagcagtaataatgcattcgtatgttttttgttcttcttatgcctagatctggatgtgtggaggccaactctttataatcccctgctctcgagtaggacatatcagtaagaaacaaactggaaaaccttctacaatcatcagtgctatgacacataactacctaagactggtgcacgtttggctggatgaatataaggtggggaacacatccttgacttggaaaatgtatgcgaggccggagcaggacttgttctgaggaagcctgctgctgcctttccagatccagcgtttgttctggaggtcattatcctaagcaaattaacacaggaacggaaaaccaaatactgcatgttctcatttacaagtgagagctaaacattatacatggacacaaagcagggaacaacagatactggggccttcctgagggtggactgtgggaggagggtgaggataaaaaactacctattgatagttattgatagttgttcttttctctgtttttcttgaatacagcacccctctaacccctcatcaatccatccccaaccctattctcagttcatcctaagctgctactcttacatctcattatttttgttttaatttctgggaaaactcaagtctctcagaagtaaatcaatcaacatgagcagtcttttttatggaggtgctggatctattccctccgttcccacctccagggaattgtcccacacctgaagcaaatagcttctccttgccccgtccccatgtgcaactctttttttttttttttttgagacggagtcttgctctgtcgcccaggctggagtgcagtggcgcgatctcagctcactgcaacctctgcctctcggattcaagcgatcctcctgcctcagcctctggagtagctgggactacaggcgcataccatcaggcctggctaatttttgtatttttagtagagacagggtttcaccatgttggccaggctggtctcaatctcttgacctcatgatccgcccacctcggccttccaaagtgctgggatttataagagtgagccaccgtacccggcccatgtgcaactcttgagattctttttcttccccgctgatttcccaagcaatgtggatgctgctggtcttgagaccgtgtgagaacttccactaccacttttcgaccaacagccaaagatttctgtatcaaaactataccctgtcatctgtgcatttccccaggagttaagtaccttgccaggacttacaagggtgcatgtccatccagaagctatgtgtaaataaatacaaaaaccccagcaaaatctcatttcagatgaacaaatagaaatgtgtaagaatctctctgacagtgtatgtcctggtcttcatcttatgtttctctaactgaaaaaaacacactttaattatgaaggtaataatgctccatttcttttgtaattagagaaatgtgaactaaaacttcaaagagctatttcaacaccaccacttagattagcagaattttaaaagtctgacaggcctggctgggcacagtggctcatgtctctaatctaagcacttgggaggccgaggcaggcagatcacctgaggttgggagttcaagaccagcctgaccaacatggagaaacgccatctctactaaaaatacaaaattagccgggcatcatggcacactcctgtagtcccagctactcaggaggctgagggaggagaatcgcttgaacccaggaggcggaagttgcagtgagtcaagattgtgccgttgcacttcagcctgggcaacgagagcaaaactccgtctcaaaaaaaaaaaaaaaatcttatgggcccgagtgtcagtgagcaataggatctctcagctttctttcacttatgggagtgttgacttttacaaaattacatctgaaaatggcgtggcagcacctactaaagtaaaagatctgaataccttgtgattcagcagttctgctcatgcatatgctacagaagcgcatgcttttgtgcaccaggacacatgaacaagaaaactaataaacagcattatttgttttagctaaaacttaatacaatacaaatactcatcaacagtacagtggacaactgtgatatatttagtcgctataatcctatacagcaatgaaaattaactgggctgggcatggtggctcacacttgtaatttcagcacttagggaggccaaggcggatggatcacctgaggccaggagttcaagaccagcctggccaatgtggtgaaacctcatctctactaaaaatacaaaaaaaattagccgggcatggtggtgggcacctgtaatcccagctactcgggaggctgaagctggagaattgcttgaacccaggaggtagaggttgcagtgagccaagatcacaccaccgcactccaaccagggtgacaagagcaaagctccatctcaaaaaaaaaaaaaagaaaagaaaagaaagaaaaccaactatagtgtatagtcatgtctcacttaacgatgggaatatattatgagaaatcatcattaggtgatttcattgttgtgggaccatcatagcgtgtacctacacaaacctagatggagatggtatagcccattgcacaccttggctatatggtatggcccattgctcccaggctacaaacctgtatggcatgtgactctactgaacactgtaggcagttgtaacacaatggtaagtatttgtgtatctaaacatatctaaataaaaggtacagtaaaagtatggtattataatcttatgggactaccattatgtacatggtcaggcgttgactgaaacttcatcacgtggtacatgactgtacctacaagagcataggtaaatttcagagatgtaatggtgaatgaaagcagccaaacacaacggaacttatactgtattatttccttcctgtaaagttcaaatgggtaaaattaaacctataatttgtgcatgaataatcagatatcaaagctagaataaaaagaaattaatacgtaatcaagatagaatgtaaaacgaaggaaaagggcaatgatcaggaaagaaaaagcagggggctttcaaattgtctttcaaaatcagaacatataaacatatctcatttttttaaatagttcctttaactggatctaccaaaattgatcccattaataaatagtaccagttgataagcattctgatttcctcggctttttgctattttcttgacaatcctcaaatgagaattctttttttttttctttcttttgaaacagagtcttgctctgtcacccaggctggagtgcggtgatgcaatctcggctcactgcaacctccacctcccacgttcagtgattctcctgcctcagcctcccgaatagctgggactacaggtgcatgccaccacacccagctcattttttatatttttaacagagacggggtttcaccatattggccaggctggtcttgaactcctgacctcatgatctgcctgccttggcctcccaaagtgctgggattacaggcataagccaccacgcccagccttgaaatgagaattattgacatacttttttgtgcatatttttgcaaatatatctttggaataaattcaagacatgaacttgctggggcaagagttagtgcattttaaatcctgatggggtaatatccaaatgatcttcactgtctgtctcgtcatctgtgctgccatcaaatgtatacgaaagtgcctgtctcctcatattggttatagctgaactgtttgtttgtttgttttaatcagataggttaaaaaacatctcattgtttaaaattgtatttcattacgacaactcttgagcttattttcatgtttgttgattttttttttctgtgaacgctggtcagggatctagatggttgaattgaacatagctatttctgcatggtttactgactttcacagagcaaaaagttaacttaaagggatatgacgtgttaagtataaaaatcaatggattgcataatacagcacaatgggaaatttagtgactgattgggacaagagagggctttggacaggaagatgtgcctaaggtcatccatgctgtcttgtctccaaaattatggcatcctcccccacctgcaggctcaccccctgcaccaatccaccctggggacctaggggtggcagaatgcgatggcaaagacctacagtggtcacggatccccagggagaatccaatatggcatgcccataatacattaatttggatgagcaaactccttctgtcattcaacactatcactaccctgaatgccaggcctgggaaaacacagatgaaaagataagggttctgtttgcgaagggcttcagtctacttagaataccttttttcaacatggggccaacagagtccattagacattcattcttggggcttccttaagtcagagcacacaaaaaactaaccaagtgtggtaataatgaccacctcagacatgacacttagtatgtgccaaccatgctcgcccaggggctttgcatgtccctattagactgttcaaccctcacaagcacttcgcaaggggragacttgcctagggtcacacagaccctgaatggcagggccagactttgaatccaggctgtactcctgcaggatctattctccctttactacatcatcccccatttctgaaaagacaaacatactgatgaggaccagggactaacggggtttgtccttgggtattgttgaaaaaacaggagaaaggggataccgcaataggtggctgtgcttctttggctcctgagaagcaggacccagtcttcctggatcccgctagggtgccatggcacgtgctgtgaacatatgcagggtgggtaaatccgaggtcccatagtatgtctctgccttcattccctagacagaaaaaaattgggatctggagggcttttttagttcacatgatgaaaatacatgcgtctatgttagatataatcatttgatcagcaaagatttgtttggttgaacgtaacgactgactctatattttcatttaggagcagttttttcttcgaaagcctggtctgaaatatgtcacctacggaaatattcgcgagcgtgttgagttaaggaaacgactgggttgcaagtcatttcagtggtatttggataatgtcttcccagagttggaggcatctgtgaacagcctgtgaaaggaaaacaaatcactttcattaataaagggttaaaagtctcctagtcattcaacatagtgtcacaagagtgtaagtttggaacatcgtggaattacgtgaaatgcaattaaaaaaatatgaccagacgtgagtgcctttattttcccttcaatgaaaattcttgatactttgttactcatctgctactgaatctctgaggtgacaagaccttgaacattagaaaggtaagtggtcacacagttacgactctatcatacagctgactgagttaaagtgcatttgtttaccacagccacctggccctggtagactgtagggactgctttccctttgccaacccggcttctgccccagacaatctgtcgcgattggcttcttagggagccatgctctcgtgactttggctgagctgcagcaagctcctttcttcctgccagggtagattctggtaacgacaccttactcagctgcatacctgaacatctggcgtccagtccacctgcctgggtgtctggtcagctctccaggccagcttccccatctgttcctgccagcccttctgtcatctgaagatactccgtcttctgtgagtctcgctctgtcgccaggctggagcatagtgttataatctcggctcactgcaacctctgcctcccgggttcaagcaattctcctgcctcagcctcccaagtacctgggattacaggcgcacaccaccatgcccagctaatttttgtatttttagtagagacagggtttcaccatgttggccaggatggtctcgatcttttgaccttgtgatccggccgcctcggcctcccgaagtgctgggattacaggcatgagccaccacgcccggccaattttgcctttttcatgtctgtctcctcctatggctctggcctccagctctccagacacttcttgactcttggtaaactgtttagctgggatcagggaagcagcagctgggtgacttgtctgtcctgtgtaaacacattctcagatgtccaaagtacttctttggcatctttggagttagacagatcactgttggttttacgctggtgatggtggctaagaaggtgaaagacactgaattcagaaagagagacagataatgagagaagaaacacattgaaaggggcaaaaaaaaaaaaagtggaagagaatagtctatgctggaaagaaggtaagttagtttttacagcagaaaaacaatttgaatcatctattgagctccttcaatcagacaggtattcttctagttgctgggaatgaagttttttttttttttttttgcagacagagtttcactcttgttgcccaggctggagtgcagtagcccgatctcggctcactgcaacctccacctcccgggttcaagtgattctcatacctcagcctcccaagtagctgggattacaggcacccaccaccatgcccaactaatttttgtatttttagtagagatgtggtttcatcatgttggccaggctggtcttgaactcctgacctcaggtgatccacccgcctcggcctcctaaagtgctgggattacaggtgtgagctactgcgcccggccgcaaataacccctttatacctatctatttagcaaaatactgcataaaatctattgctagacagacatgagctgatctattacagacagccacttgattgatcctttaaaaggttgatctggcagcacaaaacgagtgccacgcttgattgtattcttggcccatatattatttatacctttcctgcctctagaaagtcatttaaaaattaatcataataaacccatgagtctactaaaattatgataaaatgcaaaacaggccaggcgcggtggctcacgtctgtaatcccagcactttgggaggctgaggcgggtggatcacgagatcaggagtttgagatcagcctggccaacatggtgaaacccggtctctactaaaaatacaaaaaaattagctgggcatggtggcgcacgcctgtaatcctagctactcaggaggctgaggcaggagaattgcttgaacctgggaggcagaggttgcagtgagctgagattgcaccactgcactctagcctgggcgacggagtgagactccgtcaggaaaaaaaaaaaaaaagcaaaacagaacccggctcagtggcacgtgcctgtaatcccagctatttgggaggcacaagaatcgcttgaacatgggaggtggaggttgcagtgagccgagaccaagaccaagatcacaccactgcactccagcctgggtgacagagactgtctcaaaaaacaaacaaacaaaaagcaaaatagaaatcttgtagctgaaaaaataaaagagaattatagtagtataaatatggagtatcttcttaaagtaacagtttttttctagttgaaatttgagaatatatatatgttatatataattattatatgtaatatataaatgatatatatgtaacattaaaaagtatattttttttctggtaagcataaagaatggatgctgtaaatatcagctttcccaaaagcaaaagacaggagtgttctcttttgttaaaagccgtgggcctaatattaagtcttagttttgtaatgtaatttagtttaggtactagataacacagataagtcctagaaattgttcagcatgtcccttggacagtatcttcttaaatattgcttcagttgaccctaaaatagaaaagaaatcagaatcaatatccaaatatttggtgtgattaaagggaaattgatacttgcctatagatggcaattttttgtttttgtgtggaaatttaaaaatctgatttgtattttgaagctagttgaaaagtatctggtaacctgcttagggtttcttacaaaacagtttttggtatgatggaatgctcaaacaagtctgaaattaagcccaggagttctgtaactaaaacatccttctaggaatttatcccaagacacacctgtatgaaacaacaactaagaagagctgacatttgctgagcttttactacgtttcatactctgttataagtagtctgcatggattatctcctttcattcatacaacaactttatgagttctactgctatcctcatttcatagatgagaaaacgatggttagaatgtgcccaggttaacgttgccctatttggctaataaaaatacaggatgcctggttaaacttgaatttcaaatagacaataacattttactgtacatatggctacattctgaatgtgtcttccataattcatgttgaaacaactgacaaagcaacagcactacagtttgaataccttttatccccaccaaaattcatgttgaggcttggaccccagggtaacagtgttgagacagagtaggacctttaagaggcatttgagccatgagggaccagccccccatgaaaagattaacgcagtcactgagagttcccagtctcttgagactggattaggtaccttgagagcgggttgttaataagtaacattgcccctttagccagtgcgcgcttcctcttccgattctctgccacgttatgatgtagcacaaagccctcaccagcagcctaccagatacggctgctggatcttgtacttcccagcctccaggagagtgggaaaacaaatttgtttttaaactacctagtctcaggtattttattatggcagcacagatgaagacaagcctctcacatattgcacaggatatacttaaaccacaaaattattcttaatctggaattcaaatttcaggccatcctgtatttcatctggcaactgtatccaaggacaaacaataacacggcccttacatgatcctaatcagcgtggcctcaaagattgtgtttaaccagaatgatacgctgaaaagagcattttagtgtcattctgtatgatagtgaaaaattggagctaacccaaatcctcaattacgagaataatggttaagtaattattgcacattaatcaggtagaatagtatttaaagtaataaacagatgcatctcatactcatcaggttggcaaatatttaaatatctgatactatcaagggtcaggagaagatgaaacaatggaaatttacatgccctgattaatcctagagcatgatttcaaatgttaatttgtgtataaatcacctggaaatcttggtaaaaatgcagattttaattaagtaggtggagcacaagactccccatttctaacacactccaggtgacgttggtgtcgcttgttgctggaccaccatttgagtagtgaggccctaaaggtctggtcttcaaactcttttgcttgagtatatactaaaataataaggtttaaatacaagaacttagtatccccttatacatatttaaggtgatatttaacatttttcattactagtttaggtagttggaaggattactttctggaaacatatttatgtatttaaataaacttgtaatacacttttaaatatacctagtagactttgccctagtttgcctgccactgctgtgaatagtttctgagggggatcccagcaggattgatccccaatgacgcttatttgatattatactatgtatattttacatgagctgcaaccattgaaggaaactgggcaaagatacctgtgtgctgtctgcactgcccttgcaagagaaaccagtacctgaaatatctgtcaatctccaatcaagacacaagcatggtagaaggagtcaaaagcattcaacttggcacccagcagcagttctctttggctgagggaagtggccacaagactcagctgggggccatcagcggcctacacacccaacaactggagaaatgagtcctcagtccttaaggggaaacctgggtggtacaacatggcatcccctacaccctgacaaccccatggggtatctgtggaagaggggctggggaatgtggttagctcagttcagctcaagaaggccactactttggttcaggtggtgctctttaatttatagtagctgtagaagttcctccattgctacgcgtgtaccccatcagactttaattgtgaagcaatgagttctttaaaaaagttcaaaaatattcttaaccaagtgggatttatttcagaaatgcaaagaagattagtattaagatattcttcaatataacttggcattattggccaaagatgaatgcccacaccatttttcttaaaaattgccaattccccttttatggtatttgtatacattgcactattatcaccaaggtatgagtgtttttttcaccacttctctctttacaccttaatctacattttcttctatcacaagtggcgtttaacttcttttaatatgtttaagggcatttgtctttttttttttttttcacttatggggtctcgctgtattgcccaggctggagggcagtggctattcacaggcgcgatcccactaccgatcagcacaggagttttgccctgcccggtttccgagctgggccagttccccactccttggggaacctggtggtccctgctcccgggaggtcaccacaccgatgcggaacacagatgcgtgtcgccgcgcaatgggcacagcgcatacagcgcagagctcccgggctcaagcgctgctcccgcctcagcctccggagtagccggggccacaggcagggcatttgtcattaatggggtcttttgagaccgcgggtgacagacaacaggagccaggccacgcgcggcgcctctgcgcgaacgctagggaggactcagcgcgcggcggccggtgacgtcagggcagcgagaggtttcgtcaccgcggcgcgggggcggggccgcctgtcacgcggcgccggcggacgcgcggcgctgggcggaggcagcggctcggggactgggcgagggccctgggcctgaggaggcgcggccgccactgcgcccagcgcctgcgcgacgcctggctgctgggccccggggcagttcagcccgcgccgctcctgcgggtcggactggggctgtggcgggagagaagatgccgcagcccgagtcccagaaggcggcgatcctgggctgcgggcaaggcggtgagtaccctctaggcggcggcctcccggcgtccctcagcacctcgagagc

SEQ ID NO: 94387 - DNA, 108597 bp, Homo sapiens
atttcagtggtatttggataatgtcttcccagagttggaggcatctgtgaacagcctgtgaaaggaaaacaaatcactttcattaataaagggttaaaagtctcctagtcattcaacatagtgtcacaagagtgtaagtttggaacatcgtggaattacgtgaaatgcaattaaaaaaatatgaccagacgtgagtgcctttattttcccttcaatgaaaattcttgatactttgttactcatctgctactgaatctctgaggtgacaagaccttgaacattagaaaggtaagtggtcacacagttacgactctatcatacagctgactgagttaaagtgcatttgtttaccacagccacctggccctggtagactgtagggactgctttccctttgccaacccggcttctgccccagacaatctgtcgcgattggcttcttagggagccatgctctcgtgactttggctgagctgcagcaagctcctttcttcctgccagggtagattctggtaacgacaccttactcagctgcatacctgaacrtctggcgtccagtccacctgcctgggtgtctggtcagctctccaggccagcttccccatctgttcctgccagcccttctgtcatctgaagatactccgtcttctgtgagtctcgctctgtcgccaggctggagcatagtgttataatctcggctcactgcaacctctgcctcccgggttcaagcaattctcctgcctcagcctcccaagtacctgggattacaggcgcacaccaccatgcccagctaatttttgtatttttagtagagacagggtttcaccatgttggccaggatggtctcgatcttttgaccttgtgatccggccgcctcggcctcccgaagtgctgggattacaggcatgagccaccacgcccggccaattttgcctttttcatgtctgtctcctcctatggctctggcctccagctctccagacacttcttgactcttggtaaactgtttagctgggatcagggaagcagcagctgggtgacttgtctgtcctgtgtaaacacattctcagatgtccaaagtacttctttggcatctttggagttagacagatcactgttggttttacgctggtgatggtggctaagaaggtgaaagacactgaattcagaaagagagacagataatgagagaagaaacacattgaaaggggcaaaaaaaaaaaaagtggaagagaatagtctatgctggaaagaaggtaagttagtttttacagcagaaaaacaatttgaatcatctattgagctccttcaatcagacaggtattcttctagttgctgggaatgaagttttttttttttttttttgcagacagagtttcactcttgttgcccaggctggagtgcagtagcccgatctcggctcactgcaacctccacctcccgggttcaagtgattctcatacctcagcctcccaagtagctgggattacaggcacccaccaccatgcccaactaatttttgtatttttagtagagatgtggtttcatcatgttggccaggctggtcttgaactcctgacctcaggtgatccacccgcctcggcctcctaaagtgctgggattacaggtgtgagctactgcgcccggccgcaaataacccctttatacctatctatttagcaaaatactgcataaaatctattgctagacagacatgagctgatctattacagacagccacttgattgatcctttaaaaggttgatctggcagcacaaaacgagtgccacgcttgattgtattcttggcccatatattatttatacctttcctgcctctagaaagtcatttaaaaattaatcataataaacccatgagtctactaaaattatgataaaatgcaaaacaggccaggcgcggtggctcacgtctgtaatcccagcactttgggaggctgaggcgggtggatcacgagatcaggagtttgagatcagcctggccaacatggtgaaacccggtctctactaaaaatacaaaaaaattagctgggcatggtggcgcacgcctgtaatcctagctactcaggaggctgaggcaggagaattgcttgaacctgggaggcagaggttgcagtgagctgagattgcaccactgcactctagcctgggcgacggagtgagactccgtcaggaaaaaaaaaaaaaaagcaaaacagaacccggctcagtggcacgtgcctgtaatcccagctatttgggaggcacaagaatcgcttgaacatgggaggtggaggttgcagtgagccgagaccaagaccaagatcacaccactgcactccagcctgggtgacagagactgtctcaaaaaacaaacaaacaaaaagcaaaatagaaatcttgtagctgaaaaaataaaagagaattatagtagtataaatatggagtatcttcttaaagtaacagtttttttctagttgaaatttgagaatatatatatgttatatataattattatatgtaatatataaatgatatatatgtaacattaaaaagtatattttttttctggtaagcataaagaatggatgctgtaaatatcagctttcccaaaagcaaaagacaggagtgttctcttttgttaaaagccgtgggcctaatattaagtcttagttttgtaatgtaatttagtttaggtactagataacacagataagtcctagaaattgttcagcatgtcccttggacagtatcttcttaaatattgcttcagttgaccctaaaatagaaaagaaatcagaatcaatatccaaatatttggtgtgattaaagggaaattgatacttgcctatagatggcaattttttgtttttgtgtggaaatttaaaaatctgatttgtattttgaagctagttgaaaagtatctggtaacctgcttagggtttcttacaaaacagtttttggtatgatggaatgctcaaacaagtctgaaattaagcccaggagttctgtaactaaaacatccttctaggaatttatcccaagacacacctgtatgaaacaacaactaagaagagctgacatttgctgagcttttactacgtttcatactctgttataagtagtctgcatggattatctcctttcattcatacaacaactttatgagttctactgctatcctcatttcatagatgagaaaacgatggttagaatgtgcccaggttaacgttgccctatttggctaataaaaatacaggatgcctggttaaacttgaatttcaaatagacaataacattttactgtacatatggctacattctgaatgtgtcttccataattcatgttgaaacaactgacaaagcaacagcactacagtttgaataccttttatccccaccaaaattcatgttgaggcttggaccccagggtaacagtgttgagacagagtaggacctttaagaggcatttgagccatgagggaccagccccccatgaaaagattaacgcagtcactgagagttcccagtctcttgagactggattaggtaccttgagagcgggttgttaataagtaacattgcccctttagccagtgcgcgcttcctcttccgattctctgccacgttatgatgtagcacaaagccctcaccagcagcctaccagatacggctgctggatcttgtacttcccagcctccaggagagtgggaaaacaaatttgtttttaaactacctagtctcaggtattttattatggcagcacagatgaagacaagcctctcacatattgcacaggatatacttaaaccacaaaattattcttaatctggaattcaaatttcaggccatcctgtatttcatctggcaactgtatccaaggacaaacaataacacggcccttacatgatcctaatcagcgtggcctcaaagattgtgtttaaccagaatgatacgctgaaaagagcattttagtgtcattctgtatgatagtgaaaaattggagctaacccaaatcctcaattacgagaataatggttaagtaattattgcacattaatcaggtagaatagtatttaaagtaataaacagatgcatctcatactcatcaggttggcaaatatttaaatatctgatactatcaagggtcaggagaagatgaaacaatggaaatttacatgccctgattaatcctagagcatgatttcaaatgttaatttgtgtataaatcacctggaaatcttggtaaaaatgcagattttaattaagtaggtggagcacaagactccccatttctaacacactccaggtgacgttggtgtcgcttgttgctggaccaccatttgagtagtgaggccctaaaggtctggtcttcaaactcttttgcttgagtatatactaaaataataaggtttaaatacaagaacttagtatccccttatacatatttaaggtgatatttaacatttttcattactagtttaggtagttggaaggattactttctggaaacatatttatgtatttaaataaacttgtaatacacttttaaatatacctagtagactttgccctagtttgcctgccactgctgtgaatagtttctgagggggatcccagcaggattgatccccaatgacgcttatttgatattatactatgtatattttacatgagctgcaaccattgaaggaaactgggcaaagatacctgtgtgctgtctgcactgcccttgcaagagaaaccagtacctgaaatatctgtcaatctccaatcaagacacaagcatggtagaaggagtcaaaagcattcaacttggcacccagcagcagttctctttggctgagggaagtggccacaagactcagctgggggccatcagcggcctacacacccaacaactggagaaatgagtcctcagtccttaaggggaaacctgggtggtacaacatggcatcccctacaccctgacaaccccatggggtatctgtggaagaggggctggggaatgtggttagctcagttcagctcaagaaggccactactttggttcaggtggtgctctttaatttatagtagctgtagaagttcctccattgctacgcgtgtaccccatcagactttaattgtgaagcaatgagttctttaaaaaagttcaaaaatattcttaaccaagtgggatttatttcagaaatgcaaagaagattagtattaagatattcttcaatataacttggcattattggccaaagatgaatgcccacaccatttttcttaaaaattgccaattccccttttatggtatttgtatacattgcactattatcaccaaggtatgagtgtttttttcaccacttctctctttacaccttaatctacattttcttctatcacaagtggcgtttaacttcttttaatatgtttaagggcatttgtctttttttttttttttcacttatggggtctcgctgtattgcccaggctggagggcagtggctattcacaggcgcgatcccactaccgatcagcacaggagttttgccctgcccggtttccgagctgggccagttccccactccttggggaacctggtggtccctgctcccgggaggtcaccacaccgatgcggaacacagatgcgtgtcgccgcgcaatgggcacagcgcatacagcgcagagctcccgggctcaagcgctgctcccgcctcagcctccggagtagccggggccacaggcagggcatttgtcattaatggggtcttttgagaccgcgggtgacagacaacaggagccaggccacgcgcggcgcctctgcgcgaacgctagggaggactcagcgcgcggcggccggtgacgtcagggcagcgagaggtttcgtcaccgcggcgcgggggcggggccgcctgtcacgcggcgccggcggacgcgcggcgctgggcggaggcagcggctcggggactgggcgagggccctgggcctgaggaggcgcggccgccactgcgcccagcgcctgcgcgacgcctggctgctgggccccggggcagttcagcccgcgccgctcctgcgggtcggactggggctgtggcgggagagaagatgccgcagcccgagtcccagaaggcggcgatcctgggctgcgggcaaggcggtgagtaccctctaggcggcggcctcccggcgtccctcagcacctcgagagctgcggcggcggcggcgcgcggggcctgggcaggctgggggcggcggcggggcagcgcctggctccccgcgggtcctgggctcccgcacgccccctgggcgaggctcgtgtctccgggagacgccgctgcccccgcgcctcccccagcgtctcctgaggcttgttcgcgggcgtgggggcgaggaccagggcgctggcctcgttttcgcgtatttaggacggaggcacacctgatcctgcagcctcccccagcatttcctaaaatgaagtccagatcagtattgtccactttttaaaattaaaagtgcccagaaatagaatagttcacacatacacaaaactagggagaatagtgtggaaggaaatttaatctcgggaccccaaatcactaagccaaagtcaagctgggagctgcgtcaggcaaacctgcccctaagttttgttcctaagacagctgcaaagataaaaagccacacagctccctcaccctttggccaggaggaaattcgctgtggacctccacatctttaccctgaaacagttgtgtggaattgcaccctggcagtgtaaattgacagcttgtcttcgcaggtgaggaacagggacagaactcaagtcatccttctgctcacctgagacagatgcatgtctgacggcttcctctgccctgtatttatgtaaaaatgcagattcactgagccagactaaggcacaagtggctattcctctgcctgccccatggcgtaaattgtgtgttcagtaaaaggcagagcagaggctcaaaagaatgtagccgtttgtctctcatcttacccatgacctggaagccgccactttgagttgtcccacctttcctgcccgaactagtctatacctgtatttgattgaagactcatgttcccctacaatgtataaaactaggctgtgcccccaccaccttgggtacatgctctcaggatctcttgagggcagtgtcatgggccatagacactcatttcgctcagaataaatctctttaaaaatttttttattagccgggtgcggtggctcacgcctgtaatcccagcactttggaaggccaaggcgagcggatcacgaggtcaggagatcaagaccatcctggctaacacggtgaaaycccgtctctactaaaaatacaaaaaataagccgggcgtggtggcrggcgcctgtaatcccagctacttgggaggctgaggcaggagaatggcgtgaatcgaggaggcagagcttgcagtgagccgagatcacgccactgcactccatcctgggtgacagagcgagactccatctcaaaaaaatttatttttaatttttgtgggtacatagtaggcatatgtatttataggtacrtgagatatttgatatggcatagaatgcataatcacatcaggataagcagggtatccatcttctcaagcatttatcctttgttagtgctacaaacaacctgcaaggctcttgtattggtttgaaccccgatgacgcaccaacaacccccacgacatgaggcggtgtggagcaacatgctgttttaataagcgcctgggtgcagacgggtttatgcctaaatggcatcagccccaagtgaggaatgggttttataatagcatcagccccaagtgaggaaggggttttatagtcctctgtaagcaggaagtgtcccagtctgacgtggctgctgcgtaaatgtgtccggaattggttccttccagtggattcttggtctcgctgacttcaagaatgaagccacggactgtcgcggtgagtgttacagttcttaaagatggtatgtcgagagtttgttccttctgatgttcagatgtgtccagagtttcttccttctggtgggttcgtggtcttgctgacttcagggatgaagccgcagacctttgcagtgagtgttacagctcttaaaggtggcacgtctggagttgttttttcctcccagtgggttcatgagctcactgacttcaggagtcaacctgcagaccttcgcagtgagtgttacaggtcttaaaggtggcatgtcgagagttgtttgttcctcgcagtaggtttgtggtctcactgacttcaggagtgaagccacagaccttcacagtcagtgttacagctcataaagttagtgcagacccaaagagtgagcagcagcaagatttattgcaaagaatgaaagagcaaagcttccacagcatggaaggggacccgagcaggttgccgctgctggctccagtggcctgcttttattcccttatttggccccacccacatcctgctgattggtccattttacagagagctgattagtccattttagagtgctgattgctctgttttacagagtgctgattggtctgttttacagagtgctaattggtcggtttttacagagtgctgattggtgcgtttacaaacctttagctagacacagagcgctgattggtgcatttacaatcctttagctagacagaaaagttctccaagtctgctacccagttagctagtcacagagcactgattggtgcatttacaatcctttagctagactgaaaagttctccaagtcccctacccgatyagctagacacagagcactgattggtgtgtttacaaacctttagctagacacagagccctgattggtgcatttacaatcctttagacagagtagttctccaagtccccacccgacccagaagcacagccagcttcacctctcaatcccccccctctaaacaggacaccccaactgctgttgggaatttggccaatgactgctgtagctacttcctgctggataggggtgaagaaggggccctgcaattgtagtgtcctccagaggggaactctttaggccagtgaaagggccagcaggttggtccaggggtcctggtagaagtttagttgagctcatttggagttccatttgtaagaccatctgtagcttgatggtctcaattctagaggaaacaaatttgaaaaggaggttaaaaatacagggcccgaaggcaagtaatagcaagatggctgccacaggacctagaaaggggagaagccatgttgtccaactccagaggttggtgtaagagtttgaaaggcgtctgatttcagaagccttttcctataaatgttgggtggcatctcatactatccctgactggttagtgtaaaaacaacactcttcccctaagaaggtgcagagtcctcctttctcagcagtgaggaggtctaggcctcggtggttttggagagtcattgctgccaaagagtctatttggaattgtagttactatccttactggatagattttgttatttcttgcaaactctcttgagaaatcctttgagagtgtggtagtaggataatgaagtaggtaaactggctattccagttcctgtagcagtggccatttctaaccctataggtaggggtattagttgtatggctctgcactgacggacttgagctttgaggggtactgatagggtctgatttccacaagattagaagttagaataatatatgtttacactgttaacttttagcaaactttacttttgttgaaaaccttgtaagtttgggatttcaattattctttgctattaataagacctcgttcagtccatattaacttagaattgatatagatggctccttcctgattctgtaagtactttaaggtttggctgagtgcaaacagctcgcacatttgagcaaaccaattattaggcagttttcctaactctgcttctacagttcccttatcatttactgaataccccttgtgtcttttttccttaatcacccaggaggaaccatctatggtcctgtcctgaagggagttcctcctagatctggtcggacctttgtatggtagttagttaagatttagatcccctgttaggaaacctgctgggttaaggatttttgataggaaggctatgggttgtyagtggcctcagtgcttttgggctacgcccttgtttacactgacaacaaggtggtattggagtgttacagagttacagagaaggccttcaattatcagttataggttttaactttactgtggcttttaaaggaatagggtgtagggtccagccccacagggtcggtgggttttttccccgtgtgcggagacgagagagtgtagaaataaagacacaagacagagataaaagaaaagacaagaggtrgaggagtagagtcttctgtaaactcccacggggaaagggagactccctttcctggtctgctaagtagcgggtgtttttccttgacactgatgctaccgctagatcacgggacgctggtgttaccactagaccaaggagccctctggtggccctgtccgagcataacagaagcctcaactcttgtcttctggtcacttctcactatgtcccctcagctcctatccctgtatggcctggtttttcctaggttatgattgtagagtgaagattattataatattggaataaagagtaattgctacaaactaatgattaatgatattcatatataatcatctctatgatctatatttagtataacttcttattttatatattttatactggaacagctcgtgccctcagtctcttgcctcggcacctgggtggcttgccgcccacaatagggtacactgktttttctttactacttctatctctctttctctttgatgacttctttgtctctctgagtccctctttgtctgtctcttcctctctctctttgcctttctatgtctctctctctgactctctctttgtctctgtctctttgactttgtctctttctttctctctgactcctttgtctctcacttcctctctctgtgtctctctctgattttctgtttctttctctctttcctttctgctggtctttcccttcctctgccagccacttatgctgctgttctcccctctccttcccgttttgatggctttggcagtgtaagactgccacctccttgggtttttgcactgcatgcaataactccatggtttccttgtggtatttaatgggggttcccccagaggttagaaactccctttctttccatattgcagcacaggcatgtaggattagataagcatacttgctacctgtatacacatttattctttttccctttcccagttctaaggctcaggtaagtgccactagttctcctgactgggtgctggtccttgggggaggaggcttactttcaagtacggttacgtcactaactatggcataacctgcccttcgtatcccattctccacaaatgaacttctgttggtatatagattaaggtcaggattagctaaggggacttataagaggtcatctcaggcagcataagtctggactataatttgttggcagtcatgctcgattggttccccatcctctgggagaaaagtggcagggttgagggccacgcatgtatgtatttgaagcaccggtccctcaaggagtagtgcctggtatctaagtaggtggttgtctgatagccataaactccctttggcacttactatgccatttacatcatgagtagtccagacagtgagatcctttccttgtattattttgatagcctctgacactaggatgggtactgctgcaactacccttaaacagtgaggccagccttttgctactacatcaatttccttacctaggtrtgccaccagttgtcagacacgagtctgagtaaggrctccaagagctatccctgctctctctgtgatgtataaagagaagttttgtcctgtgggaaggcttaaagctggagcttgtactagggcctgctttaaggttttgaaggctgtttctgcctctggttcccattctactagatgagtatttgccctctgggtctccttgattagagtatagaggggcctggctatcttgctctatctggggatccatagttggcaaaagcggtgatttgaaggaacccccacaactgttttaaagtcttagggtgaggataagccagtataggctgtattcgttccttgccaagggtcctggtccctctggctaagattaggcctagatatttgacctgctgtaggcaaagctgggcctttgacctagatgccttgtacccttgattagctagaaaattcaagagatctagagtagcctgctggcatgaggcttccgaactggtagccaaaagtaaatcatccacatactgaaggaccagagtgcctggacttgagaagtggcctagatcttgggccagtgcctgaccaaacagatgagggctatccctaaacccttggggcaagacggtccatataagttgggatgtgtggtctgtgggatcctcaaaggcaaagagaaactgggagtcatgggagtcatagtgcaggggaatacagaagaaggcatccttgaggtccagaacagggaaccattctgcttcctctggtatttgagagagcagggtataggggttgggtacaactggatatagaggaattactgcctcattgatgagtctaagatcttgcactagactccactgaccgttcggtttttgtactcctagaattggggtgttgcagggactgctgcatttctttactaagccttgagcttttacatgtttaacaatatcctgtaatcctttatgagcttcaggccttaagggatattgcctttgataaggaaatgtggtgggatcttttaacctgatttggactgggcaggcattttttgcccttccaaattgtccttccaatgcccagacttcaaggtagattccttcctcaagtaggtgacaccaaatgggtaacttgttccccatattcatgtagataatagctccagctttggctaacatatccctccctaataagggtgtgggactttcaggcgtgacaagaaaggtgtgtgaaaagagcaaagtctcccaattacaactgagaaggtgggagaaatacctggttacaggctgtcccaggattcytcggatggtaatggaccttgaggacagtcgtccgggacaggagattaacactgagaaggccacgccagtgtccaggaggaagtcaatttcctggccttcaatggttaaatgtacccggggctcagtgagggtgatgacatgagctggcgcttgcccgaggcaccctcaagtsctgttgttggatcatctggttgggggcttctgacccagagaacctttgtcctccggggcagtgcgccttccagtgattgcctcggcatagcggacatggatgagggggtggcttgtttctcgttggacaatcttttttaaaatgtctttgtaaaccacactgataacaagccctaccgggtgattggcctgctccattttctgtcctttctgaaccaccaaaggtttgtttgtctgagggccatgastaaggctgcagcctttctctgatctcgcttttccttttgggcctgttcctcttggtccctattatagaacaccaaggttgccaggtttaataatgcctccagattttgttcagggcccagggcttgcttttggagctttctcctgatatccacggctgattgggtaacaaacttatattttacaatcaattgactctcaagtgagtctggtgacaggggagtacattttcttaaggcctcctgtagccacttaaggaaggcagaaggattttcttcctttccttgagttatggtagacatcattgaataattcatgggctttttcctaattctccttagtccttctagaacacaggtcaacagatgtttacgactccagtccccatgatctgagtcaaggtcccagtggggatccatactggggatggcttgcttaccagtagggaatttgtccctttcttcagctgtcattctgccatttacttgactaaggtaccaggtatctccaaactctcaggctgcagctaaagccgcattcttttcattaaaggcctgggtttgatctaacagtagcatgacatctctccaagtgacatcgaaggtttgccctagaccatgtaggacatctgtgtacctatcaggatcatctgaaaacttmcccaggtctgccttgatctgctttaaatcagagagggagaaagggacatgtaccctagttgggtcaaattccctctccctacaacttgaaggggacataaccgatagcccaggggtttttgtggttctttggagatttctttgcttatttccttctgggcaggggagattagaggaggcttatcattaataggaagggtagctatagggaggataggatatgggggtaagctgagaggtcctcctatgggatgtaaattgcaaactttgcatagttgtgtattctccttcaatgaaaagaaagcttggacataaggtgtttcactccatttgccttccctcttacagaaaaggtcaagcttcaggatagtattgtaatttatacttccctcaggtggccatttttccccatcagagagagaatatgggggccaggccatagtgcggtaaaaatgagccacctctttttcagggtttgcgggtcaaattggtcccagtggcttaggatgcatttcaagggtgagcctgttgatgcctgattgtttcccatctgaaagacaaaaccgcccgcagttttggtttgtttgtttctccccctgcccaagaacccacaatggtccctgaaccctgctgatcggaatagttgcactmaccgatgcagcagcagaaacacctcttgcccaagaacccacaacggtcggtccctggaccctgcggatsggaatagttgcactcactgacgcagcagcagaaacactagttttcctcctagaccacaaggaggaccgaggaaggtcggatttagtggcccttaccaatgcattctcaaaaatctgcacccttgcctgtcctcctagaccacaaagaggaccgagaaaaattggatttagtggcccttactgatgcattctcgaaaacctgttagggtcctaagcattctccagttagtattgggactttacccctcctgtaaagatgttatgccccaaaaatgaagtggagggccatatcctgagggaggggagggatctccagagttggaagagtgatgcctttttgtcckcacttatatgaatacaagaatgtcatttctgaagctccccgtatcctagcttctggaatagcttttgttaggcctgctagtctgaggagggatcctaaaattccggataagacagtcccccaccctgatggggctttgggcaaaaattatgtctttctaattggtgagcccgggtgcctaaagaaggttaacagagtcctggagtttatactagaaatgattcttacaggagaaactagaaaagcaccagagacagggagtggtttccagaagcgggactagcctcagagaagagaggcaagagaaagtttttctgacaagcattaggacccaggaggcaagggtcaggataggtaggatagatgggcgagtctcgcttgggcaacatgacttcgagagttctgctcatggccacagggtcaaccaacttgttgtcaggaccccggagctgaatggctttcctctctgtcgaccctcggctcagcccggaagtacaggaaaagcggaaagctggttccaggcaaaccaacactcccaactccsaagagtcaggggttgttagagagccctatcccggaaagcctgacacccgtgtctttagtccagcggctgtgctagtcagttttaactggccgctagtcacttttaactggccgacaggtgcctggtatttagccaccgaattctaagggaaaacaggacagaatagcaagtgaaaggggtcagatggtactcactgcttggcaatagcgtcagccccaagtgaggatggggaaggggttttacagtcctctataagcaggaattgtcccagtctgatgtggctgctgcgtagtgcccgctggcctccctcttgatcttcagggggtgtcttctgsccagctctcttcttgcttctgctaacttgctgatgcatgctgctggcgcaactgtccttgcgcatttggactgggcttgaagagggaggaagtattcattcccttaagctttcaggcttgggggagaatctttcacaacccaatgatactcttttaaagttactttaaaatgtgcaataaagttttgttgactgtagtcatgctgttgtgctatcaaatactagatcttatgcattctatttaactatatttttgtatacattaactgtctctcccctcactcccttctcagccyctggtaaccattatctagtctctctctccgtgagttcaattgttttaatttttagcttccacaaataagtgacaacaggcaaagtttgtcattctgtgtacctggcttattttacttaacataatgacctccagttctatccctgttgttgcaaatgatgggatctcattctttttttatggctgaatagtactccattgtgtatatgtaccatgttttctttatccattcatttgttgatggacatttaggttgcttccatatcttggctattgtgaacagtgctgcaggaaacatgagactgcagacctctttggtatactgatttcctttcttttgggtatatactatgagtgggattgctgagtcacgtggtagctctatttttagtttttggggawcctccaaactggtctccatagtgcttgtactaatttacattcccaccaatggtgtatgaggattcccttttctccacatcctcaccatcattcattattgcctgtcttttggatataagccattttaactggggtgagatgatatctccttgtagttttgttttgcatttctctgatcagtgatgttgatcaccttttcatacacctgtttgctatttgtatgtcttattttgagaaatgtctattcagacctttgctcattttttaataggattattagatttttttcctatagcattgtttgagtttcttatgtattctggttattcatcccttgccagatggatagtttgcaaatactttctcctggtctctaggtttctcttcactttgttgttcctttgttgtacagaagctttttaacttgatgtgataccatttgtccatgtatgctgtggtggggtattactccagaaatctctgcctagttcaatgttctggagattttctccagtgttttcttttagtagtttcatagcttgaggtcttaagtctttaattcatttcaatttgatttttgtgtatagtgagagatagggatctagtttcattcttctgcatatgtatatcgagttttcgcagcaccatttattgaagagactctccttttcccaatgtatgttcttggcacttctgtcaaaaatgagttcgctgtagatgtatggatttgtttctgggttctccattctgtttcattggtctgtgtgtctgtttttatgctggtgccatgctattttggttactatagctctttagtataatttgaagttgtaatttggggttagataatgtgaagtcaagtaatgtcattccttcagttctgttgtttttgctcagatagcataggctattctgggtcttttgttattccatataagttttaggattttttttttctatttctgtgaagaatgtctttggttcattggtattttgatagggattgcatcgaatctgtaggttgctttgggtggtgtggacattttaacagtattgattcttccagttggtgaatgtggaacatctttctttttgtgcgtgcatgtcttcaattttttttttccttccttttgagagagtcttgctttgtcgcccaggttggagtgcactgctgtgatcttggctcactgcaacctccacctcctgggttcgcatgattctcctgcctcagcctcctgaggagctgggattacagttgcccaccaccacacccggctaatttttgtaattttagtagagatgggggtctckccatgttggtcaggctggtctcgaactcctgacctcaggtgagctgcctgcctcagcctcccaaagtgcttggattacaggtctgagccactgtgcccagcccgtcttcttcaatttcttttatcagtattttatagttttcattgcagagatcattcactgccgagaccagctgggtcatggagacccttacccagcggcgctagaggaattaaagacacacacacagaaatatagagtgtggaatgggaaatcaggggyctcacagccttcagagctgagagccatgaacagagatttacccacatatttattgacagcaagccagtcataagatttactataagtattccttatgggaaataaagggatgggcagaaataaaggaatgggctctggctgcttacctgcagcataagtatgtccttaaggcccagatcgcttatgctattgtttgtggtttaagaatgccttaagtggttttccactctgggtgggtcaggtgttccttgccctcattccggtaaaccgacaaccttccagcattgcgtcaaggccatcacgagcatgtcacagtgctgcagagattttgtttatgkccagttttggggccagtttatggccagattttggggcctgttcccaacatgtccccctttgttttgcaaagtgataaaagcaaaggcaggtttgtcatggtgagctacttcttgcaggagtcaggatccacatctgcagagtacacaaagacaacacagattaaaaggacgatcattgttgaaatcacagagcttccaagtgtttttctccatttgaataggttactagctgctaatctgtctgcagctccttcgagcactctagttcctggcattaaggtcaagtgtggctgtgatgctttaaatatttgttcttttaatwttgcaatatccaaagacaagtttgtagagtggccttctagatgcttttttattctttcctaaattttgattttattaagagctattaataatttccacaaatccttgtttagctcctacaatgggccatatcatttgaggttgaggtgccactatactgccatggttccagataataggaactcttgtcatacttcttaccatttctaccatctgaccattttgttcagaccagctgaacatagtgtggccatggcacgcagactgaggtgcaattcaagctaaacatcccctaggggaccaatcaattccataggaatcactgcacagcacctctgcctgttctgcaatgcaattttcctaaacaagtatgttcattttttcttgccaggttcaattttatttataaataggtttttgagggtggtatgcctcaattgtaggagcagattcattatggtaaatactgagatcagaaagcatgtgtaactgtgtcatagagtgattgcatccaggcattgttgccagccaagatggataaatatgcccaataagtgtaattgttctctgtgtcagcccttgttgaaggcagtggtgatcaccgctatcattaaattattcattgtgactggttgtcccgctttcctcaggttttcttccgccatctgtgacagcttcttgatctgtccccaggtgggtggctgtgttcgatgggtgttgctcatgacagttggcatcctcctcagcgtcagtcttgacatggctgcaaccgggggtcctcgggattctcctggaatcttttccccagcatctggcttatgataaggtttcaggtgttttgatggtatccaaatcggctgttgatttggtcctggagaaacacaagcataacctctaccccaagttattattttacctatttcccgactttttgttattgggtctctccaccaaaccagtttttctgcttctgtctttgcagctgatttctgtagatgctgttcagctgctgatagcatctggcctttaggcaggctcaaaaaatttaaagttaagaatgctagattcaattgtatgcgggctgtcctgtaatccatttccccctttctgtttttgcaactgcygtttcagggagagattcattctttccactatggcttgtccttgagaattatatgggataccagtaatgtgtttaatattccatatagagaaaaatgtagctagagcttggctagtatagcctggggtattatctgtttcaatagaagctggaatgcccaccactgcaaaatactgcaagaggtgacgtttaacacaagcagaagactctcctgattggcatgtagcccagacaaagtgagaaaaggtgtccacacatacatgtacataaactagtctcccaaacgagggaacatgtgtgacatccatttgccaaagagaattaggttccagttctcgagaattagctcctcctgtaaaagatgaggaacgcaccacttggcaagttgggcatcgctggataatagctttagcttctttccaggtaatgctgtatctgcgtttgagaccagaggcattaacatgggttaaattgtgaaagtgtctagcattagatattactttagcaacaaggcgatcagccatttgattcccttcagtcaaaggtcctggaagagatgtataagccctaatgtgagtgatgtaaaaagggtgcattctactcctaactgctgcttgcaattgggtaaataaagtaatcagttgttcatctgtatgaaatcataactgagcattttcaattaactgtgtggaatgaaccatgtataaagaatcaaatcacattaataggcatattaaaagcagtcaatacctcaattacagctacgagctctgctttttgagctgaaccatagggcatctgaaaaactttaccttttgagccagaataagaagctttaccgttgctagacccatctgtaaaaacattctcagcaccttcaattggtttaaatttagttattctagggagaatccaattacttattgtgactggttgtccagctttcctcaggttttcttccgccatctgtggcagcttctcgatctgtccccaggtgggtggctgtgttcgatgggtgttgctcgtgacagttggggtcctcctcagcgtcagtcttgacatggctgcaactgggaatccttgggatccttccggaatctcttccttggcatctggcttatgataaggtttcaggtatcttgatggtatccaaattggctgttgatttggtcctggagaaacacaagcataacctctactccaagttattattttacctatttcccaactttttattatcgggtctctccaccaaaccagttcaaaaattcagacagttttgttttaggaaaatggttatcgagaatacccacaaagtcagctaaatgggtttgccaagtaagactatttataaaagcttgctgtatttgtgcctttatgaggacaataatttttccaggatcatatccatgtaatttaacaatccgagttctgccatttcctattatatcactatcagagtagtgacttgatccaaataaggagttagagtccatgaattagcatgtggaagaaaaagccattctaagtccagctcttggacagtaacaccagtaggtgaatgctgagttggaaaaattagcaaatctagagtcttctctggatctattctatttgagctttatggacttgcttttcaatcagctgtaactctgcctcagcttcctttgttaattgccaagggctagtgagactaggatctcctctaaggatagaaaatagattactcatggcataggtaggaatgcctagagcaggtcatatccaattaatgtcccctagtaatttttgaaagtcatttaatgttttcatttgatccctacktatggctactttctgtggcacaatggtagtgtcatttactaaggtccccaagtaggaataaggagtagtagtctgaattttgtcaggagctgtaattaagccagcaggagaaattgaattttgcaagtgatcataatattggagtaatatttcttgagtggaggcagcacaaagtatatcatgcatataatggataatgtaacactgaaatttttttatgagtaggttcaattgcttgccctacatatatctggcaaattgtttaacataccttgtggcaacactttccagtgaaaacgtttagcaggcttaagctgcagrttgtttactgcaagaattgtaaatrcaaaccattcacagtcctgctcagctaaggggatagtaaagaaacagtattttaaatctatgactattaaaggccaattttttggaatcatagcaggagaaggcaatcttggctgtaatgtccccataggttgtataactgaattaatggctcttaagtcagttaacattttccgtttacctgattttttcttaattatgaaaactggagaattccaaggggaaaatgttggagctatgtgtcccttttttaattgttgagtaattaagtcttctaaagcctccagtttctctttactcagcggccattgttctgtccaaattggcttatctgttaaccattttaaaggtataggttctggaggcttaacaatggccgccatcaaaaatgatatcctaaaccttggcaggaactttgtctttccacttgaagcggttccttcaaaccttgcaaattttttcctgttcccatgccagggacataccccatttcatgcatcatatgttgactttgagggctatataattgttctggaattagaacttgtgttccccattgttgtaataaatcccttccccataaatttataggtacagaagttataattggttgaatagtcccaggttgtccatcgggcccttcacaatgcaaaatataactactttgatatactttaggggctttaccactccaactatgttaaattgagtgggtggaattggccacgcagacggccagtgctgtagagaaaggattgaaatgtccgctcctgtatctaccaaacctttaaatttctttccctgaatagttatttcacaggtaggatatttatcagtaatttgattcacctaataagctgctttgccttgtttatttgtgcttccaaatcctcctgttcatttaatttcacttttccccatttccacatacggcacaattaggagctgtgctatatggtctccaggctttgctttccagggaacagaagtagatgtaacaatttgaatttccccattgtaatcagaatcagtgactcctgtttgtacttgtaccgcttttatatttaaactagacctgcctagaagtaatcctgtcatccccgctggcaagggtccaccggctcctgttgggaccttttgcggggattccccmggcagaaggctcacagcttttgtgcagcataaatctactgcagcactaccggctgtggcgggggacagacattgtacaggggtgagggaatggcctgagccagaaatgccctggtttgaaatggggccgggaactggcccctcatggcatttccccaatttaaaaggaaaaggctcaaatgtagctataatatttccctgtttatctggggggtgtactctaacagggaactgccaagcctctaaatcaccctctcatctagcttgctgaattcctgcctgaatagaactgagagctgttgcttgaggtgcagcttgaacagtcagtggggcaactacttttcgcccagtgtcatctggaaaagaaagatccggagggtcaggctactctttttcttcaaaataatgagggggtacagaagggtagggatgaacctctccctccattgccgctttacctttagctggcaaacaaacctgctctgttacttcattatactctccttcctcctcatcagtgtgaaaagtttccaaggtggaatgaaccagagcccacacttgtcccattgttaccctgatgcttccaagctccccttcttaccacagggactgcttaagagtacttgggtgtcctccagcttagttccacattctccaactgttgctctggtgaccctttgacctgggttcgagccccacgtatgggcattacttgctgagaccagcttggtcgtggagaccctaacccagtggtgctagaggaattaaagacacacacacagaaatatagagtgtggaatgggaaatcaggggtctcacagccttcagagctgagagccatgaacagagatttacccacattatttattgacagcaaggcagtcataagatttactgtaagtattccttacgggaaataaagggatgggccaaaataaaaggatgggctctggctggttacctgcagcatgaacttgtccttaaggcacagctcgctcatgctattgtttgtggtttaagaacaccttaaggggttttccaccctgggtgggccaggtgttccttgccctcattctggtaaaccgacagccttccagcattgcatcaaggccatcatgagcatgtcacagtgctgcagagattttgtttatgactagatttgggggcctgttccgaacagttcacttggttaattcctagtatttaattttatttgtggctattgtaaatgggattactttcttgatttcgtttttcagattgtttgctgtcggcctagagaaatgctctgatatttgtatattgattttgtatcctgtaactttactgaatttatcagttctaatagttttttggtgcaatctttagatttctccaaatataagatcatatcatctgcaaacaagggtactttgacttcttcctttctaatttggatgccctttattttattctcttgtctgattgctctagctaggacttctagtactgtggtgaatgacagtgatgaaagtgggcatccttgcattctagatcttagaagaaaaactttcagtcttccccaattcagtatgatactaactgtgggtttattgtatatggcttttattctattgaggtatgttccttctatacccggttttttgaggtttttatcatgaaaggatgtttaattttaccaaattctttttcagcatcaattgaaacgatcatatggtttttatccttcattctgttgatttgatgtatcatattgattgatttgtgtatgttgaaccatccttgcatccctgggataaatcccacttagtcatgatgaatgatctttttaatgtgtcattgaattcagtttgctagtattttgttgaggatttttttttatcagtgttcatcagggatactggcctgtagttttatttttttgatgtgtctttgtctggttttggtatcagggtaatattggcctcgcagaatgagtttgaaagtattccttcctcctttgtttttctggaatagtttcggtaggattggtattagttctttaaaagtttgataaaattcagcattgaagccattaggtcctggggttttccttgctgggagactttttattacagctttgatcttgttacttgctattggtctgttcaagttttggatttcttaatagttcagtcttggcaggttatatgtatctaggaatttttccattttctctaggttttccaatttattggcatatagttgctcatagtagcctctcatgatcttttgagtttctgtgatattgattgtaatgtctcctttttcagctctgattttattgatttggggcttctcttttttttcatagtctggctagtggtttgtcaattgtatttatcttttcaaaaaatgaactttttgttttgttgatcttttgtattgttttcttcatcttaatttcttttatttctgctgtgatcttttttattgcttttcttctaattttgggttggtttcctcttgcttttcttcttgctttctctgcatctttaagatgcataattaggtggtttatttggagtttttctacttttttgatgtaggtgcttattgctataaactttcctcttagttttgctttcactatatcccataggttttggtatgttgtttccattatcatttgtttaaagaaatcttaaaatttccttcttaatgtctttattgacccactggtcattcaggtgcatattgtttaatttacatgtgtttgtatagtttcccaaattcttcttgtaattgattctagttttattctgttgtggtcggagaagatacttgatataatttcagtttgtttgaatttttaaaaacttgcttttagacctcaaggatagacctaacatatggtctatccttgaggatgatctatgtgttgaggagaagaatgcatattctgcagccattgaatgaaatgccctgtaagtatttattaggtccatttggtcagtagtacagattaagtctgatatatctttgttgattttttgtctggatgatctgtccaatgctgaaaatgaagcattgggagtcttcagttattgtattgggatctatctctctctttagctctaataatatttgctttatgtatctgggtgctctagtattgggtgcgtatatattcacagttgttatagtctcttgctgaactgagttctttatcattatataatgaccttgtctctttatagttttttcttgagatccattttgtttgatataaatatagctactcctgctcttttttggtttccatttgcatggaatatcttttttcattcttttgttttcagtctgtgtgtctttataggttaagtatgtttcttgtaggcaacaggttgttgggtctgcttttttatccattcagccactctgtgtcttttgactggggagttagtccatttacattcaatgttattactgataagtaaggtcctactgctgcctttttattatttgttttctggttgttttgtggtctgcttccttcttaaccttccttcctgtcttccttttagtgaaggtgattttctctggtggtatgttttaatttcttgcattttattttttgtgtatctatcatatgtttttagatttgaggttaccacaaggcttgaaaatagtatcttataacaattttaaaccaatggcaacttaacactgattgtctaaacaaagaggcaagcaaaaagaaaactaataaaaactacatgttggccaggtgcagtggctcatgtttgtaatcccagcactttgggaggctgaggtgggtggattgcttgaactcagaagttcaagaccagcctaggggctgggcacggtggttcacacctgtaatcccagcactttggtaggccgaggctgggggatcatttgaggtcaggagttcaagaccagcctggctaacatggtgaaaccctatctctactaaaaatacaaaaattagctgggtgtggtgcctgtaatcccagctacttgggagactgaggcaggagaatcacttgaacctgggaagcggaggttgtagtgagccaaaatcacaccattgcactccagcctgggcgacaagagggagactccatctcaaaacaaacaaacaaacaaacaaaacaaacaaaacagcttgggcaacatggtgaaaccccatctctacaaaaaaatacaaaaattaaccaggcatgttagtgcacacctatagtcccagctacttgggaggctgaggtatgaggattgcttgagcccaggaggttgaggctgcagtgagctgtgattgcaccactgcactctagcctggtcaacagtgacaccgtgtgtgtgtgtgtgtgtgtgtgcgcacacacacaagtatgtatactctatatataaataagtaaataaatatattttaccttcattacattttaacaacatctgcattttaactccattccctgcttttaaactttttgttgtttctatttatatcttattgtattgtctatgacctgaaaacttgttgtagtaattatttttgatcagttcgtcttttagtctttctactcaagacatgtatggctcacacaccacaatgacggtactctaatatgctgtgtttttctgtgtacttgctattaccactgagttttgtaccttcagacactttcttattgtgcattaatgtccttttctttcagatttaagaactctctttggcatttcttttaagataggtctagtgttgatgaaatccctcagcttttgtttctctggaagacctttatttctccttcatgtttgaagaatatttttgcgggatatagtattctaagataaaagttttttccttcggcactttaaataggccactctcctggcctttaaggctaccactgagaaatctgctgccagacatattggagctccattatatgttatttgtttcttttttgttgctgcttttaggattttttctttatgtttgacctttgggagtttgattgttaaatacattgaagcagtcttatttgggttaaatctgcttgatgttctcatacttaaatattgatatcttcctctaggtttgggatgttctttgttattgtctcttggaattaattttctacccccactgtctgtctacgtcctctttaaggtcaacaacttttctttttctttttctttttttttttgagacggagtctcactttgtcacccaggctggagtgcagtggtgcgatctcaactcactgcaagctccacctcccaggttcatgccattgtcctgcctcagcctccagagtagctgggactacaggcacccaccaccacgcctggctaatttttttgtatttttagtagagacggggtttcactgtgttagccaggaaggggcaacaacttttaagtttgcctttttgaggctgttttctagatcttgtaggtgtgcttcattcttgtttttttcttttgtctcttctgactctgtatgttcaaatggcctgtcttcaagttcactaattccttcttctgcttgatctgttcagctgttaagagactgatgtattcttcagtatgttagttgcattttatagctcyagaatttctacttgattcttaattatttcaatctcttgttaaatttatctgatagaattctgaattccttctctgtgttatctttagttttgttgagtttcctcaaaacagctatcttgaattatttttttgaaaggttacatatctagctctccaagattggttgctgatgccttatttagttcatttggtgaggtcatgttttccggaatcatcttgatgcttgaggatgtttgttggttcctaggcattgaagagttaggtatttatcgtagtcttcacagtctggactttttgtacccatccttcctggaaagactttccatatattcaaaggaacttggatgttgtgatgtaaatttttcgtcattgttgccatatctgccttagatgacaccccaagcccagtaacacagtggctcttttagacttatagaggcactgccttgatggtcttagataagatctagaagatttctctggattaccaggtagagatgctttttgtctttccttactctctcctaaacaaatggagtctctgctgagcttcctggagctgggggagtggtgaaacaagcactgctgtggccaccaccactgagattacactggggcagacctgaagccagcacaacaccaggtctcaaccaaggcccttggtaaccactgtggctactgcctatatttgctcaaggccctaaggctctataatcagcaggtagtaaaaccagccaggcttatgtcctttccttcaggatggcaagctcccctcagtcttaggtccagtggtgccatcctggagccaggtcctggagttggaaaccttaggaatctacctggtgctctattctactgcggctgagctggcacccaagccttcccagtcctccctccctttttcatgagcagaggagtctcccccttagctgccactgtcctaggttcatggcaagtactgcctggctactgccagtgttcattcaaggcccaagggctcttcagtcagcttgtagtgaatgctgccaggcctgagactctcccttcggggcagcaggctcccctctggcccaggacaagtccagaaataccatccaagagccaaggcctgaaatcaaggaccccaagggcccgcttggtgctctaccccactgtggccacactgatacctaggctgcaagacaaagtcccctttgctcttccctctccttttctcaagcagaagtccctttctgtagccaccacatctgggagtgtgctgggtcacacctgaagccagcacgtctctgagtctcacccaaaggtccatgatgagtatggcctggttaccactgctgatgatttggggcccaagcgctctttattcagcaggtgataaatcctgccagwactaggtccttccgttcaaggtagcaggttcccttgtagcccaggctgtgtctagaaatgttatctgggacatttggtgtccagggtctggaatgggagcttcaggactttgcctggtgccctgttctgttgtggcagagctagtgtccaagttgtaagagaaaatcctgtttactcttccgtctcctttcctcaagtggaaggaaagagtctcccctggagctgcgagctgcactgcctggggttgagggaggggtggtgcaagcactcccttggtggtcctgctggtgtcttactgggctgcgtgccctccaagtccattggctccaagcccagcccagcaccaagacttgcccaggaattgcagtctttgtggtctgggctgctattcaagtttattttgaatcccagagcagtttagcccatggtggtaagtcttgctggaacttgagtttccaccaccaggatgggcaattcccctctggctacagctctaaatgcttcctctgtgggcgccagctgaattctgcccccttttgctttccactgtgacagggcagcactgagttccgatgtgaaagccctacaatccctgccctctccctcccccaaacacagagattctctttctgtgccacaggaatgggagaggggtggtgtcagcaattcacgactttatcctcttcagtgcctcttgcagtgatattatgttaaaaccatgtgattgctcacctgatttttagttcttatgaaggtgctttgttgtgtggattgttgtttaatttgggaagatgattggtggaggcttccatttggccatctggctctgcctttcctcctagaattatatctggttgtttttttttttttttttttttttttttcagtagtttgtgccagccgggattttgaccagatccacatttatttggttgatatgcctcttaagtttctttttttttctttgcaatatgtttgttaaagaaattgggttatttgtcttgtacaacttcatatatttttaaaatgaatgctgttgggataaatagaaaaatatcaaggcccccaccctccaattctggtagactttacctcttgagggatattaatatgctcgtgatggactagttttgcttatttttagcatcaaggaagatttggtctattcctttctacttcacattatgagaacagttggttggttggttttccaaacataaaatggtattgtaatttggaatatgcttttcatactactctgcactcaccaaaatattctggtattactctcctcccccaaatcacagatgtagggtagactcttcagaattttaaaaaatcatgttttccttttccccagaaatactatattttgagatctactctgcctaagcaaaaataggaaatagaaaaacctctctttatgctcagtgtgtatcacycgaacttttcaagttaaatgttatcaagcagtaagtgtctgttcttcactctgacaatttctttgctgttccttgtaaaaagttctactgcgctttttgttgtggtaaaatatacataatgtaaaatttatcattttaactatttttaactgtataattgagtggcattaagtccattcacagtattttgtcactatcaccaaaactttttcattaccccaaacagaaatctgtaaccattaagcaataattccccattttcccagcccctttctgtttgtgtgaatatgcgtattctagatacctcatataagcagaattgtacggtatttatcctgttgtgtctgatttatttcacataatgttttcaagattcatccatgctgtaacatgcattatacttcattcttttttatggctgaataatattccattgtgtgtatatatcacagtttgcttatccattcatcccctaggatattggattgtttccaccttttggctattgggaatactgttgctgtgaacatgtgttcacaggtatctgacccgttttcaattcttttgagtatactatatactcaaaagtatattgtatatgtatacactatatatttgtatatatttatacagtatacctatatatagtggagtggcactgctgggttatatggcagttccatgtttaacatattgaggaactgacaaactcttcttcacattttaaaaactgctttcttaaagatcttcgtaccttactagttgctaaatctgatggctctacctctcttctcacctgtcttagcttctctataaatctttgtggcacctcacattgctgtcgatagaccctcttattcttctgctttgtaatccttctcaggcccttcctgggttcttcctcctccacacagtccttaaatgtacatgttcccagaggttcagttacttaaactctcctttgctattattttcgtgtaacttaaactatccttttgattttaaacacctctgtcaggcctacatttgaacttgaatctcataggcatttccatatcagtgttctctcaaatgtgacatgtctaaaacaacattcatcttctgttaatcctctcaagcccattctctccgtggtccctgtcactaaggcttgaaagctgtatattgattttattatccctttgtcccttgggggcccatgccctgtaaagttgacgagtgcgggcagttctcctgctggtcctcctttgcactcactttcacagttctaaatcatgctatgagagcgtctttcttgaatttttctaactatatttcttggttctagattttttttccctctgttccaaatcattttccacacagctgctagaattttctccctaagatatatttgcttaaagacaataccctttttgcatgcagaacaagttaattcttctcatcctcagcatcagatccccttcctgtcttcatataattaattaccttccagtaaccttatcctgctccgtgatccatctgtattcattactacagccaatcattctacttgcttttctctttggaaaactgaaaatgtacaggttgcagtttcccaagacttgaactttctccttgaaatatttcagtatttggccattggaattttaatccttaaagccaacacttaaatctcaacttatctaagaaatcatcttcaagtgtttcagacaaaattaatgtctgcatcctcattccatatagtttgcttatatctttattgtagcacactttgaagtttgcttcaggatatgctaaagttttccacctgatttattatttctttacgatttttttccttagagaaaaagattaccgaccaaaatgtgtaacggtttccgaggccctcatgatgttgtcagactgcttttaaaaagctgtctgcactttggctgggtggctcaagcctataatcccagcactttgggaggccaaggtgggaggatcacttgaggccaggagtttgagaccagcctgagcaacataaataaataaaccttttgtctgcacaaaaataaataaaccttgcaatttataatttcatcattgataagtgtatcatttaactactatactttgaatgtaagtatttagaaaaactttcctagtttttgttagaaaatagtatcttgtttttatttgcttgtttttgctaattatattgagactgaagacttttccaatgtatttccttgtatgtttctctagtgaatagtctttttaatatacttgttccattaatctaatactttattcatttatctaatcccatgactcatttgctatagatattttttctatttttgtccttttgctttttaattttgcccatcaccttttgacttatagtaatagctttaattgatttttaagattaatatttgtaaatgttttctttagttttcaatatatttttagaaacttggaaagagttggtaaaaagacaagggaacttcattataaattgtattttaaaagagaaagcatatattatccttacaatctattgatcagttaacttaaaaatcttcaggatagtaaaaaggtctacctcactttttttttttttttgctccttcctgtacaccttcctgcacagtgatctttccattttttttaattgtggtaaaatgtagataacatgaagtttatagttttaatgaatttttttcttgtcttttttttttttttttttttttgaggcagggtctcatgctgtttccctggcagaagtggtgcagtggctatggtcatggcttactgcagccttgatttagtgggctcaagtgatccttctgctgcagtccgctgagtagctgggaacacaggtgcacagcaccatgtctggctaatttttttttttttgtacttttgtagagacagggtttcaccatgttgcccaggctggtcttgaactcctgggctcaagcgatccgcccacctcagcctcccaaagtgctaggactacaggcgtgagccactgagcttggcatgttcatgttactcaatccctgagcctattcatgctattggaaaggatgctgtgtttgttagggttctccagagaaacagaacccataggatgtgtgtatacacacacacaaatgcacacgcacagatttattttaaggaactgacttaaacgattgttaggagtgtgtggagactagcaaatctgaaatctgtggagcaggccagagacacagggaggagttgctgttgcaatttgagtccaaaggcagcgcgggggcagaattccattggtatgtgttcagatttcctcctcttataaagacaccagtcctatttgactagggctcagcctaatggcttcattttaatttaactattctttaaagactctatctgtaaatacagttacactctgaggtactgggggttaggacttcaacatgaatttttaggaaaacacaattcatcccataaaagatgccaaataatctcctgtgggatggagtgggaggaagcaaaccagcagatattttcttaaactcatttatggaattcataattttgtatgaaatgcattttataaatggctagcaattcacttttattatctgatgttatatttataaattgctaggtaatttattctgtctccaaagtgtttccagaaaattctgacttctcatttcataataagttacgaggtatttggtatatataaagcgtgtgtgtgtgtgtgtgtgtgtgtgtgtgtgtgtgtgtrtatatatatacatatatatatatacacacaaagtaccaggtatttggtactttttgttaagaggatactttttaaattaaatatttctcaaaaactagaattggtgcttattactatcttattctataaagtatataaactcaatattgaatcttacaaaaatattaaagtcattagcatttccttaccgacaagattggacttctaaaatcttgcatcatgggaactaaaaattcttctttttaaaataaaacattttgttttgtgataattgtagattcacatgtaattataagaaataatatcaagagatcttgtgtaccctttacctaatttcccccaatggtaatatcttgcaaaagtatactgtaatattaaaaccagaatattgacgtcctacacccatcttcccccttccacaaccccccaaatccctgttgtcctcagttcgtggcaatcactaatttgttctctgtttctataattttgtcatgtgaaggatgttatataaatggaatcatacagtaagtaagcttttaggattagattttttcagtcagcataattcccttgattcatccaagttgtcacatttatcggtagtttggaaaatgccgtttagaatccagccccagcatcacagaacagggtttctgagacttggcactatggacatttggaccagataattctttgtttttgaggactgttctgtgcattttaggatgtgcagcatctggggcatttacccaatggatgttaataggatctcgccaggtatggcaaccaaaaatgtcttcagacactgcctaaagttcccgcgggttgccacgttttcccagaaattaccaagtatcctatcccttgggtgagaaccactggagtagagtatagaaagtggacttggagtgaagagactacaacttaaccactggcaaaatccatcctcagactactctgcatgtctacacacccttctacacacatgtccatgtgagcattcccttacctagagactacattgtaacattacaatgaaatttgtattaaataatgaagaagcagaagtaaaaagaaaatagttaacatatacagagacacacaccaaacccatgagaatggactctggaggctgtgtcctttgactccatggacaagactcaactaaatcatgtggacacattataacctctagaaaccaatatgcatacagaaccctgcacctgggtgtcaggtgtcagggttaaaggaacggtagtttgttgggtcagatactttttttttttttgagacaggttcttgcttcacctactcaggctggagtgcagtacatgatcacttggctcactgcagccttgacctccccaggctcaagtgatccttccacctcagcctcccaagtagctgggaccacaggtgtgtgccagcatgcccagctattttttttttttttttttttttggkgttctttgtagcgacagggttttgcgatgttgcccaggccagtcttgaattcctgggctcaagctgtgtgcctgctgggcctctcaaagtactgggattacaggcatgagccactgcacctagcccagatactttcttttttaaaaagcatatcatggaaattttcagacatgaagaaagtaatagattttaaaaaatctattagtaattttttttttaacctatagccctgcccttcttggttaattgaagcaaatctcagatattagatgatttttccttttttttttttttgagatggagtttcactctgttgcccaggctggagtgcagtggtgccatctcggtttactgcaacctctgcctcccaggtttgagctattctcttgtctcagcctcctaagtagctgggattacaggcgcctgctaccatgcccggctaaattttgtatttttagtagagatagggtttcaccatgttggccaggctggtctcaaattcctgacctcaaatgacccacccgcctcagcctcccaaagtgctgggattgtaggtgtgaaccaccgtgcccggccagaattagatgattttggtgatgcaaaataatctatgtcctgacccccgttctttttaaaataaacttttagttttagcgtagccttagatttacagaatattgtgaagatagtagagaattcccacatatcccatatccaatttccygttattaacatcttacattaatatggtacgtgtatttcagttaatgctaatgtccatactgtattcagattttcttagtttttacctaatgtgcttttgctgttctaaggacaataggtaaaagctaaggctctcatgcaggataccacactgtatttggtcattgtgtctccttaggctcttcttggctgtgacagtttctcacactttcctcgtttttgatgaccctgacagttttgagaaatacaggcatatgctggtgatactgtgggttcggttctgagccactgcaataaagggactatcacaaagtgaatcacacacattttttgggggggtgcatataaaagttatgtttacactataccgtagtcttttaagtgtgcaatagcattatagcttaaaaaaaaagcccaatgtgcatgccttaattttaaaaatgctttattgttcaaaaatgctaatgatcatctgagccttcagtgagtggtaatctttttgctggtgagagtcttgccttaacattgatgcctgctgatgcttcctgaaggttaggatggctgtggcaagttctttttgttttgttttgttttgttttgtttttttgagatggagtcttgctctgttgcccaggttggtgccatctcggctcaccgcaacctctgcctcccggttcaagcgatactcctgcctcagcctcccgagtagctgggactacaggcatgcgtcaccatacccggctaatttttttgtatttttagtagagatggggtttcaccatgttggccaggctggtctcaaattcctgacctcaaatgatccgcctgtctcggcctcccaaactgctgggattacaggcgtgagccactgtgcctggccaagttcttaaaataagacggaagtaaagtctgactcatcgattgactttccattcatsaaagatttttctgtagctgtttgatagcaatttacccacagtagaacttctttcaaaattagagtcaatcctctaaaaccctgctgctactttatcaactaaatttagtaatctgctttttgttatcgtttcaacagtgttcacagcatcatcaccaggagcgattccatttcaagaaaccatttatttgcacatccatatcttccgtctctatttctaattctggttctcttgctatttccaccctatctgcagtgacktactccactgaagtcttgaacctgtcggtcaaggttggaaccaacttcttctaaactcccgttaatattgacattttgtagttctggcaaatgtggaataaaaaaataaatgatattttgacctcctcgaatgaatgggtttttgttgttgttgttttgtgagatacagttttgctttgtcacccaggctggagtgcagtgctgcagtcatagctcactgcagcttcaaacttctgggttcaagcagtcctcccgcctcagcctcccgagttgttgggactacaggcatgtgccaccatgcccaacttttttttttgtattttttttttgtagcgattgggtctcactctgttgtccaagctggtcttgaactctaggcctcaagtaaccctcccacctccacctccaaaagagttgggattacaggcatgagacaccatacctggctataaatgttcttaatggcatctagaatgataaagcttttccagaaagttttcaatttattttgcacagatccaccaaaggaatcactgtctgtgacagctatagtcttacgcaatttatttcttaaataattagacttgaaagtagaaattactccttgatccatgggctgcagaatggacagtgtgttagcaggcatgaaaacaacatttatctccttgtatatatccatgagagttttggggtgactaggtatgttgtcagtgagcagtgatattttgaaagcaatctttctgattagtaggtctcaacagtgggcttaatatattcagtaaatcatgctgtaaaacagatgttctgtcatccaggctttgttgttccatttctagagcacaggcagagtagattttgcataattcttaaaggccctgagattttcagaatggtaagtgagcattggcttcaacttaaagtcaccagctgcatcagcccctaacaagagagtcaccctatttggaagccggacattgatatctctagctatgaaaggttctaaatggcatctccttccaatagatggctgtttagtctgcattgaaaatatattgtttagtgtagccatcctcatcagtgatcttagctagatcttttggataacttgctgcagcttctccatcagcacttgctgcctcaccttacacttttatgttgtggagatgatatctttttaaacctcatgagcaattctttgccagtttcaaacatttcttctgcagcttccttacttttctcagtctgcatagaattgaagagaattagggacttgccctaagactggtttaaaggaatattttggctggtttgatcttctatctggagcactaaagctttctccatatccgcattgatgctgtgtcactttcttattcctgtgttcactggcatagcacttttaattcccttcaagaattttcctttgcgttcacaacttggctgtttggtgcaagaggcctagctttcagcccatcttggctttccacatgccttcctcactaagctaaattactggtagtttttttttttatatatatatactttaatttctagggtacatgtgcacaacgtgcaggtttgttacatatgtatacatgggccatgttggtgtgctgcactcattaactcgtcatttacattaggtatatctcctaatgctatccctcccccccctccaccccacgacagaccctggtgtgtgatgttccccttcctgtttccaagtgttctcattgttcaattcccacctatgagtgagaacatgcggtgtttggttttttgtccttgcagtagtttgctgagaatgatggtttccagcttcatccatgtccctacaaaggacatgaactcacccttttctatggctgtatagtattccatggtgtatatgcgccacattttcttaatccagtctatcattgatggacatttgggttggttccaagtctttgctattgtgaatagtgacacaataaacatacgtgtgcatgtgtctttatagcagcatgatttataatcctttgggtatatacccagtaatgggatggctgggtcaaatggtatttctagttctagatccttgaggaatcaccacactgtcttccacaatggttgaactagtttacagtcccaccaacagtgtaaaagtgttcctatttctccacatcctctccagcacctgttgtttcctgactttttaatgatcgccattctaattggtgtgagatggtatctcattgtggttttgatttgcatttctctgatggccagtgatgatgagcattttttcatgtgtctattgtctgcataaatgtcttcttttgagaagtgtctgttcatatctttcgcccactttttgatggggttgtttgtttttttcttgtaagtttgtttgagttatttgtagattctagatattagccctttgtcagatgagtagattgtaaaatttttctcccattctgtaggttgcctgttcactctgatggtagtttcttttgctgtgcagaagctctttagtttaattagatcccatttgtcaattttggcttttgttgccattgcttttggtgttttagacatgaagtccttggccatgcctatgtcctgaatggtattgcctaggttttcttctagggtttttatggttttaggtctaacatttaagtctccaatccatcttgaattaatttttgtataaggtgtaaggaagggatccagtttcagctttctacttatggctagccagttttcccagcaccatttattaaatagggaatcctttccccatttattgtttttgtcaggtttgtcaaagatcagatggttatagatgtgtggtattatttctgagggctttgttctgttccattggtctatatctctgttttggtaccagtaccatgctgttttggttactgtaggcttgtagtatagtttgaagtcagatagcatgatgcctccagctttgttcttttggcttaggattgtcttggcaatgtgggctcttttttggtcccacatgaactttaaagtagttttttccaattctgtgaagaaagtcattggtagcttgatagggatggcattgaatctataattatcttgggcagtatggccattttcacgatattgattcttcctatccatgagcatggaatgttcttccatttgtttgtgtcctcttttatttcattgagcagtggtttgtagttctccttgaagagatccttcacatcccttgtaagttggatccctaggtatttattctctttgaagcaattgtgaatgggagttcacgcatgatttggctgtctgttactggtgtataaggatccttgtgatttttgcacattgattttgtatcctaagactttgctgaagttgcttatcagcttaaggagattttgggctgagacgatgaggttttctaaatatacaatcatgtcatctgcaaacagggacaatttgacttccacttttcctaattgaataccctttatttctttctcctgcctgattgccctggcgaggacttccaacagtatgttgaataggagtggtgagagagggcatccctgtcttgtgccagttttcaaagggaatgcttccagtttttgcccattcagtatgatattggctgtgggtttgtcataaatagctcttactattttgagatacatcccatcaatacctaatttattgagagtttttagcatggagggctgttgaattttgtcaaaggccttttctgcatctattgagataatcgtgtggtttttgtctttgttccgtttatatggtagattacgtttattgattttcatatgttgaaccagccttgcatcccrgggatgaagcccacttgatcatggtggataagctttttgatgtgctgctggatttggtatgcaagtattttattgaggatttttgcatcggtgttcatcagggatattggtctaaaattctctttttttgttgtgtctctgccaagctttggtatcaggatgatgctggcttcataaaatgagttagggaggattccctctttttctattgataggaatagtttcagaaggaatggtaccagctcctccttgtacttctggtagaattcaactgtgaatccatctggtcctggacttttttttgttggtaggctattaagtattgcctcaatttcagagcctgttattttcctattcagggattcaacttcttcctggtttagtcttgggagggtgtatgtgtccaggaatttatccatttcttctagattttcagtttatttgtgtagaggtgtttatagtattctctgatggtagtttgtatttctgtgggatcggtggtgatatcccctttatcattttttattgcgtctatttgattcttctcttttttcttcattagtcttgctagyggtctatcaattttgctgatcttttcaaaaaaccagctcctggattcattgatttttttgaagggttttttgtgtctctatctccttcagttctgctctgatcttggttatttcttgccttctgctagcttttgaatgtgtttgctcttgcttctctagttcttttaattgtatgttagggtgtcaattttagatctttcctgctttcttttgtgggcatttagtgctataaatttccctctacccactgctttaaatgtgtcccagagattctggtatgttgtgtctttgttctcattggtttcaaagaacatctttatttctgccttcatttcattatgtacccagtagtcattcaggagcaggttgttcagtttccatgtagttgagcggttttgagtgagtttcttaatcctgagttctagtttgattgcactgtggtctgagagacagtttcttataatttctgttcttttacatttgctgaggagtactttacttccaactatgtggtcaattttggaataagtgtgatgtgctgagaagaatgtatattctgttgattttgggtagagagttctgtagatgtctattaagtccgcttagtgcagagctgagttcaattcctagatatccttgtgaactttgtgtctcatcgatctgtctaatgttgacagtggggtgttaaagtctgccattattattgtgtgggagtctaagtctctttgtaggtctctaaggacttgctttatgaatctgggtgctcctgtattgggtgcatatatatttagggtagttagctcttcttgttgaattgatccctttaccgttatgtgatggccttgtctcttttgatcttcattggtttaaagtctgttttatcagagactaggattgcaacccctgcctttttttgttttccatttgcttggtagatcttcctccatccctttattttgagcctatgtgtgtctctgcacatgagatgggtctcctgaatatagcacactgatgggtcttgactctttatccaatttgccaatctgtgttgtttaattggagcatttagcccatttacatttaaggttaatattgttatgtgtatttgatcctgtcattatgatgttagctggttattttgcttgtttgttgatgcagtttcttcctagcattgatggtctttacaatttggcatgtttttgcagtgtctggtaccggttgttcctctccatctttagtgcttccttcaggagctcttttagggcaggcctgatggtgacaaaatctctcagcatttgcttgtctgtaaaggattttatttctccttcacttatgaagcttagtttggctggatatgaaattctgggttgaaatttcttttctttaagaacgttgaatatggtccccactctcttctggcttgtagagtttctgctgagagatccgctgttagtctgatgggcttccctttgtgggtaactcgacctttgtctctggctgcccttaacattttttccttcatttcaaatttggtgaatccgccaattatgtgccttggagttgctcttctcaaggagtatctttgtggcgttctctgtatttcctgaatttgaatgttggcctgccttgctaggttggggaaattctcctggataatatcctgcagagtgttttccaacttggttccattctccccgtcactttcaggcacaccaatcagacgtagatttggtcttttcacatagtctcatatttcttggaggcttcgttcatttctttttactcttttttctctaaacttctcttcttgcttcatttcattcatttgatcttcaattactgataccctttcttccagttgatctaatcagctattgaagcttgtgcattcatcacgtagttctcgtgccatggttttcagctccatcaggtcatataagaacttctctacattctagttagccatttgtctaatcttttttcaaggtttttagcttctttgcgatgcattcgaacttcctcctttagctcggagtagtttgatcgtctgaacccttctctcaactcgtcaaagtcattctccatccagctttgttctattgctggtgaggaactgcattcctttggaaggggagaggcactctgatttttagaattttcagcttttctgctgtgtttttcctatctttgtggttttatctacctatggtctttgatgatggtgacgtacagatgggatttcggtgtgaatgtcctttctgtttgttagttttccttctaacagtcaggaccctcagctgcaggtctgttggagtttgctggaagtccactccagaccctgtttgcctgggtatcagcagcagaggctgcagaacagcaaatattgatgaacagtaaatgttgctgcctgatttttcctctgaaagcgtcatctcagaggggtacccagctatgtggggtgtcagtgtgcccctactgggaggtgcctcccagttaggctacttgggggtcagggactcacttgaggaggcagtctgtccattctcagatcttaaactctgtgctgggagaaccactactctattcaaagttgtcagacagggacatttaagtctgcagaggtttctgctgccttttgtttggctacgccctgcccccagaggtggagtctacagaggcaggcaggccttgagctgcrgtgggctccacccagtttgagcttcctggctgctttgtttacctactcaagcctcagcaatggcgggcacccctcccccagcctcgctgctgccttgcagttcgatctcagactgctgtgttagcaatgagcaaggctccgtgggcgtgggaccctccgagccaggcatgggatgtaatctcctggtgtgccattgctaagaccattggaagagcacagtattagggtgggagtgaccctattttcaaggtaccgtctgttacagcttcccttggctaggaaagggaattccctgaccccttgcagttcccagatgaggcgatgcctcgccctgctttggctcacactcagtaggctgcacccactgtcctgcacccactgtccaacaagccccagtgaaatgaacccggttacctcagttggaaatgcagaaatcacccgtcttctgcgtcactcacgctgggagctgtagactggagctgttcctatttggccatcttggaaccacccccaatcacttgtagttttttatttaaagtgagagatgtgtgactcttcctttcccttgaacacttataagccattgtagggttattaattgtctggatttcaaaacggttttgtcttagggaacagggaggcccaaggagttggggaaagacaaaggaatggctggtttggttgagcagtgagaacacacacatttattgagtaagttccctgtttcacatctgcacgtggttccttgtgtcccaaaacaattacaggagtaacatcaaagatcatcgacacagatcacataacaaatatcatagtaataaaaaagttgaaatatcctgagtattcgcaaaacgtaacaccgaaacacgaagtaaacaaatactgatgggaaaatggtgttcatatacttggtcaatgcagggttgccacaacccttcaatttgtaaaacaaacaaacaaaaaccacaacgtcaacgaagcacaataaagtgaaatgtttaaatgaggtatacctccactggtcaggtatcttgtagatgtccctcagttgggatttgtttcatgttttggggaggaagactacagaggtcaaatgccattgtcatcataccatattaaggatacatactatctgtgcatatcactatttagagtaatctcaattacctggctgaggcagtggttgtcaggtttctccactgtaaagtttctccccaccctcccttcttgtactgtagtcctttggaagaaagtccatgtgcacagcccacccttgagggcgaagtgtctaaattatttggaattctgtgtggagatctgttatagtctgtcctgtttactatttagtcatttatttctctcagtttggatttagggacgtttattttatactttgggctataatgcaatacaactttatttttttgttcagatgattgtcacagctacggctattacgagctcttcatttggttccatctgtccctttgatgtgcccccgacattgtagtttttgtttgttttattgagcacttccttattttctggcactgcaagagccatcttgcacatttcctgtcccagtcttagaatctgccatttttctaaggacttctggtccttttttattggagaatgatattaaaaaccaagaactgggtgtgtgttaagccattcttgcattactataaagaaatacyagagactgggtaattcataaagaaaagaggtttaattggctcagggttctgcaggctttacgggaagcatggtgctggcatctgcttggcttctaggaaggcctcgggaagcatccaatcatggcagaaggtgaagggggagcagacacgtcacatggtgaaagcaggagcaagcaagagagagtggtaggggaggtgccacatacttttaaatgaccagatcttgcaagaactccctgtcagcaagtcagcagcaagccatgagggatcgattcacccccatgatccaagcatctcccaccaggccccacctccagcactggatcatgtatctgcctctgtcatattacacagaagttgccctgccctaaaaattcccctgtgcttcatattgaaccctctgcctccccaccctatgagcccctgactactactgatctctttatcatctctatagttttaccttttccagaatgtcatacaatggaaagcattcaatatgtagccttttcaagttggcgtccttcatttagcaatatgcatttcagtttttttcacatctttgtgtagtttgatagttcttctttttgctgaataaaactccattgtatggatgtaccactgttcattcatcttttgagggacctcttagttgtttgcttccaagttttgacggttataaataaagctgctgtaaggtttcatatgcaggtttttgtgttggtgagttttgatagtttaaagaaattggtacattttttcttgcatttgtgggcatagagttatttgtaatatttctttattatccttttactgttcatgggaacagtatgatgactggttcttcattgctgatattggtaatttgtcttttctcttttttctaagggaagagagggtacaatctaatcagttttacctggctagaggtttatcactttttttgatctttttaaagaaccagcttttggttttgttaatttttctcttactgttttcctttttccaatttcattgatttctattttaatttttattgtatttttttcttttgattgccttaggcttaaattgttttcctttttatttttaattttttaatttttaattttctagtaagttcatgtcagacaagtaaaatgggctgacttcgtaataagatttgagggaggcatatttcccacaagcacatgaaaacccagtcaccacacttatgaactacaaaagaatcaaattgttcttctttctctggttttcagaagtgcaagcttagatctttcttcctaatattttcatttaatgctgcacgtttttctctaaacactgtgtgctttgtatcccacaaatgttgatgagttatattttcatttttactttagttcaatatattgtttaatttttgagacttcttagacccatgggttatttagaaatgtgttaatttctagatattgggggattttccagatatctccgttactgatttctagtttaattatgttatttgagaccatgttttgtatgctttctagtcttgaatctgttaagatgtgttttatggtccagaatgtggtctatattggtgaatgtgagctagagaagaatgtatatctaccatgattggatggaattttctataaacgtcatttagatcaggttgattgatagtgctgtgctgttctagttatcagtttctttactgattttctggctgcttgatctgtcagtaactgacagtgttgaagtctccaactgtagtagtggatttgtctctgtatatttttcttagttttgcctcatgtattatgatgccttcttatttgaagcatacacattcaagactgttacgtcttcttggagaaccgacctctttatcattatataagatcctttttgtccctgattatcagacaaaatctgttttgtctgcagttacaattactccagctttcttttgatttgtaatgtcagcatgatatatctttctccatccctttactgttagcatatctaaagctttatagttcaagttggtttcttacagacatgatatagttaggtctttttaaaaaattttgtccactgtgacactctcttttgattggtgtatttagacaattcacgttagaagtgattattaatattgttggattagcatcttccatctttgtaactgttttgcactcattgcttttttctttcttttttcttttttctttttctttttttttttttttttttgagacagagtctccctctgttgcccaggctggagagcagtggygtgatcttggctcactgcaagctccgcctcccgggttcacaccattttcctgcctcagcctcccaagtagctgggactataggtgcccgccaccacgcccagctaattttttgtatttttagtggagacagggttttactgtgttagccaggatggtctcgatctcctgacctcatgatccgcttgctttgtcctcccaaagtgctgggattacaggtgtgagccaccgcgcctggccttttatttctttttaattggacattttatgtgattcaactttatctcctctcttatcttgtatgagcttcctattcttacagcacaacttatcacacagttctggaagtcagaagtctgaaaagcatctcaggggactaaactcaaggtgttggcagggctgtttcacttttttgaggttctgggagagcatctgtttccttgccctattgagaagccacctgcagtccttggcttgtggcccttttcttccatcttcaaagctagcagtaggtcaagttcttctcacattgtatcaactctgatctcctcttttgcctccctctttcacatttaaggacccttgtaattatattgggtctacccacataatccagaataatctctgtattttaacgtcatctgagtagcaactttaatctcatctgctaccttaattctggggattaggatgtgtacatttctgaggggaccattatcggggaatctgccccaatattcacgtaggttcttttctattttccttaagcgtaggccagcttgagaaataaagggacagagtacaaaagagagaaattttaaagctgggcgtccgggggacacatcacatgccggtaggttccgtgatgcccaacaagccacaaaaaccagcaagtttttattagggattttcaaaaggggaagggagtgtgcaaataggtgtaggtcacagacatcaagtactttacaaggtaatagaatatcacaaggcaagtggaggcagggagagatcacaggactacaggactggggtgaaattaaaattgctaatgaagtttcgggcaccattgtcattgataacatcttaccaggagacagggttttaagatcaaccagtctgaccaaaatttattaggcaggaatttcctcttcctaataagcctgggagcgctatgggagactggggtctatttcagccctgtattctcaaccataagagacgggcacacctgggggkgctgtttataagcgtatacctccaggcacgtattctctttcccagggatgttccttgctgagaaaaagaattcagcgatatttctcccatttgcttttgaaagaagagaaatatggttctgttccacccggctcaccggcggtcagagtttaaggttatctctcttattccctgaacaattgctgttatcctgttcttttttcaaggtgcccagatttcatattgctcaaacacacatgctgtacaatttgtgcagttaatgcaattatcataggtcctggggcaacatacatcttcctcagctgacaggattaagagattaaagtaaagacaggcataggaaatcacaagggtattgattggggaagtgataagtgtccacgaaatcttcacaatttatgtttagagattgcagtaaagacaggcataagaaattataaaagtattaatttggggaactaataaatgtccatgaaatcttcacaatccacgttcttctgccatggcttcagctagtccctctgtttggggtccctgacttcctgcaacagaccattattctgtcagttacgatgtagcatgtcaattatacttcttttaaaaagtttttaggaggctgaggcaggagaatcacttaaacttgggaggcggaggttgcagtgagccaagatcatgccactgcattccagcctgggcagcaagagcaaaactctgtctcaaaaaaaaaaaaaaaaaaaaagtttttaagctgggtgctgtggctcacccctgtaatcccaggattttgggaggccaaggcaggtggatcacttgaggtcaggagtttgagaccagcctggccaacatgatgaaaccccatctctactaaaaacacaaaattagctgggcatgttggcgcacgtctgttgtcccagctactcaggaggctgaggcagaagaattgcttcaacctgggaggtggaggttgcagtgagccaagattgtgccacttccagcctaggtgacagagtgagactccgtctcaaaaaaaaaaaaaaaaaagaaaaaagaaattctaatgtgtagaaagcaaaagttcctcttcaaagcttcccctttaaatcataaatgttattgatatcttttctcagaactaactttcttcaagtttcttattttatagtaataactctctgttaagccttatgtagcaaatgtgacagaataagcatactctgacttcagtatctgtgttaaacatgctcacaggcacataatacattttgtgtccttgttccttagtcaaattattcgtgctgaatgtgcccaggcatgtcccagcttgcagcctcctcccttatttgggaatattattactttgtaaatcctttcgtaagtaacttccttttttcctttgttcctcactgcctttacctgtttagaaaagttttgaactgttagccaatcgggttttagtttagattgtgaggtctggctccagccaatggagtcagaacacagcaatagggacctcatgcgtaaaggataaatattctagtgtcttttttactttgtgtgtgcttgtggcaggattgctgacgggcaccaccctttctgcagagagtaaacatcgccttgctaaggaaactttttgtctgattgctgattcttctctgcgacatcggggaataagcatttatttccaacatagtgtttactctagagtttacaatatacattttattttatttttcaattggcatataattgtgtatatttatggggtacatagtgatgtttctatatacgtaacgtatcagtgatcagatcagagtaattagcatatccatcatctcatacatttatcatttctttgtgttgggaacattcaatattctccttatagctatttgaaactctacaatatgttattgttaactatagtcatcctagagtgctatagaccagtagaacttattcctcctatctagctataattttgtaacctttaacaaatctcttcctatctcctcccttcgcccacccttcccagcctctagtatcctctgttctgatttttctgtgagatcaactgtttttcagcttccacatatgaatgagaacatgtggtgtttaactttctgttcctggcttatttcacttaatatcctccagttccatccatgttgctgtgagtgacaggattccactcaaattatggctgaatagtatttcattgtgtttatattccacattttctttatctgtttatctgttggacacccagattcattcygtatcttggctattgtgaataatgctgcagttaacatggggatgtagatgtctcttcgatataccaatttcctttcctttggataaatgcccagtagtgggattgctggttcatatggtatgctatttgtagattttgaggagcctctatactgttttccatagtggctgtactagttgatattctcacccgcagagtgtaagagttcatttttctctgcatcctccccagcatttgttggttttgttttatttgtctttttggtaatagccactctaactgggatgagatgatacctcattgtgcttctgatttgctgttccttgatgatttgtgataagtgaacattttgtcatatatttcttggccatttgtcttcttttgagagatggctattcagatcatttgcccatttttaaatctgatttttttttcctgctgagatgttttagtttctggtttattctggrtattaatccccttttggatgaatagtttgcttatattttctcccattctataggttgtcttttcactctgctgattgtttcctttgctgtatagaagttttttagtgtgacataatcccatgtgtttgtttttgcttttgttgcctgggcttttgaagttgtattcataaaatattttcccagattaacgtcctgaggcatttcccctgttttctttcagtagttttatagtttcaggtcttacatttaggtctttaatccattttgagttgattttcacatagaggtgggaggctagtttcattcctctgcatatgaatatccagttttcccagtatcatctattgaagatactgtcctttccccagtgagtattcttggcatctttgtcaataatcagttggctgtagatattgtggattgatttctgggttctctattctgttccattgctctgtatatcagtttttatgccagtaccatgttgtttccatcactacagctttgaggtatattttgaagtctgggagcatgacgcttccagctttataacttttttttcctctttgagttgtaagccacttttagtatatttggaaccctgtgggtgtggtggtgaagtgtgagggagggtgggagttctggaatctggttaaatctcagtctgacagtgggtctgggtctcacataggttcactcttacagtgggctgtgatcttcacaagtatttctctagcgttagagctcttctcccctgttatctattcctgccctatttccttgaggccctgacctttgcggatttttttgccctgtaggtatgacaggaaggctggagggggctggagtgggaggaatgccctttgcattcccctagttaggagaaggatctagcaaagtttttttcccctggagcaaatgactttgtggcagagaaaactctgggcttattactcttcccctcccctgccagagggatctctctgggatcttttaccttagygcctggtggagttcctggaggtaaagcccacagaagtgtgggtctcgcacctcctgagactgcttccccgagtttctcactctcactagtccacaccgagcatccagcaccagcttatggctctggcagtttctgctccaggtaagcggatctcctctgtgtctttccaggtttccagcacagtttgccctgttagctcagttctctgatsgtcccaaaagagccattgattttgaattttcccagctttttctcattacatgttgcagctgaaagcgaagtcaccaccttgtttttaacttgtattttgtgacttgttaccacttcagtgctttagacacataggctcagtgctgcaatattgtgtctaggtttgattatgctaaatttaacctttcttatgtatcaccggagtagtaaggatttcaaactaccctgcctggtagctttcgctttccttagaaaagcttatcacttcttgactgggccccgtggctcccgcccataatcccagcactttgggaggccaaggccaaggctggcggatcacctgaggtcgggagtttgagaccagcctcaccaacatggagaaactccgtctacaaaaatacaagccgtggggtggcgcatgcctgtaatcccagctccttgggaggctgaggcaggagaatcgcttgaacccgggaggcggaggttgcggtgagctgagattgcgctgttgcactccagtctgggcaacaagagcaaaactctgtctcaaaaaaaaaaaaaaagacactttgggaggccgaggcgggcggatcacgaggtcaggagatcgagaccatcctggctaacacactgaaaccccgtctctactaaaaatacaaaaaaattagctggccgtggtggcggactcctgtagtcctggctactccggaggctgaggcaggagaatggcgtgaagccgggaggtggagcttgcagtgagccgagatcgtgccactgcactccagcctgggcgacagagcgagactccgtctcaaaaaaaaaaaaaaaaaaaaaaaaaaagaagaagagagaaaagttcatcgcttttttaatgttctgttcctgcaagtatgaagatatgttactgcttttcagaaaaagcagtgtgcttttttctgtgcattattttgcactttaaggcaagaaaagctgtaaaggctctctttattagatttttcatttagaaataaattagttcatctaaggatttgtcaagttgttccttttctgttgaaacctgaattgattggttttggttcttctggaagcagatcttgagatagaaatctgaatccaagttgtgtatttgcgaggtaatcccaggacacaccagtaggggaatgaagtgcgccgtctaggaaagacagccaataaagggcatgttttcaagccaggtcccgctgtggacaaatgaagcttgattgtgctgaggaattctagagccagtgtagcatacgtatgtcagagttgtgatttttccactgggggtttggagggaggctggatttaaggaagctggagtcttcttatcagtatattgtgaggactgccctcaggtaggtacacattcccctgtagtttgggcctgccctgcacgtgggcagatgggcttcagaagccagagatacaggtactggcagttggaattcagaacactgtgcgggatagtaatgctcaaggggacctgcaaacaacagtaactgcgatgtttatttactgggcttggttaacagcatgagctaggatctggtgatttgccagattgattaagtctgtcagctttctaaacctgttgaggtggtagattctcagaaattaattttctatacagttcacgatgtatggaggaaaaaagttttctgaaaaaggcccatagctgggcatggtggctcatgcctataatcccaatactttgggtggatgaggtgaggatcgcttgagcccaggagttggaggctacagtaatctatgatcataaccaccacaccccagcctgggtgacagtgagaccttgtctcaaaaaaaaggcccaagattctgtcacagtttgatttgctgatgttctttttggcagtacctagcctgcactctttgaaatgccaaaacaactgtttagaaaatagccctggccttgtgcttccgataatggcctgagtaacctagttaaagccagctgatacttttctgaaaagcatcaaggaatttacaacatagtaaagaattactgggttaagatttgggagatgatagaaaaccagagacgtgagcctctgacccagggccgcttttgcccggctatttgctgttctggaagagcaggtgagaggctgagcagtgtagttaactgactcacaggaggacagaaacaaaaactggagtctagaacttgctgtgggtaagaatcctggtgagccacctggggttaatgttgaaaccttgagaggctgccatccagaacactcatgggctgggagtgtgccagcctttgcctggactgaagctccatggggtcacctgggggtttagtaaatctcaaatggtgaaatggattagggtgatctcaaattgctggtgaccccagtcacctaacagagacagatgaaaatcctctccagaggaagataacatctcacgcctcaaattatttctgaaatgatttttcaaatagtgtccaccataccaccaagtcagtgtaaccaggcccactgggagactaccttaacaagaacccgcacagataacagaggatagaaacaggctttgcagacagtggaattaccagacagacgctaaagcatatgtttattatgttcatggagataaaagttgaataaaaacatttcaacaaggaactggaaacttaatataagggggcaaagcagacctgaaaaacaactaaatactagatctaaaaaatacagtagccaaaatggaggattcagtggattcagcagattagatactgctgaagagaaaagtgagcccccgagagatcagaagaaacctctctgaatgaagcgtgaggggggaaggctggacaacactgaagaagctgtaagaaatatactccatcctgagaaagtctgacatacgtgatttgaatcctagaaggagaagagggaggggggtagaaggaatatttgtttttgtgtttgttttttttagacagagtttcactcttgttgcccaggctggagtgcaatggtacagtatcggcttaccccaaatccaagtgattcttctgcctcagcctcctgagtatctgggattacaggcgtatgccaccatgcccagcaaattttgtatttttaatagagacagkgtttctccatgttggtcaggctggtcttgaacccccgacctcagatgatccacccgcctcggcctcccaaagtgctgggatgataggcatgagccactgcgcccggccrgaaggaatatttgaataaataatggcaaagatttttgaaaccccatgaaagatgacaatccacagaattaagagattcttaatatagcataaggtgattcttaaagttttccacttctaagtaatatgcaaattcattttccttagattgagcttccttcccctcctcctttctaattttagcagtggttttcagaattctgctgagagtaagtgtttttctaacaagtgatgaattacatgttttttttaatcacatttacaaaataatttatgtgctagagttccaaaaattttgattggacaaaaaggatgcaacttctgttttgattgaagactgagagataagaacatcttaaataaaaggcaagctttccagacccaaaggattagtttataatgcaggaatttcagcataatgggcagtcagggggcagagcccctcactggcaccactcagccatggtttataggtagctcctactctgtctcccttgccgactgggaagaatgactctcacggatgaatggcatagctgacacaggaaagagtatgtgtaggatgcaagcgaaaaccctttaactaatactactattaataattatgtataacagctggacacagtrgcatgtgcccatagtcattttatttcaatttatattatttgttttccttactgttcttttctacctcatagaattaggaggtagaaactactgacctcatgcttgctccctgaggctagcttttacctgaggtagcttttaccttcttgtcttccacaggtctatagtgagcgagagctgctactttttacttgggcattcattcaaagtgttgaagaataacagcctctaccatcccttattcactggctcatcagctgtcccaggttttgctcttctaggtatttgccatgttgtttgtccttttagtttcttttctatgtgtttgattaaatttgcttctttctcccatcagcattaccttgtggttttcttctgcatttgagacacagtgttagacatttgatgcattcatgttcttttcgattgtcttacagagaagagattcataaatatcagggatgtctgaggatcattcccagggagcatatgatgtctggaatttgctctgaacctttcctaattcagcaatcgccttatgtgtaattataaactactattggtagctatgttttcttctagctttctgggtagataaggaatgggaaagaataatgtgtatttttatgttgtcatcacctggtaatttcacaggggtatgtgggtactgtactgttgtaaattaatatttgtactcacatgactacagctgagttaaaatatgartgtgcctcttttatggaaaaagctaataaatatttgctgtttgacaatttgtaatgcaagagtatcttacaagaaaatagctggaaactactgaaaggtaaataaatacattttaaatgcattaaatattatgaaaattagtttattctggtagaaaatgaaagctgtcctgtgaaatagaattttctcattagtcttgtggtaaaagatggacattaaaaggtggttaagaatttcagattagatagtgattcatagaggaaaaactattcttcaaattgtgcttttagaacatttgttcagtactcaaattttattctcatatttttgacaaattgatggaattaaaatattctttcggtgtgcttaaacctgctcatttttcttggtgcttgtggctatggaaatcccctttgcttgtgaggttaaaataatatggtatcctatttctttcatagccttaaagtatttaatcttttccatagttgttcttatattttcaagttagggagtttctgtctaagaaattttttacctcatttattaaatcactacatattccttgtagaaaatgttttaaataaaagaaagaacaaagaaaattagccatgatgccactaacctgagtctattaattttttggtagttgccaaaagcagtatagcattttgtagatagtgtagaaagatgaaaataagtagtagattatatagcaaaacattaaagtggtgagacttctggtgatttttaagtagtttcctttttgcttgtctgtgttttctgagcttttagcacaatagcaaaagctattaaaacattaattgcgggccaggtacagtggctcacgcctgtaatcccagcactttgggaggcctgggcaggaggatcacctgaggtcaggagttcaagaccagcctgtccaacatggcgaaaccccatctctaataaaaaaaaaaaacacaaaatattagccgggcctggtggcgggcccctgtaatcccagctactcaggaggctgaggcaggagaatcgcttgaacccaggaggcagaggttgcagtgagccaagatctcgccactgcactccagcctgggcgacaagagcgaaactctgattcagaaaaaccaaaaaacaaacaaaaaaaaccccattaattgccagcaccctgaatggagccttgcctgtagatcttctactgtgttcctagtttattagccttttctttaggattatttaagattttcattaaatcattcagaaatgatttagatttctgaaagattaagatttctgaaaaatgttagattggttagactggaagattagtggaattaagccatcatctgtagagtgacattgcataacaggcattgtcttagtgacctttatgtaatttaactacttcatggagcacagttttatagctggtgtggactatgacctctgttaatagaggacgactacaaaaagcatttcaaaagaagccttcttacctcaaagcccggtattgtgctgttgagaaacacccctcaggctaatctgatgatgatgccggaatgtaaattgggtgagctgagattttagtcctttgcgacctaaatagtttgccacaaagcattttagatattaacaacagtttttaaatattaacaacagtagatgctaacagtcacaataaaagtttgctttttgtgcagattaaaatatgtatgtgcttaaattgttatttgcatgtttttgtatacacatttttctagtttcctggattgcatagtagtgtaaggctactcttcacctgcaaagatgatgtcagcttccagccctgaccccataccactctatgttttcttcctcttcttatgggtatcagcttttttaaaatggtttatgggggatgctagaaaccaacccaatattatgctttgtctttcctctttttatcctttgttttataatataggcaggtgtgtgtgtacttacatgtagcatcctatatatacttttctcatcttttttcacctgacaacataatttacagattaatctgtaattagcaactaataaaaataytttcctttgtatagctgtgtattgctctattgtgtggatagttcatagtttgttcaaccagccccttattaatggacaatgggatttattttagccttttactattataaatagtcctgtagtgaataggcctatgcatatattgttttctatttttaccatctgtggtttagattactggaagtaatattactaagtcaaagagtagatagtgtatttttgctgggtattgctaaatgaacctgcatagaaggtataccatgtgttagaaatgcttgttcctcggtgctgtaaagaaatagcacttgaacattaatttcctcagcaaggccatttttactttctgcagaaagggtacacttaccagcagttttgccatgagagtacaccgaacaaaggagacagggtcatttataacctgacgcatccaccctactgctgtgtctggtttccattggctggaacgggacctcacattctgtatttgtcccgattggctagcaacttagaactttttaaaagaggcaaaggcagaggagaacaaaggaaagaggaagtaacttgtggaatgctgagaaaggtaaaaaccttcaaataaggaagaggaacgggctatgacctaatgcttgcttggactagtaaaagcatgccagggcagatatttaggctaaagtgtgggagctaagaacataaagtacattgatttctttattatggctagcagatatttaagaatgttagcacaggtctttgaataaattttgctgctaagagaagttactatttattcctaattagatggggaggaaagtttttgaagaggaaactctcctttggtttttacacatgtatgaaagcttccctacagcctcactctcagaatatgttgtcaagcttttggattttttcagtttgatcgggtgggaaatgatatttcaatgtaatttaaatttgcacttctcttagtataagcaggtttgagcattttttcatatagctaagaactatttgtgtttctgttctgtgaatggtttgtaaggttgttggtcctttatttttagaatctctatttgagattgtggctcacagaccctaaggtgacccccagtaattgtggtaattacatagcaatagaaaaccaacactgagatattactcttttgtctgtgataccaattgtgagtattttttctagtttgtcacttgtctttttacttttcttttggtgtcttttagtatccaaagttttttgtctttatgtaatccagtttcttttcctatattctgatcttttttagtcctagctagaaaaattttgcccaatcccagataatagaggaatttactcatattctcttctagtacttgtatggagtcatgttttataattaaatatccagttttcgggataaatgatgggaggagtagactctgttgtttttccttatggctaaacagttgttctgacatcatttagttgaaagtcattcatttcctctcaggtttgtgatgttttctttatttatactaagcttatactaaatttatttatagcaaacatattagatttctaaatttctaaatgtaattgggtcttttttctcttcttttcccattggtttgtctgtctgtgcgtgggccctgctgcgctgtttggatagagaagccctggagttcacttgttctgcagtggggctcacaccccactagttctttttccaaagtttacctggctattccctgcttatttattcttttccaaatgaactttataattaacttgtctagctccagaaaaaaaaacctgataatatatttaacatgattgtgtagcacttacaagttaacttagggagaaatgacgtatttattaggattttgtgtctttttatccaagaatatggcatgtacatctttccattagttcaggtcttcctttgggaccttttggagcttcttattgttttcctcataaatgttttagacgtttattgttaaatttgtgtttagtatttaagatgtttgtcttgatattcataaatgagactttttgtgggggaggttcagtctttgtcaggtctttgaaatcaatgttatgttcatttcataaaacaaattgggaagctttcctttaaaaaaatatttggcttaagtagcagtaggatttcctctgacactcttctctgtgcctggtagtttgtttttgttgttgttttttatttttttctttggtgtttttattttggggtttttttggggaactcttttatgactttctttgggactggggtcaattttaataagttgtattttctttaaaagttactctcttctagctaggtgtagtggtgcacacctgtaatcccagctattcaggaggctgagaggatgatgacttgagcctagagtgtggagtttgagtctagcccgggcaacagagggagaccctgtctctttaaaaaaaaaaaaaaaaaaaaaaaacttttacattttcaagttgattttgttagaactatacaaaatcacctcttttaaaaattttctctcacagtgttttcaaatttattgttaagaaatcatggactaagaggaagacttcgtacttttgttggcgtgttgagtattttgtttcataatgaaaccgtctaatgaaactgtttaaactggttagccgtctttcttgcctctccttcttcacaataagcattcatttccgaggatgtggtctgctcacacattatactcttctctaagatttcgcattgcacagaatgtgaacaatgtcctttaacctcttctggaacagaaatacacttcaaaaattatacaaacaagtatgtattaattgttaatactaagcgctatgctaaatatatggggctgaaaagatggaaatgatctctgtcctcagggggcttgtttatggtaagtatagcagtgcttaccctacaggcaaattgtctgttgggatatcttgggttcacatacctgtaaaggatgattctgctgtcaatgtccccctccaaagtcacaatgttgagcatctcattttccagccatgacatttcacctttctggttccctctgtctggtaacaactccagcaattatttggccacaccaggtcctctaatccataggcctatccacatttttcatcttgcctcatacttccacatcctcacatctctgtttccctggcttaaatctgtgatttgtcataatcatcccactgcatataccttgccccattcctgtactgttgtacctccctggcaaaaacccacgtctcagcttacaaggcacctatccctgagcagctaccagaccatgactgaagaaaaacgtaaaaccatagtgacttgtctcactttaataaattcaagttcacaactggttagccttttattcatttaactttgaagaacgtattagttgatgtctaactgctgaagttttggccctattaactattcaagtttatgattgaaagaatttgtcactagttgttttgccttaagtaacctgagatacttgctttgactctcttttcaaaggctttcagacttggatattaaaggcctgggtaattgcctttagaagggatagcaaacagtatgaaacacaaagattttgttgtgtagatactagattcawcattcattattagtgtagattaaagttttagcttttgatttttgtttggatgtttttagtttcttaagcaggtgagaaatttattgaataatagacatctgatttctttgcatttccttcatatttgggtgttggcttcttttttttatttttggagacagtctcgctctcttgcccaggttggagtgcatggcatgatcttgactcactgcaacctctgcctcctgggttcaagcgatgctcagaatcctcagcatccagagtagctgggattataggtgtgtgccaccacacctggctagtttttgttttttgtttttttttttgagatggagtctcgctctgttgccaggctggagtgcagtagtgcaacctcggctcactgcaacctctgagtccctggttcaagcgattctcctgcctcagcctcctgagtagctgggattagaggcacgtgccaccatgcccagctaatttttgtatttttagtagacatggggtttcaccatgttggccaggatggtttcaatctcctgacctcgtgatctgcccacctcagtctcccaaagtgctgggattacaggtgtgagccaccacacccggcccaatttttgtatttttttaagttgagacggggttttactatgttggccaggctggtcttgaactccagatctcaggtgatctacccaccttggcctaccaaagttctgggattacaagcgagagccaccgcgcccagccctaacttcttgacctatccgaaaacagatagttcctttattgcttctgaataccattatgcttaattgtataaaagaaatgatgggattttataaatgtatatgtttttaaatttagtcttacgatttactatgtaaaaaatactctctaaagaattataatatggtttgggaaaaagaataacatctgcctgatagagttgttgaaagttagtatattttacagctcaggaaaccaaggaatcatgatgttgagctgttgtggataggatgagccagggtggttattccatggagaatctggacagagttagccaaatcctgttggtgaggtctttgagcagaaaactttttcattttgcccttaggtgctggcaggtagccaagagtgaacctaaggaaagtagtttcccgggttttttgtttatttgttgttgtcmgtgaattctgtaagattagtctgcctgtttttatcacaaagaccattatttaagttttgaaatgagacaataaattcctgagttgtttcttgtaccttttccaaaaataaacatggctgttgttctgtgctagtttttatactattgttgaataagatggtcatgacctctatgcatagtattaaggtattgcttagcccaaacaagatagtaacagatttgtttagaaatttgcaagcatgttgctaaccatattacagtaatttttttcatttattaacaaatatttattaaattgttgctatattctacgcattattataatctccagggatagacaaaagctctttccctattggagcttacttcctggtatgggagagataaacaataaataataaactcagggaataagtaattatgtatacgtaagaaggtgataaattccatggaataaggaagaccaggtttaatgtttagtgggtggattgaagttttaaatagggtaatcttggtagggccttattgagaagaagatattcgagcaaagattcaatggcagtgaaagaagtcatcatgaaattacctgggaggaagagtgttctagactaagtgaagagccagtgcatagtccataatggagtgtaattgaaatgtttgacccacaaggagacctgtgtctaggacaaaatgaatgcagagagaaggtggtgggaaaagtgctcagagaggtaatgccagattacgtagggacttgyaggtctttgtagggagcagatgggtggtcatgtctaccattgatattatatgttaagtctagatctaatgacaaaaaattaatatttgttcagtttttactatattcatcctatagatacttttcagcactttctgtgggctattcattgtgctaagtgaagggaaaacattaaacaagaaaacaaacagcaaatgcaagccacagtccttgtgaagactatcttggttcagtgcaaagggtggtgttttgtgtgtcagtcattgtatctgacactttacatattttaccttgtgtaattctgagtatttcatttgattctgagtatccaataagatggacaatgtcattaacttggaatacagttgatgaaaatgaggctaagaaaatctgctaatttttccaaagttgcattactgatatatggcagaatgggattagaattcagtcttatcttttcattataccattgattcccaaatctggctgtgcatcagagttaacttggaggcttgtttaagctaaagattccttaaccttatctctgggaattcccatttagcatagctggcgtggagccctgggaatctgtatttttaataaatactccaaggatttctgtattttgaaactaccaccctccattattatatttatggtagtgtgatacaagtgattataggaacctttgtcttttatttttaaagaaaatggttttgttgtttcattgtttagtatcatgtttgctaccagatttttagagatgctctttgtcaggcaaagatttccctatttttcctagtttgttaagaattgagtgttgaattgtaataaactctttatctccattgataaaaccatttgggttttttttcttttaatttatgaaggtggtagattatggtttttcaaatattggaccaactttgagtacttgaagtaaatacaacttgtttatggtatattcagtttttaaaaacatggttggtttcagggttttttttttttttaagatttctgtaatctctctgagattgtctttaatattctttccttaaactgcccttattttgatatcagagtggtaacagcctcagaaagggacatggagaatctttcctcattttctgtcctctgaaggtcattgcatctacctaaaaccatctgttccttagatacttggtagaactcacttttaaaatcacctagaaatgtttttatgatagtttaacattcaaaggtactacagggcatccaggttcctgattttccagagttggtgttatgcatttatgtttttctaggaatttgatcatttcacctgaatttgtaaacagtgctcctgttttcagtctgtgtctgtatttatgcctctttctcattgtcgtcttatttgtgcatttttcttgatatgttttgccagtgcttgtgtagttgcccgatgggttcttcctgcccactccacagacaaaatcataccctgagaccatagcattgcagtcaagaaagaacttcattcatgtgaagctggcccatgcaggagaactgggcttatcactcaaatccattttcctgagggctcagagtttagggtttttatggacagtttggtgggcagggggctagggaacgagtgtggctgatgggttggggatgaaatcataggggggtggacaacagtctttgtgcacagagttcacctctgggaccagttgagtcatgagtcacaagcctgggtaggatctgtctgaaagatatctcaaaaaaacaatcttaggtttgttatatgtaaaatgtttgttccctggtgccataaagaaatagcactcaaatataaatttaattctctcagcaaggcaatctgtattttctgcagaaagggtgctcatcgcagttggaacaatggcgagagcacattcgaacaaaggaaagacgtaatttttatcccttatgctgtttgttcctgctactgtgtcctgtctccattggctggagccagaccgcgcaatctaaactaaaacccgattggctaacagtttaaaacttttctaaataggtaaaagtaatggaaagacaaaggaaaagaggaagttgcttatgccaaatagggaaggggcataggctgcgagctggaacgtgcccgtgagcatgtccagcacaaatattttggttaaggtacaaggacatagaatgtactatgcacctgtgagcatgtttaacagctacataggatagggcttaacaaagagttattagcataaagtgaagaggcttgaaggaagttagtctttaaaataaactattatttctaacacttatgatttactctttaacaagaagggaaactttgaagaggaactttttactttctacaggttctacaataatgatgttatctataggaacaatcgaggaagtcatgaattttgcgacgtctggccacatgactcccgagcagtaagggattatagaaactacacctacatttctgtggagtttaggcccttccagttcccattatcatattcttgcttacaaaggtggttttcagtccctgatcaaggaaaggggctagttatagggaggggctgttatcatccttgctcctaagttaaactggaaaccacatttctcctaaagttagcttggcatacacccaggagtgaccagggacagtttggaggtcagctatgtcagatttcttctactgtcacaattttgcaaaggcagtttcattttattaattttactgatcttttaaagaaccagcatttggcttctgttgttttattttcattttctattaattcctgataatgcttttattattcttttatgttccttgggtttattcagttatatttttcttaattcatagtttgtggtcatgttttctaatataggcatcaaaagctataaatttagccatatcctatgggttttaaaaaagttgtattttcactacttaggttctgtagaaatctctgtagtgttcatttgcacattttgtaacctttctagttacttcgttaccattggtttttagtgtacttgtcttggtcacagcatgtggctccttgaccccactggtcgcactcctcaagagcctttgctcttattcccccacccccccaccccaccccaccctgcatagctcttccccagatagctgcagtactcactattcagtttacgtcttgacacaagtatcacgttttcagggaggccttccctctccatcttcctgaagcttcacacaccttcttctcctcgttgctcttcctgctttattttctttcctcagcacttatcactttctaatgtattatttaacacagtgttcccagctggatagagaaggaagtaaagccattatggggtgtatagctggagactgaaatagaattaaatcataagggaagtggggagggctgagtgcccggactttgcctgtcatgagactgaagacataggggtagatgcagctgaggagtcagggttgtggttggagagggagtttttgttgttgttgttgttgttkttttcatgtggagtctcactctgtcgcccaagctggaatgcagtggtgcgatctcggctcactgcaacctctgcctcccgggttcaagcaatttctcctgcctcagccacccaagtagctgggattacaggcgcccgccaccacacctggctaatttatatatatatttattttattattattattatttttgtgtgtgagtcggagtctcgcattgtcaccccggctagattgcaatggcgcgatctcggctcactgcaacctccccctcccgggttcaagcgattctcctgcctcagcctcccgagtagctggaattacaggtgtgcgccgccacgtcccgctaattttttgtatttttagtagagacagggtttcaccatgttggccgggctggtctcaaactcctgactttgtgatccgcccacctcggcttcccaaagtactgggattacaggcgtgagccaccgcgcccggccctaattttttgtatttttagtagagacggggtttcaccatgttgcccaggctggtctccaactcccaacctcaggtgatctgcccactttagccttccaaagtcctagaattagaggtgtgagccaccgcccccagccggagaggaaagtttcaacttagacatgaagaggtcatcacatcagtcctggatgatgatgaaattgagggtggggcaaagttccttatgtggaatttaggtaaaggtgacagcaggaacactaaccaagacatttggaggcagggttgggcatggtccaacatgatagtgggaatcaggctaaagaaaacacgagaaacgacatcagtgtccatctttcatagctgctaatggagtagctcttggtttcttcagggtctgttttggatggttcccttttgtgagggccaagcagcccatggtggaagcgggaaggccgggagtggtttgaggaaaacaacctgtaagcgtggaccttgctatatggatgaagaaggggttggctccctaggtgcctggttcctcgtggattcagagcagcctgtccggttacactctttaacttcaggatctcatggcctgtggaagaagcagtgcttttgtttttgttgtttgtttacttgctctttgtctaccctaagcgaacattttagggagttataatgtctgtttcccctaaatgtcactgctctgtacatttttgttgcaatatttttgttacaaagttgcacattgcaatttttttttgtcttttcatttgctctcatgggcttccttacttagagaacattttcttctacttcaagtatttgtgtttttctgtttatgtctttagttttaaaagtacctgcagctgacatagcagcgctttcactggcgcctgattttcctttgtactattgtcatttccagccatgcctctggtattactgttggtgggagtttttgtttggttgggtttttgttttgttttggtatgttactgttgttttgtttttttactttttaattaacttgtagtagaatacttaatagttcttggttggcagacagttaagaaactgaactgtttaccatcttctaggcttatggcataaccttgtacaagagaacctaatttttacagtggtgctttactgatgccagtttgctttgtcctgatcttttggggacaataccatttttaagattattttatgctgtagaaataagtaacttaaaagcagtatctctgtgcagttttcttatgtatctacattgcttatatggtttctctgccataagtctgtttactgagatgattttatatgtgcattgggctccttagaattccttaggaaattgtattagcctccatgaagatcagatatcagaaagcttaggagaaattgccaggcacggtggcctcacgcctgtaatcccagcactttgggaggccaaggcgggcagatcacctgaggtcaggagtttgagagcagcctggccaacatggtgaaaccccatctctactaaaaatacaaaaactagccaggtatggtggcacgcacctgtaatcccagctacttgggaggctgaggcaggagaatcacttgaactcgggaggcagaggttgcagtgagccaagatcccaccactttactccagcctgggtgacagagtgagactctgtcttaaaaaggaaaaaaaaaaaaaaagcttaggaaaaattgctgttcagtgctacatttagttcttcttgccttgttttataggtgagggaatataattacttgaactctttatttgaaaataacttagatttagagtgcacactagggcaggcataacctttgattggaaagtagaattttttttaagttgtttatatttatttatttttattgttttgagacagagtcttgctcggttgcccaggccagagtacagtggtgcaatcttggctcaccacaacctccgcctcccgggttcaagaggttctgcagcctcagcctcccaagtagctgggattattataggcgcccaccacaaccctcagctaatttttgtatttttgatagacacaaggtttcaccaggttggccaggctggtctcgaacttctgacctcaaatgatccgcccacctcagcctcccaaagtgctgggattacaatcatgagccaccacacctggccagagttgcttagagttgcttatttttaataatagatttttaagatccttggattaaaaaaagaatcttgcagttctttggttggaagagactttagttgtcctgttatgatacatgtggtacttgttattttccttgtgaaaattataacctgatgagaaaaattacgcaactgaaagcagtccagaacaaaggtgaagaagtatccattaacatgggcaaatgaatcagtcagctatttcactgccgttggttctctgagcattaacccacaggcmtgaggttttcattgttgaaccctttttaaaaactcagtactatccatacatcttcttgtatttgaatatccgttaactgkacgcatagtggtcctacttggtggtttggaaaacagtgattctgtatttggtggatggtttaaagtatactgaagtgtctaacatatttattcttcttttttaggaaattgacaatggcccttcagctatgctaggtctataatgggaagtgtcacagttcggtatttctgttatgggtgcctttttacatctgcgacctggacagttttgctttttgtttatttcaacttcagtgaagtgactcagccacttaagaatgtgcccgtcaaggggtctgggccccacggaccatctccaaaaaaattctatccccgtttcactcgaggcccaagtcgagtgctcgagccacagttcaaagcaaacaaaattgacgatgtgatagacagtcgtgttgaagatccagaagaaggccacttgaaattctcttctgaattaggtaagtatatgatgtttaccagcatccatatcaatgtatttaatcactggaagtttgattaattagttaattaggagatcagaaatgctgcatcattttttccccactgatttattttgtttgtgaactacctgaagttctgtggtttctgcagactcagtggggagttatattctaatttatccagttctgacttcagtatcttatgagaaaacaaacaaggtccagggaagaaaaattaaaaggctagaaagaaaatggaacctatgggagaaggggtttgttttttgtttgtttttttaagagatggggtctcaccatattgcccaggctgtccccgaattcttgggctcaagctgccctcccacctcaaccttgagagtagctgggactataggcatgcaccactgtgcccagccctggaagaaggttttaattgctagaattgttaataagggaaagaaatggttgaaagtttccttgactgtatttaacttatttttaagggtacatttaattaatacagaacataaagtactgagtttaaaaataagctggggttatttatatctaatatgattttcacttaacaagaattactaaggtgctagaaaaaatatatgtatatataatatagtttatgaaatcttagttataaaatagcccttttttcctcctaaaaaattatattctcttcaacttggatgcaagactctattgtctatgcctttgaatactgcaattttagagtgttgattttgacattttattttaagggataagtgagcaatttttgttatcattaaaacttaaagaacttggatcttgtcacaaaaacatcaaataataggtaatttaagagtaaaatacaagagatttttgagagattgagagagccttagaatgtgaaagaaatgttaaaatagagttttcacttggtcatagtttcaaagaaataaaatcagttcttaggacttaatgattttctaatataggaagtcaaaagtatgtaaaattttatgaggaaacaagctaatatctacttcagttttcatttaaaaatatttttaaatagagacgtgatctcaccaacttcaattttcataaagtacaattttcataaatctttttcaaatagccagtggacatttttaaagcattaatgggaaaatgtctagctcttttatttatttatagttacattggtaaagcttttatcaagaagtaatactgagtttaccattttgaatagactctgtatttgcttttgaaagaagtagtgagagaattgtagatattgaataacaaactccagctgcctaactgaaaaactaaattccttatagactatcgtaaagaatccacaaaaaacctattagaggtaataaatgaatttggcagttgcaggtactagatcaacaggcaaaaaccagttgcatttttatactgtagcaacaagtggcctgaaaaatgcagttaagagatcaatttcatttacaatagcatcaaaagtcataaaacacttaagaataaatttagccaaggagctgcaagatttgtatgctgaaaactgtaaaacattgctgaaagaaatcaaagtaaacctacacacattgaaagatattccaggttcatagaatggaatactaaatactgttaagatgtaggtatcacccaaagcaatatgtagattcagtgcaatccctatcaaaatgtcagtggtctttgttgtaaagagggaaaaggttatcctaaaattaatatggaattacaagaggctctgaatagccaaaacagtctgaaaaagaacaaagttgtaagactcagactttccaattttaaaaataaattggactacatcaaaaacaaaaactttcgtacatcaaataacatatcaagaatgtgaaaaaagggctggacgcagtggctgatgcctgtaatctcagcactttgggaggctgaggtgggtggatcacctgaggtcaggaatttgcaaccagcctgaccaacgtggcgaaaccctatctctactaaaatacaaaattaggtgggcgtggtggcaggtgcctgtaatcccagctactcgggaggttgaggcaagagaattgcttgaacctgggaggcggaggttgcagtgagtcaagatcgcgccattgtactgtagcctgggcgacagagcaagactctgtctcaaaaaaaaaaaaaaaaaagtgaaaaaagacaacccacagaatgggagaaaatatttgtaaatcatatttctaataagggttcagtatccagaatatataaagaatgcttgtttgtaattttatttcattttgagacagggccttgctctgtcacctgcggtggagggcagtggcacagtcatgactcactgcagcctcaatctccttggctcgtttgatcctcctgcctcagcctctcgagtagctggggctacaggggtgtaccactatgcccagctaatttttgtatattttgtagagacaaggtttcaccatgttgcccaagctggtctcaaactcctgggctcaagccattcgcctgcctttgcctcccaaggtgctgagactataggcatgaaccactgtgcctgggcccaaacagttcttaaaactcagtaataaaaagacaaatggcacaattttaaaatgggcaaaggatttgatagacatttctccaaagaagatatgcaaatggccaacaagcagatgaaaagatgcttaatataattagtgattacagaaatgaaaatcaaaacaatgagatagccatctcacacccactgggagggctataataataaacttaaaaaggagagtagcaagcgacagtgaggatgtggagaaactggagccctcacatgttgctggtgggaatggaaaatagtgcagccactatagacagtttggcagttcctccataaattaaacgtagaattatcatataacccagcaataccactccagggtttgtacttggaagaattgtcaacaggtgctcgaaaacttgtactcaatgttcattagcagcactattctcaatagacagaaggtgacaacatgttatccaaatatccatcaactgatgaagggataaactaagtgtggtctatccataccatggaatattattcagacagagaagggaatgacgttgtgatcatgctacaacatggatgaaccttgaaaacattatgcttgtgaaagaagccacacacaaaaggtcacatgttgtagggttcctttatgtgaaatgtctagaataggcaggtccatggagacagaaggcaaatgagtggttcccagggactggggaatgggaggaatgggaataactgctttaatgggtatagggttttcttctgcggtgctgacaatattctgcagctagataatcatgctggtcatacaacattgagaatgtactaaatgtcactaatggtatgttttatgttacgtgcataattatcacagttaaaaaatgaaaaacatccacaatttcttacataaaataaatttaatatagaaggaattagtataaataatgtagtagttaaaagtatgcagatttctgagtagagaattactgaacaagcagggaaaggaacctatgaaaaggtatatttgagaaagattattggccaggcatggtggctcacacctgttatcccagcactttgggaggctgaggctggtagatcgcttgggctcagaagtttaagaccagcttaaggtggtatctactgaaagtttaaaaattagctgagtgtgggggcgcatggctgtagtcccagctacttatgaggattgtttgggcccaggaggcagaggctacagtgagccgagattgcactactgcactccagcctgggggacagagcaagaccctgtctcaaaaaaaataaataaataaataaataaatttaaaattaaaaacattttctcatttaatctgaaattaattataaaattaattgaaaagggtcctctggcatgttaattcattgaggtttggctacaattttgagtaggggaataagaaaagtaagctaaaacaatcttttcatatggaatcttttcaagagacctataatagaacatgattctttcatgttctgatacttgttgaattaaggagtatttattgagaatcttctttgtgcaaggctctgctctaggttctaggtatcaagcaattttagttttatttcttttatgttttggtcatcaccaaagtctcttctcttgtggagtttctctccttgtataaaatgctagtggaggtttgttgttttgtgtttaaaaaggatgaactgcatttgaaacagtttcagagagaaggcatattaagagataatgtttctcaaagtagatatggggacactagttgcgttcagataaattggggaaacactgcattctattttttttgagacagagttttgcttttgtcacccaggctggagtacagtggcatgatcttggcttgctgcattcgcctcctaggttcaagtgattctcctgcctcagcctcccaagtagctgggattacaggcgtgtgccaccatgcctggcttatttttgtatttttagtagatacggggttttaccatgttggtcaggctggcgttgaactgctgacctcccatgatccacccaccttggcctcccaaagtgctgggattacaggcatgagccaccacgcccggctggaaacactgcattctatatctcaaccctttacacctggatattcataaaacattcactgtattaaaggaacagagttctactattttttaaaaatggacttttatttatttatttatttatttatttatttatttatttwttttgagacaaagtcttgctctgcaggctggagtgcagtggcgcgatcttggctcactgcaacctctgcctyccgggtttaagagattctcctgccttagcctcccaagtagctgggactacgggaatgcaccaccactcccgcctagtttttttttttttttttttttttttttttggatttttagtagagatggggtttcaccgtgttggccaggctgatcttgaactcctgacctcaagcaatctgcccgcctccacttcccatagtgctgggattacaggcataagcagccgcgccctgcctaatattacagtgactttgattaggcctgtggaggaattccctgacagttaaaccagaaactgtgaagctttttttttttttttttttttttgaaaagacaggatctcactctgtcacccaggctggagtgcagtggcacaactgtggctcactgcaaccttgatgtcctgggctcaagcagtcttcctgcctcagcctcctgagtagccaagtcatggagactacaggtgtgagccactgagccaccacacctggctaatttttttttttttttttttttttgtagtagagacaaggtctcgctgtgttgcccaggctgggctcaagcagtcctcctgccttggcctcccaaagtgctgggatcacaggcgtgagccattgcgtctgacccgggaagctctttttatggaaaagcttatcagtcgcctttttctggggagggactcctgtaaaaactcgcatgtaattgaggcctgtcaagggccactggggttctaaaatctattgctttaatggaaaattataaaaatttttttcctggttgcaggtaaatttttctyttgaatataataaactattcttaagattatggtttgtggccgggcgtggtgtctcacgcctgtaatcccagcactttgggaggccgaggtgggcagatcacgaggtcaggagatcgagaccatcctggccaatatggtgaaaccccgtctcaactaaaaatacaaaaattagctgggcgtggtggcatttgcctgtaatcccagctactcgggaggctgaggcaggagaatcgcttgaaccagggagttggaggttgcagtgagccaagatcgtgccactgcactccagcctgacgacagagggaaactccatctcaaaaaaaaaaaaaaaattatggcttgtgagcaggtggtgtttatggttaagacaccttgctttgacctagactgataagaatttgacttcaacctagagacaacctaagtttgagaaaagagatattagattataataggataaagtcagcattttcttaagatcataatatcgttaacagtaacatgatactttctagatttaattcgctgactaacttcactcttttgcaggtatgatttttaatgaacgcgatcaagagttgagagacttgggctatcagaaacatgcttttaatatgcttatcagtgaccgcttgggctaccacagagatgtgccagacacaaggaatgcagcgtatgtgccttatcggatttgcaaatacattttaacaacacgatgcttttagtgtcagtgtaagaggtcacgaggacggggttcatatttcccaatgcagcgtctttattcagcatactaggaaacttgagacagatttccacttgtattatatgtgaagccacatggtctgagatgtaccaacagagtcctggagcttgctgtgtctcctttaacatttcagatcacctggggaagcagagtagggtgctaattaaataacctgagtataagtttgttctaaatgtttattgattggattcatggcaaataggaattaacatcagtgaagaattttactctcatttcacttttctctttcattgttttttttccatcaaaggcttttcgtgcatgtggtcagtcattccacagacagacatttgttgagcaccttctgtttgctacacgccrtcttgagccctggaagaaacaaacagatgtagtagttcctcagttctcagggctagagtctagcaggggaggcaaataagtcaacaagtccttacatgagtaagggctgtgacagggtttggggaaatgggggcatagtactggagtggtccctgcagagaggtgacaaggctggagggaggcagggctcagatgctggagggctgtgtgtgccctgggaaagaattcagggttctcaatgtgttctctaagttcatggcttttttttgggggggggggatggagtctttctctgttgcccaggctggagtgtggtggcatgatgtcggctcactataacctccacctcccaagttcaagtgattctcctgcctcggcctcctgagtagctaggactacaggcgtgcaccaccacgcctggttaatttttatagttttagtagagatagggtttcaccatgttggccaggctggtctcaaactcctgacctcgtgatctgcccaccttggcctcccaaagtgcagggattacaggcgtgagccactgcgcctggccagttcatggctttttgatgttgcttaaagctcctaaccctttttttcccaaatagttgcttggaatgatttgatacatggaagctcttctgttatcttggtatatcataatttattcaaatcttttttattattgggcaaaaaaataaaatttcaaatataaagtcttatatttgtttccttttgaaacctcattgaggagaagctggacatcagctcatgagtgctgcatgaaacacttgcagtgattttggtaaaaagaactcacatttttatgtaccctctcttccaaaaaagaaaaaaaaccctgaagtttaaaaagtctttattcggctggacatggtggctcacacctgtaatcccagcactttgggagggcgcggtgggtggatcacgaggtcaggagatcgagaccatcctggccaatgtggtgaaactctgtctctactaaaaatacaaaaattacctgggcgtggtggcgcaggcctgtaatcccagctactcaggaggttgaggcaggagaatcgcttgaaccagggagtcggaggttgcagtgagccgagatcgcgccacagcactccagcctagtgacagagcaagacacygtctcaaaaaaagaaaaaatttatccaaaagtaaacaagatagcaggtataggagggagacattattagcaaaatgtaaaactcttgaagaagaaaccgtattgtttttgtaaatgcttttaaaaaaaattgttgttaccataatgttagaaagaggctgaacaggctggacgtggtggttcacgcctgtagtcccagcactttgggaggctggggtgggcagatcacctgaggtcaggagttcgagaccagcttgaccaacatggagaaaccctgtctctactaaaaatgcagaattagccggatgtggtgtcgcatgcctgtaatcccagctcctcgggaggctgaggcaggagaatcgcttgaacctgggaggcggaggtcacgatgagccgagatagcgccactgcactccagcctgggcaacaagagcgagactccgtctcaaaaaaaaaaaaaaaggcrgggggtgggggaagagggtgaacaaggggacagtaaatctgtaggtgaataataatctaaaccattcgagccttttaaaatgtcagaatttcctcatctttatctttacagatgtaaagaaaagttctacccacctgacctgccagctgctagtgttgttatctgtttctataatgaagcgttttctgccttgcttcggacagtgcacagtgtcatagaccgcacgccagcacacctgcttcatgagatcatccttgtggatgatgatagtgactttggtaaggaatgctgcacctggtaacattggatccaggctgtcagtcactacagcactgacaaacactaacacagctgaactttcaagtacgtggtaggtggggatcctacacgtgcagtcacagctgggctgaccacaaataagtctgaagaaatccattatctttgtaacctgcttataaactatgctacccaaatttgggccgtgaaattttttccgtggcttactttaaaaaacacacctctttttatttgaaataactgtaggttcacaggaagttacaaagacggyctatgtacctttatccagttgctccatcataaaattcccctgtcagaaccaggaatccacattggtacagtgtgtgtggtccagggtcattctgtcacacaggtggactcccacaaccctcactgcaatgatacagaactgtttcctcacccggagggcccttgtgctgcctctttctagtcacacctcctgctttcctctactcttccccagtccctgaaaccacgactctatgattttgtttccatctctgattttgttatttcaagaatgtcatataaatggaatcacacggtatgtgaccttttgagatgggcttttttcatttggcatgatgccttggcttatgcttctctattaagtctcttacactgatcgtccccagataaaagtggattgcattctgatagctcctcaatgatctctgaatgccagtattttatgattcactacatattctatattctgtacgcctttcttaattcaacatagactcttgctaagaatggctttgtgtacccaaacaggatagaaggctttttattacactgctcattcagctctcagtgaccttgcaagaaaggctggaagcccattttatagagggagaaatataaaaagtaatttgctcagaccccatagctgttaagtagtagagtggaaatgagacctctggtctgcatagctccaagccttctgctcttttcatgacagcaggctgcaggaacacagtggtacaggtgtatgccagtgactttttcatgcactcgagcgtttattaagtaccacttgtatcaacatcagagttggtataccagtatacttaaatatagaaggtaaagaaatggagagagtcatgggagcaaaattctcaaaccttggccaaaaacaaacaaacaaaaaacctaataaataaatctgagtctggaccacgtagaagattggttacatactgatttctagaatttatggttggtttttgtttttttttaagtcaacttgtattttggttttcactttgtggctattttacctaaaaggaaaaattcataatttgaggtggtttgtatattaactatggaaagaattactgcttattatcttacacgatctttcaagttattctgaaatatacaggtgaatgacatagaattccttaaaaaatatttagcaaccttggaagaaagatgctaaattaataaaaggacatattcaatgctgttcttgttattcttggtaggggcaatagaagttgtttcttaactattttgaaatggactaagacttaataaattcctttgtaataaaaggcatttatatctcattttctttgttatcaatgtgatttatatatggtcagctgaacatttatgcactcaaaatactcatttcaaacattctttgtgcaaagcattgtgctcgatgctatggagatacaaataagtctgtaactaaagtaagtattcctctttgctagtattccagctcttacccttcatttctttttcttcctacaggataagctacaatactcttttaaagtaaaatattctgtagtatttgcttgatagtttgttgtaaattttagcaagtactagatacaactttagaatagctgtaaagtgtctttatatatgtctcatacagtttgaataattgtgggactttattttcagatkatttgaaaggagaactagatgaatatgtccaaaaatacctccctggaaaaattaaagtcataagaaatacaaagcgtgaggggttgattcgagggagaatgattggcgcggcccacgcgacaggtatcacttctcgttagctttgctctacaggtgttggatgacaagggctcgagcctcagcgcctgtcctgattctgcaaagtctatgaagagtagtgtttcaaacggacattgccagcaggagagatgaggcttgttctgtttgggaaagacctgttcataacgccaagcctgccatcccaaagcacatagtgcagggggctgaactctcaaatcctcagtgtctattttcatagcaacccttctttgatacttactgcccctcaaatatattttatatcttattcacttatataagcagaaaagcccagaccaaaatgtaactgaatttttatgtttttaaatacaaaatttaaaatgtatgaacccaaactgtcgattggaactatgcttttaactcttagtgcggagtgcatccctctggagccacacatcatgactttaattggttaatggacgtaagattgacttacaaaactataaatggcattttctttaaaattccctcttaatccttctgattccatcaaggagcaagtctcygttgttactagtatatttccatcatacactgctctccccctttaaaaagaaataaccgatctcaaattcagtcttctgcagaaaatatatctggttagtcttcagttacgttatattgattctgttgtatttcgttttatggttacctatgtgtaattggtctccctgagtttcatttatgactgtaattaaaacatttttaaataaatgtaattaaaactaatgaatctgtttaaaaatgttaggcatgtgatattgcaggtagggcatggacatggcgaaaaaattttgaaaatcatttgagaatgatggaacttggtggggatattccctagcagtgacagcatctactgcagtccttcctatattccacgctctcctagataacctgcctctgggtttgtggtggtcggcactgctcaccaccactccccctgtggagccactggctcgtgtgctgggctgagttggaacttcacttttagtatctgtcttctcttatttctctgaagcccacagtgacctgaagcaattaacaaaaaaaaaagagaagcagctcctctacatccyatctgcagtggatgcagactgaattcaaggcttgtgagactttttttctaggtttctagtcatgtaaaaacttactgaattggctgtgtggagttatttaaggcaaagcaataaagtgaaaatcctggggtattttcaatattaagccactcaaaacattgtactgttacaatgcaagtttactgtgaactgacttttttttagatagcaatagctatttaggtttttttcccttatgatctcttcaggtcctcattgagatatagtttaggatctgtcmgaagcaagccagtttgcatggaagtcattgtttcaggttcactgtgaccagatgtggtcttcctttaaattggtgttaattggaaaaagtaacacttttagaattaagaaaagctctgaatccattttctcctcgaagcaattgtgattggtctcacctcacccccactgatgtgcatgtggaaggttctgcctttctgcattaagtgacagcggagagctgcctacatcccccacccttcaggctgtttacagacactgagctrtgggactgattcacgggcatcattgaaaactgtctgagatactgcttttatcactagttgaagttggatagataacatttggtgctttaagtagttcatgtaaaatcttcatacatttcacgagtgcacttttagaaaaacaataatgtgacctgatgatgtcattctgagtttctcaactgctcagaagaaccgtggagctcttaaatttgaaattataaaaaaaaaaaaaacctcagttctgctcacatttatcaagaggagcttaaaatgcagaataaaatgtcgatgatttatatgttgctaactagaagaaaggtgtatcccattggcaggtgagagccactgaagctaagagggtggggggcagtagaaaggaaaggtgggagatggaagaaacagaaatgagcaagaggcgtccccgagagcgccaccagctgcgcctccctctctccggggagaactgctgtgtggcagccatcatccatagttacagtgcatgtcctagtcaccagtgagaaggcagctgtgttctctgtactctgtttactgaggcagagagatgtcttctamgtgtgtgccaaacttcaaaatattttgattaaaataattgtaataaaaatacctacatacaactggccaccgtcatggcaccaaaacatcttggaatactcaatatctgggcttccaaagagttgagttgttacggtgagactttgactctgtttactgaagagattctgaattgcctgtcagttttttcaagagtcgcgcgtatgatttgtatgggtccctcaatcacagcaggacactgcacgcagcattactggctgagggacgtccttgttgaccaccggcagtgaagtgtagtggagcagttaggccgtctggggctgggagggtggcagtcgtgtttcatgctgtgtcagcgcgtcatcccattggacgggtggttgtacctaaattgagtgttgtgacactctcctgagcctctgttgtttcctccccaggagaagtccttgtgttcctggacagccactgtgaagtgaatgtgatgtggctgcagcccttgctggccgccatccgtgaggaccggcacaccgtggtgtgcccagtgattgacatcatcagcgccgacacgctggcctacagctcgtcccctgtcgtccgcggagggttcaactggggactgcacttcaaatgggatcttgtccccctttctgagctaggacgagcggagggagccactgcaccaataaagtaagatcgctcctttgtttgacaaattcctaccagtgcttccttaaaagagaacaaaatgatattaaagataattcctccttctttgtaaggagcaaaagtgttagacttaatttgtacgttaaaaattcttgagtacgtattgaattttatgcagtctgccaagtcctaaggaaagatttatgagtaagacagtatgtgtgccctcaaggacttagagcctgtgagaagagcagacagaccaggccaccattgcagaggaagccctgggagggccccgtgtggtggttgctgtttggtatgtcaaacactgcggtgtatttatagttcactaacttaccttcagttctttggtagccggagtgatgttgtgaaaaacattaatacgtaagccttttctttcattaggattttgaagatggattcctgctagtataattactaagtcatagtataggaattattttacgttcttatctgtgtttcatcttctgtaatataaagctgctcttatttttgttttctttaaaaatttcttacgtagattgaattcaaagaggtgtacctgtattttaactttttaaagaatacatttgttcttgatttgccagagtgtaatcaaaattggtactttctccaaacaatgccaggatctcagaaggttcacgtttcagttattcctcccccaatttatttgttattgttattatgttgttatcgttgcttatttgttgttatatacaacaatattgtatattgttatataatttaaaccccagaagccatttcttacgtagcagtattcacacaggcttgcccaagtatctccgctttatgttaccctgttctttctgcagctgtaggctctatccgggattgctcccacactcttagtcgttcttttagttggacatcctagtgatcagtcctctgtttttccgaaaatgtccttatgtttcaccattgttttgaagaacatgtttactcagtatccagttctaggttggcartagcagacatatatgttctttcagcctttgaaggcatcattcaagaaccttctggcattcaccgtttcagacaggaagtcagcgttgttagtcttactttgcttcccttaagataatctctttttcattggctgcttacattttttttggtcttgtttttaaaaagtgtcttttggatatgtataaacatggttacttttttgaagtaactaatttgctgccgaattctgccttgtcttttttgttgaatatactgagcagttaaagtctttgcttgataattccatatttgaaaccccttcatatctgtttctggtgtatgttgtttctctcattttgttttcatgtgattttatcttcccatttgcctggttatttatttgttgcttatttatttttgcttagtgccagacatgatatatgaaaaattatagaaatacattcatacctgggatgatgttttttccctgcagagataattttgcttctcttgtgcaggcagcttgggccactagaatccacaatcccctctatccagttttaggaagtgagcggactggaagctagctcgagtccctgagaggactagtctgtggcttttctcactccagcacagggcttctcagccttggcactactgacattttgggccagataattctttgttgtaggggccctcttgtgcattttaggataggtagcagaatcccagacctcaacccagattctaggagcaccctgccacacaaacacatcaagatgtgacagctaaaaatgctcccaacattatgaaatgtctgttggggacacagtcatcccagttgagagccactggtctaacttgtgtgagtccaactcccaacgtgtgatgtttgtcaggtctctccttggtggaccttagagcccagttttgatccccaaggctctgtgagattgtcagaaggaatgaccatatcaggtggctttccatcagaaatggttataataggaaaagaactttcgagacttagaaaagtagccttcgtatgccagatactagcatattattagcaatctagaaaattcagttgtatggcctggctcattctctgatactggataaaatgattcataatcattaattcaatttttattagttatgttccaaaatgacactgagtattttaaacaaaagtagtaggtaagataactgactataaggaatgagtacagtaattttcctttttctaggtcaccaacaatggctggaggtttgtttgccatgaacagacagtatttccatgaacttggacagtatgatagtggcatggatatctggggaggagaaaatttggaaatatcatttcgggtaatttaatttttgcatgctcaattaataactgtgtagtggaatatgattttcatccatgatctcatattttctttatattctccttgattatttttttttcgagatagggtctttctctgctgcccaggttggagtgcagtggcgtggtcatggctcactgcagccttgacctcctgagctcaagcgatcctcttgcctcagcctcctgattagctgggactacaggcatgtgcctgtaatttttctattttttgtagagatgggsgtctcactatgttgcccaggctggtgtcgaactcttgggctcaagtgatcctcctgcctcrgcctcccagagtgctccatgactatctttattgacaaattgtccttaatgaatgctactttgtcagaatctgtgatatggataatatctgttcgaaatgtcaagagtatacatgttgatccattggctaggaaaacaacaacaaaatgaaaaagcatgtaagaagccatgtatttaytggtatttatttttttgagacagggtcttgctccgctgcccaggttggagtagagtgggatgaatacagtggctcactgcagccttgaactcctgggctcaagcgatcctcccacctctcagcctcctaagtagctgggagtacaggcgcatgccgccacacctggctaattttctactttttgtagagatgcgagtctcactatgttgcccaggctggtcttgaactcctggactcaagcaatcctcctgccttrgcttcccaaggtgttaggattacaggcgtgagccactgtgcctagtctgtttttatggatttagaggtacaagtgcatagtgtgtggtggtaaagtctggcttttagtgcactcatcaccagagtaatgcacattgtacccaacaggtagtacttcatccctcactcctctcccatcttttagagtctccagtatctgttattccactctgtgtgtgtgtgtatatatatatatatwtttttttaaattataaaagtattgttgtaatgaatggttggatataaatttaaaatgtcttaatgtgctaatttaaaggtttgttctttttttgttggtttattttattgatactaccagatacatatagtcatatagtcagggtgaccagatttccctgaggcctaagaccatcctagttcatacctgttctcttggaaaaataaatagcttcccattgtactttcagaaacagctcagtttgatgctgcattataccatcaccccatgtatagcttaccaagtcctttgtgtatacaggcacccctgtcccgaggaggaaatccacctcgcattatctgtcttctccaattgctaaggtttgaaaggtgacagcataggtggagtctgtggctcagaggaccatggtgtagacagtctttgggaaaggcagaaagagggcgaggggagagctgagacttctccttccaagcaaatatcccagtatttctcccaaccatctcctagtccagttagcagaatccctatcagataataccatgatacttgttcatatgtccttctgtatttctgcaaatgtattgactacagtatttttaaaaagcaagttttggctgggtccatggtggctcacgcctataatcccagcactttgggaggccaaggtgggctgatcctgaggtcaggagttcaagaccagcctggccaacatggtgaaaccccgtctctactaaaaatacaaaaaaattagctgggcgtggtggcgggtgcctgtaatccctgctactcgggaggctgaggcaggagaatygcttgaacctgggaggcagaggttgcagtgagccaagcgccactgcactctagccggggggacaagagcgagactgtgtctcaacaaaaaaaaaaaaagaaaaagcaggttttcattctgtaagttttagaatgttagggttaaaggcgtaatagattttattatgcttcttatttaatagattttattattaaaagttcagtctctttttagataaggcaatctaatcccacaaaaacgaacttaactccaaagtaattcagatagtcaaggacagaatttagaccagagctaaggtcttttgaatcttaatctggagttattctatatattttatattaaaaaatctgttttccaaaaaagaatatgcattgtataagcaagtacctgtgaaactaaaatgagagaacaggtaataagcacttcttaaaagaaaataaataaataaataaataaaaataagcacttcttgttcttaagtgcctaagatcaagtctcttgatctgttaaagcaacaaagttgggtaagtgcaatttcagacttatggtagtaaatgctgactatagcattgttttagcatttagttccttgtaatgataaagacagacaatttctaacaatgtgtaccttctcatttccttctatttgaatatttgtatctaataagataaatatcttgccaagtttcataaacacctattgaataaagattaatttcattgaaaattcatacattggtttcacaacaacatgaggcaactgttaacacctgtttttgcttctggccagatctggatgtgtggcggtaagctcttcatcatcccttgctctagagtaggacacattttccgaaaaaggcgaccatatggatctcccgaaggccaggacaccatgacacacaactctttgcggctggcacatgtctggttggatgaatacaaggtgagatgaaatttcttgtttagaaggatgaatgataggccggcagtgactggcctagtgatagctttagttgcttacttttcactctggcatatttctcttggttaaccttcaccttagggccaactctttctagtttccccccacccccttcacctagtacttcacttctttctggttctaatctgactcttttaattttgtaagtgtctactccataagaagtaatgcggctaatgttggaagaaattccatcttcagtttctttattccgtctggtctctctattgtgacgcctgcaaaagttggctttcttttttttttttttttttttttttttttttttttttttttttgagacagggtcttgctttgtcacccaggcaggagtgcagtggtgtgatcacggctcactgcagcctcagtctcctgggctcaagtgatcctactgcttcagcctcccaagtagctgggactataggcatgtgctaccatgcctggataattttttttaaaaagtgtttttttttttgtttgtttgtttttttagagatgggatctcactgtgttgcccaggctggtcttgagctcttgggctcaaaagatcctcctgccttggcctcccgaagtgctgggactacgtgtgtgagccactgtgccaggcctggccttttcttttactcattggacttcgtggtgacccaatcccgtttcttcccctgttagagggcacatttagaattacttcccactttctcttctgccttaggtcactttatatattttctttgtaatgatttattgaagtataatccaaaaattgattttggaatattttatcactgcaaaaagaagtccatagccttcgatcatctccccaaagtctccctctctgcctcagccctagacagccaataagcaaccattaatctactccttgtctctacttaatttgccttttctggatatttcctacaaatggaatcataaactatgtggtcttttctgtctggcttcttcagttgagcatggcgttttcaggttcatccgtgccgttccatgtatgggtctgcattcctttttattgccaaataatattccattgtatgaacagaccacattttactttatccaccagctgatcaacatttaggttgtttccactttttttttttttttgagacagagtttcactcttgttgcccaggctgaagtgcaacggcgcaatctcggctcactgcaacctccacctcctgggttcgagtgattctcctgcctcagcctcagcctcccgagtagctgggattacaggtgtgagccaccacgcctggttgctgctgtatttgtgtatagctattttttaaacatttgttgtgcacctcctgtatgccaggctctgtgttagggcgtgagccaccacgcctggttgctgctgtatttgtgtatagctattttttaaacatttgttgtgcacctcctgtatgccaggctctgtgttaggttttgggggataaaagatgaataaggaagtgcacagtaatttttcacaccgtgagggaaatgtcaacagagacatgtagcttgtgctggaatgacagggacacagtggtgcactgtgtttgggggcagtagggactccacagtgcttctcctacagcactgtttatctcccctctccctccttgaccagactttgaggtctaattccatgctcatctctgaatcatcactggctaccatagttctcaacacatggtcccactcctagccactctttgaggaggtctgccagtttaaactcattttcatagtcaggttaatacagtatttgcctctttgaccgtgttgacattgcactgagtgtgtaaaatcaggggagtaaagtggctggtgccttagcataaatcgaggcatcagcacccagttatactgtagtcactgcattcttcaccagcactcactcagaagacaaaggccagctgcatttccgaatatcattgatataataataattttagtaaatctcaatgtgcctttttagtatcctgtgtgagtatgcgtgctcatacaaaaagcacttctgctgtgtactgaagtacggtgcttggttcaaggaaaaacacttgtgcagttgtttgagttatgggcggagctagcggctgctctccagaacactctttttatatgttaagactgactcacaaaccatagttactcgtatttgggtaaaacgaactaaataatgaaaatgaaaacaactgacagtatttgttgcaaatgacaaaattcaagccctcaagtgaaaattagaattttgaaaaacttacatttaccgccaggagcttgacagcttcctagtacttaaaaattttacttggccgggtgcggtggcgcatgcctgtaatcccagcactttgcgaggccgaggcaggaggatcacctgaggtcgggagtttgagaccagcctgaccaacatggagaaaccccatctctactaaaaatacaaaattagccgggtgtggtggcgcatgcctgtagttccagctactcaggaggctgaggcaggagaatcgcttgaacctgggaggtggaggttgtggtgtgccgagatcgtgccattgtactccagcctgggcaacaagagtgaaactccatctcaaaaaaaatttactgaggagatcagtggttttatatataattttttgatattgtatagtgaaatttttcaatatttggtagaacagtacaatccagtggagtagtattttccaaatgactaatccacactgttacaaaaacgggtggaagatccattcagagagcaagacagaccaggagatattatttaactttatttatctttgttttttgaatcagagtcttactctgttgcccaggctgtagtgcagtggcacgatctcaattcactgcaacctccacctcccaggttcaagtgattctgcagcctcggcccccaaggagcatgcgccaccactcccaactaatttttgtattttttcgtagagacwcggtttcaccatgtttggccaggcgggtctcaaactcctgaccttaagtgatccgcctgccttggcctcccaaagtgctgggattacaagtgtgagccactgcgcctggccgatagaccagtacattttaatgcaacagtgtaaaaatcttaatatgatttcatattccacatcgtaactagacttcgaaagttattgaattttggagtagtattaaccccataattatatataggttgtaattttaaaaatacatatatttaaccaaaacaacacactgcaacaggctaaatgcagatgtgagaatttagctggcttgttttaagccagccagccagcaaaaaggtttgcaaaaatagaaagcagtgtcactgttctcactacattttgtgtttgtaatgagtatttaattattttaaggaattaataatttgtaggtttctctgttttaatttctgtgtgataaatatgaacagacacagcccacacacgcagaccctcctgggagttttccgtaatttttaagaacatcgatgactgagactcacgagtttgagacccactgatctcatatatacgcctgtttcattgattctcagatacagtttaaggtacatgttattatcattgttagtaatggacttaatcgtgtaaaaaatctctatatagttgtatcatcatttttaacaaaaaattcgattttcttatttttactttttttaaattcaggagcagtatttttccttaagacctgacctgaagacgaaaagctatggcaatatcagtgagcgtgtggaactgagaaagaagttgggctgtaaatcatttaaatggtatttggataatgtatacccagagatgcagatatctgggtcccacgccaaaccccaacaacccatttttgtcaatagagggccaaaacgacccaaagtccttcaacgtggaagggtaagaaagctgttttttccaagtggcttatgaaaagcgtttgatatgaaaagttttgaggtgtccataagctatgacaggtgacactgtggacttaacagagtgtaatgacaggcttcagcttgcctttcattatattctctttatgggaacttctctacgcaagtgtaggacctcaagtgtagatccttgccttgccggcatagctgccttctgtgagggtaagttatgtgacgctttccaagagcgcagaggcatatgggaatacaccccggacagaggccatggaagtgtcaacttcgtgtgtcagaggccaggccaacaagtggagaaatggggcagtgatctgctatttgctcttagctctgggaaccaaatcacagagcagaggtggtagtgagggtcagagtggggacatggatttcatgcctggtgttcccagaagtcatctgagctcagcagaaagcacattgatcaaccacatttccttagctgtctttgtgtcttaaactcattacagttatatagtcacagttaaattgtaggggtccggccataaaatcatccccttctcctgagtcatctcttagagttggcttctaaaagctaagggcaggtactgtctgtgttgcccagtgtcccttcttttatgaagaaggcacttctcccagagcagtgtcaactctccctcagtggctaggaggaagcctagagctttcccccttcctcttctctctaccctataataagacaaaaacaaacccagtatcaggatgtttagtgtcaggtgtttttctctaagtaggagagagcagtgtgtgcccatgtagttgatcgcttaccattattatttcttgctgtttgtctcaccctcgcagttctgtgatagttgtcaccggtgtctctccagtgtagcatgcatattgcatttcattgtgtacttttttatacatgttgttcttatatccctgacttcatttgaaggttctttagggcagggatgacattttaatttctttcatctgctgtagattagtaaacatgtatatgtagctagaattcctagctgacactgtctgcatgttaaaactgctaataacttttggagttataacttttgtctatcttgatgctcctgtgttctgaggctagaacttaggaattaaaaatgcatatatttttatgagccttggaattcgtacctccggaataacctttcacattttgcctggaaccacctccaggcttgggaggcgtctctgggattgtttcccacattctgagctgtgccttctcttacagctctatcacctccagaccaacaaatgcctggtggcccagggccgcccaagtcagaagggaggtctcgtggtgcttaaggcctgtgactacagtgacccaaatcaggtgagtgacacctcggggctcacagccagtgtccgcaaggaggcttccagtgtagggaagctgctgccagtcactcctgaggacatcagtgtctactattctggcttttcttaacccatttctgtgtagtgttgcgttattggaacgctaagcttatgggggttatctatatcctagtgctcaaggtcaccgccagggtctgatttttcaccgaaaaaaactgcaacctccagcataaatgggttaaaaggaagagagtggccttagatgacacctcagtcagctactttcgtctcctttgtatgtttttcctatctctgctcgtcgtcatagagcattttagttgtttacaccattatttgtactttctaatattatgcggaataaattgtgacttacgagccataggaatttgttagaaatggccaagggaagcactacagaatttcagttgattccattcacctaatttcatttcagcttatgtatgtctcctaaataatattaaaacgggcctaaaaatcagcaaataacttcagtttagaacggtaatttcaaactcgtttatgtctgataaaatagcataatggaacagcagtctaatctcataaattgtagtgtctcatttctattttagtggtgggttggtgtcactcagaaaggaaaaaaaaagccacttgggcttttgggtaaataatgtgtgctgtgatgtgtgctgtgagatgtcatccagcgctccaccagaagaggtcacgcccactgtctcaggtgatacgtgtgttgaaaatgtagtttaaaagggatttctggggcccagtgcagaggctcatgcctgtaatcccagcactttgggaggatgaggtgggcggatcacaaggtcaggagttcaagaccagcctgaccaacatgatgaaaccccatctctactaaaaatacaaaaaaaattagctgggtgtggtggtgcgtgcctgtaatcccagctactcaggaggctgaggcaggggaattggttcaacctgggaggctgaggttgcagtaagcaaagattgtaccactgcactccagcctagtgacagagtaagactctgtctcaaaaaaaagaagggatttctgtgcatcttctgggtagaagaggtggcagtgttgtggaagtattaaaatcgcggtgacgcagtttcagtggtgtaggtcacagtgagatgagagctgaaatttgttccagaaaatataagttggggtgatggagttatcctattctaaggctaacttagttatgcttattgcttagttatgcttatatgcatagttgtgctaattctgtagccactagtcacatttcaagtgtacaatagctgcatgtggccagtagctcccttattggacacaggctatgagacaataacagtgttgcagaaaattctctcacagctccctatgactctgattcagggtcttcatattagtgaacactgcacacatccatttgggttctatgagttgaagcaatgagtaaatagaacagaagagaataggttccttttgagcatagtgatggcgcatgttggagagtgagttgttcactgcacttgccatgtcacccagttgtgttcctgaagataatctgtgattcagcctgtgcacttcctgactgccccgatgaggcatcgacgaaaatggcagccgtgtgcccttctgtctccagagggtcagccagaggctgtcgggctcctctgtcacctacacagtccaggaattaagagagttatgtaattgttaaaccctaaaattggaaaagagttaattcagtcaaattcaatgaacaaaattcagccactgcttaggtttcttcccagaatagcacctcactttctcctgccttagctatctgaagtggaatgaaccaagttgaaatctgcttccctgtaagtctagtgcattggtctgtttctgctttgagaccttacagaatcaatatgtggaagaatatgcaaagtgttgttcagtcttaaaattcgttatctaaattttattttatttttcttctctagatctggatctataatgaagagcatgaattggttttaaatagtctcctttgtctagatatgtcagagactcgctcatcagacccgccacggctcatgaaatgccacgggtcaggaggatcccagcagtggacctttggggtgaggagtgctcggtgatgttgggagaatgcgcagaggcccacaaggttgagtgagggagtgtggcagatgaactcattttctaccttgggggtggtcttctcagtctgcagtacagtggtccccccagaaaccacaggtagtacaaaccctgtatatactgtatttctttctagagatayacctgtgataaatttatcaattaggcacagtaagaggttcacaacaataactgaaatgaaacggaacagttagaacagcatactgtggttgcgcagtggctcccgcctgtaatcccagcactgagaaggcggaggtgggcggatcgccgtagcccaacagcctgtttgttttctctataaaaacaaatcagtatactataatacaaattgtgattgcggtcagaaaatatcttattgtattgtgctgcagataacaaacagcagaaaactaacctttggctaagaggggactattgtatcccttaatctgaattcttaagtgctccatctctcctctggatttccatgttttgccagtaattggcagtatttttttgttgctacctttttttcagaaaaacaatcggctataccaggtgtcggttggacagtgcctgagagcagtggatcccctgggtcagaagggctctgtcgccatggcgatctgcgatggctcctcttcacagcagtggcatttggaaggttaaggtggatgctgtggygggaacgttgcttcatcaggcgttgcctccggtgtggagtttggggctttaggaaagcctgggttgggtggagcagaaccatcttggagaagatgacagttccctgtcctcccggagatgcctgggtgtgttagcagaggtgacacgtgtctgacagagacgggagctctgagtgtccacgggtgaagaagtgagtgtccacgggtgaagaagtgagtatgtttcacctggacattaaggtgatgtttgagctgctgttaaggaatttcttgcttatagaggcaaaccacagtatcattttaactctagaattgggcttgtacagaaggataaaacccaggaaaatggatatttctattcagatttatttatgcctctttttaatcccctttaatgatgcagtggtttttatctgatcaggaacttgtcatgatttcctttcttagacttcataggagatagtgctttaaaaaaaaaaaaaacttctattatttgtttagtatgttgtaagtagatcattttaaaaaactgaatctatattatgtttaacttcagaaggcatcatttataagacagtatggcagttaattataaaattattttgatgaattatgatacaatctacataataaagaatccttttgattatttaggatattttgtcttgtattggggcctctggtctgaggtgtgttgcatgctcttggattcaggtgatgacccagtaggctcggtagagtcctctgcctctcaagacgcgtcccagtttcttagcttgagctgtgtgaccttagatactggacatcaaagttgcctgtgcagcacccagggagagctgctcaaccggcagttggatatagaggtcagactcttggaagacgtagctcaattagagaatacatttgggaatcacctgcatatactaaaaattctgaaatataaagtgaagtttcctcccaaaccacatcttaagaggagagatggtctcatattgcaggggatgcactcagatattttatctgaaccacaaaacagtttgccacatcctaaatattttatctgtcatttgacttcaaaggccaggatggtacatatggaaaacaagagcagcaagatggcagattgaaatccaacagtgtcaataatcacattaagtgtaatgaatgtaaatgccacagttaaaaggcagattagataaaaatgcaagatccaactatatgctgcctgtaagaaactcactttatgaatacattaaaattagaaggatgggaagatagatatatgaaagacatctgaatagatagacaaagtagatttcagcacagagaatattactacagatgatatagagggtcatttcatgaataaaaggttcaacttatcaagaagaaataatcccaaagttctgttaaaattgcaagaagtacacgcatccacaattgtagtaagagatttcaacacacctctcaataattgatagaacaagtagacagaaaaacaaccatcttggcctaattgacactacccagcaacacaatacttggaacatttaccaagatagaccatattctgggatattgagcaaggtgtgatatacgtatagaaattcaagtcatgcaaagtagaatagaaatcaataacagacacttggaaaaatctccaaatattataaaaaactagcacacttcccaataccttatgggtcagagaaaaaaatcaaaaggctattttgaactgaccaaaaatgaaaatacaacagtgtgtggcatgcagctgaagcagtacttggaagttttatagcattaagcacctatattagaaaaggatacaagtctcaatgactttagcttccatcttaacagaaaaagagcaagttagacaaagaggcagaaatgaaatattaaataccagaacagaaatgaatgaaacaaaacagagaaaataaagctaaaagctgatttgagagatcaataaaattgataaacctctagccaaaaaaaaacaaaaaacaaacaaaaaaaaaaaccaccctgaaattaccaacatcaggaatgagttgcaagcgcactagagtctacagatactaaaaagcatgctgaacagcaggagctctgattcactgctggtgggagtgcaaagtggtacagccactctggcaagtttcttcctaaacatactcttaacctatgatccagcagttgtgctccttggtgtttacccaaaggagctgaaaaccacacgaagcctgcacatggattttacagcagctttattcatgactgtcgaaacctggaagcaagatatccttcagtacaggaatgttttatagcagctttattcatgattgctgaaacctggaagcaagcaagatgtcctttagtacaggaatgttttatagcggcttcattcaggactgccgaaacccggaagcaagatgtcctttagtgcatgaatggatgaactatagtacattcagacgatggaacattcagtgctgagaagaattaagccataagccttgaaaagtcatggagggatgttaagaatatattactcagtgaaagaagccaatctgaaaaagctacatattgtacgattccaattatatggcattctggaaaaggcaaagacaaaaagatcactgcttgctaggggttatgggagagtgtgatggttgattttatgtcaacttgactgagctaaagaatgcccaggtagctgtaagacatgatttctgcgagtgtctgtgagggtggttccagaagagattagtgtttgaatcagcagactcaggaaagaagatcctctctcacgaatgtgggtgggcaccactcaatccattgggagcccaaatagaacaaaaaggtgaaggaagggtgacttgctctctccttggagctagatgtcagcgttctggctctcaggcctttggactcagaccaggacctgcatcattggctcccctgggcctcaggccttcagccttgggctggaacaacatcactgcctttcctgggcttccaccttgcaggcagtaaatcatagagtatctcagtccctcataatctttctgtatttctatacatcctattggttctgtttttctggagaacccagctaacacagggagggagggatgagcaggtagagcacagacgatttttatatcctacatgaatatagaaaaatttccttacaaaaattagcaaatcaaatccagcaacatataaaaagggtgatacattatgaacaatttggtttttgcccaggaatgcaaagatggtttaacattagagatttgattacgataatttacagtgtttgttagtaatacagggggaaaggcatacgcaaccttgcaggaaaaaaatgtagaaaaaaaattgacagaattcaacacccacttatgataaaaactcagcaaactaggaatggaaagaaaattcctcaacttcatacagtgcatctatggaggtactatagctagcctcatacagtgtgaaagatgataggcaacaaggcaaagacacctgttctcacctctcctagccagcgcaatacagcaagaaaaagaaagccatgtacattaggaaggaataagtaaaagtgtatttatttgcagactatgatcaagtaatgcagaaaatcataggacgtcttcaaaactactatttatcaggaccacaaaaaaatcaatataaaaatgaatacttcatattggcaacaaacagctcaaaactgaagttcatggtattgtgattgcagtttacaatagtatccaaaatataagaatttagggtacatatgacaaaatatgtgtaagagttgtatgatgaaaagtagaaaacattgctgagaaaaattaagattaaatagagaattatactacattcctgattggaaggctcagtgttaataagatgttaattctccacaatttgatctatggatttaatgctacttttaatcaaaatcccagtacgctttttgtggaaactgataatttaattttaaaattgatatggaaatgcataggactaagagtggccaaaataatttgaaagaaataaagttggaggatttacactaattcgacttactatgctgtggacttacggataatgaattgattggtggaagagaaatagacccacacatatatggccaattgatttgcagcaaaggagccaatacaatgcagtggggaggggaaaattactataacacatggtgctgcaagaatctgatatccctgtggacagaaattacctgtgacacccctgccactaccttataccacaaataaacattattttaagatctaaacataaaaactaaaattacaaagcttttagaagaaaatgtaggagaatatcttcatgactttagggtaggcaaagattccctaagcactcattaaagagccagccattggccaggcctggtggatcatgcctgcaatcccagtactttgggaggccaaggcaggaggatcgcttgaagccagaagtttccagaccagcctggtcaacatagtgagaacccgtctctatttgaaaaagataaaggccaggcacaggtggctcatgcctgtaatcccaacactttgggaggccagtgtgggaggattgcttgagctcaggagttagagaccagcctgggcaacatagtgagatcctgtctttaataaaacttttttttttttaaaagaactagccataaaatattaacaaattgaacttcagaattaaacttctgtttatcaagacaccattgagaaaatgaaaaaagccacaactgtattcaagggtttgtgtttaaaattcagtactaaaaagacaacccaattttcaaaatggacaaaatatttggatatgtcaccaaagtataaatagctcaatatatgaaaaggtgttcagtatcatggtcatcaaagaaatgcaaattaaaacgacattcagatgccactttacatccattaaaatggctgaaataaaacagacccacatgggggcttctcaggaaattgcaggaaaggttgcaacacagctttcagattttgcctagtcaacatccacataaaattaaagcaactagagaggcaaacccaaaacccatggatggtattttcaaagtaggtaggtggcaaggtagctgcaaattctctaaagcaggtaggaggagctggatgcctgagacctgtgtggcagaaagccaggcaagctccaggcagacggtgtgttgaggagcggaggacatggaaaggcaatggtggccgcaggaaaccgaggaatcagtgcagcaaacactgcgggggcgtctgcctctccagcactaggcagcggcaggggtccctgggggagggagggcttaggggatgaagacttctagttcctttgaactgatgaaactgccagggagtggaatcaaaattgagcaagacagggataatagagaaacagtagtaagtgaataagaataaagaaaaaggacacagcttggagaagtagagggaagtgaagccaagcattggcagaaggagtgaccatagctttagcagtgcaggaaaacagaagagggagctctgcgaggctgggaaagccgtctgagccaggctgcccgtgtgggaaagccrtctgggccacgctccccggtgtgggaaagccgtctggaccaggctccccagcgtgggaaagccgtctgggccacgctccccggtgtgggaaagccgtctggaccatgctcccctgcgtgggaaagccgtctgagccaggctgccccacgtgggaaagccatctggaccatgctcccctgcgtgggaaagccgtctgggccacgctcctccatgttgagaaactcagttcccaccagatgagcaacagaagacgatcaaggccaagtcccatacaaagtataagaagaaaaagagagctaaatggcatttgtataatgaaagcactccagaaggagatgctcacagaaccgacccaaactgtaacatactgattcaaaaatgagcttaagttatgaggagagtgacatgagaggaccaaatacagcaaatctgaaaactcagaatgtggtggcagaactcaagaagtgtgagaaattaagaatagataaggaggaacacgggggcaaagacataataaggcctttaaaaaagtagaatttgacaagaaggaaacattttaaacaaaaaacacaagttctgcttctggccaagaaggagtaacaggatctgggcttgtcctcctggagtaaaaaactagagactagaaagaaaaacatgcagaacctcttcagccagtggctcccagggagtggcgggacagtaaagccccagaaacgggtgagcccaagactctccccacctaggacagttttctgactttggcatagggaggggaacttaaaaagaggcccatcatcctgcaggtcgagatggacaccagagtccagggaggctaaggtggctggaattcgcatcggaggatgaaggagaggaaggagctaaacagagagaagggccagaacctgcccaggggcgcctggagtctagccgtgttgcagtcggcccgtggaaacttactcctgaggctgggaggctctaaactgaacagctcccaaagatcaggtggggctggaaatcac

SEQ ID NO: 94388 - DNA, 54007 bp, Homo sapiens
  misc_feature (1)...(54007): n = A,T,C or G
gcaaagattgctctggataccatctggaaaaggcggccagcgggaatgcaaggagtcagaagcctcctgctcaaacccaggccagcagctatggcgcccacccgggcgtgtgccagagggagaggagtcaaggcacctcgaagtatggcttaaatctttttttcacctgaagcagtgaccaaggtgtattctgagggaagcttgagttaggtgccttctttaaaacagaaagtcatggaagcacccttctcaagggaaaaccagacgcccgctctgcggtcatttacctctttcctctctccctctcttgccctcgcggtttctgatmgggacagagtgacccccgtggagcttctccgagcccgtgctgaggaccctcttgcaaagggctccacagacccccgccctggagagaggagtctgagcctggcttaataacaaactgggatgtggctgggggcggacagcgacggcgggattcaaagacttaattccatgagtaaattcaacctttccacatccgaatggatttggattttatcttaatattttcttaaatttcatcaaataacattcaggastgcagaaatccaaaggcgtaaaacaggaactgagctatgtttgccaaggtccaaggacttaataaccatgttcagagggatttttcgccctaagtactttttattggttttcataaggtggcttagggtgcaagggaaagtacacgaggagaggcctgggcggcagggctatgagcacggcaaggccaccggggagagagtccccggcctgggaggctgacagcaggaccactgaccgtcctccctgggagctgccacattgggcaacgcgaaggcggccacgctgcgtgtgactcaggaccccataccggcttcctgggcccacccacactaacccaggaagtcacggagctctgaacccgtggaaacgaacatgacccttgcctgcctgcttccctgggtgggtcaagggtaatgaagtggtgtgcaggaaatggccatgtaaattacacgactctgctgatggggaccgttccttccatcattattcatcttcacccccaaggactgaatgattccagcaacttcttcgggtgtgacaagccatgacaacactcagtacaaacaccactcttttactaggcccacagagcacggcccacacccctgatatattaagagtccaggagagatgaggctgctttcagccaccaggctggggtgacaacagcggctgaacagtctgttcctctagactagtagaccctggcaggcastcscccagattctagggcctggttgctgcttcccgagggcgccatctgccctggagactcagcctggggtgccacactgaggccagccctgtctccacaccctccrcctccaggcctcagcttctccagcagcttcctaaaccctgggtgggccgtgttccagcgctactgtctcacctgtcccactgtgtcttgtctcagcgacgtagctcgcacggttcctcctcacatggggtgtctgtctccttccccaacactcacatgcgttgaagggaggagattctgcgcctcccagactggctcctctgagcctgaacctggctcgtggcccccgatgcaggttcctggcgtccggctgcacgctgacctccatttccaggcgctccccgtctcctgtcatctgccggggcctgccggtgtgttcttctgtttctgtgctcctttccacgtccagctgcgtgtgtctctgcccgctagggtctsggggtttttataggcataggacgggggcgtggtgggccagggcgctcttgggaaatgcaacatttgggtgtgaaagtaggagtgcctgtcctcacctaggtccacgggcacaggcctggggatggagcccccgccagggacccgcccttctctgcccagcacttttctgcccccctccctctggaacacagagtggcagtttccacaagcactaagcatcctcttcccaaaagacccagcattggcacccctggacatttgccccacagccctgggaattcacgtgactacgcacatcatgtacacactcccgtccacgaccgacccccgctgttttattttaatagctacaaagcagggaaatccctgctaaaatgtcctttaacaaactggttaaacaaacgggtccatccgcacggtggacagttcctcacagtgaagaggaacatgccgtttataaagcctgcaggcatctcaagggaattacgctgagtcaaaactgccacctccatgggatacgtacgcaacatgctcaaaaagaaagaatttcaccccatggcaggggagtggttggggggttaaggacggtgggggcrgcagctgggggctactgcacgcaccttttactaaagccagtttcctggttctgatggtattggctcagttatgggagactaaccataggggagtggggatgggggaacccggaggctgtgccatctttgccatgcccgagtgtcctgggcaggataatgctctagagatgcccacgtcctgattcccccaaacctgtggacagaacccgcccggccccagggcctttgcaggtgtgatctccgtgaggaccctgaggtctgggatccttcgggactacctgcaggcccgaaaagtaatccaggggttctgggaagaggcgggcaggagggtcagaggggggcagcctcaggacgatggaggcagtcagtctgaggctgaaaagggagggagggcctcgagcccaggcctgcaagcgcctccagaagctggaaaaagcggggaagggaccctccacggagcctgcagcaggaaggcacggctggcccttagcccaccagggcccatcgtggacctccggcctccgtgccataggagggcactcgcgctgcccttctagcatgaagtgtgtggggatttgcagaagcaacaggaaacccatgcactgtgaatctaggattatttcaaaacaaaggtttacagaaacatccaaggacagggctgaagtgcctccgggcaagggcagggcaggcacgagtgattttatttagctattttattttatttacttactttctgagacagagttatgctcttgttgcccaggctggagtgcagcggcatgatcttggctcactgcaacctccgtctcctgggttcaagcaattctcgtgcctcagcctcccaagtagctgggatttcaggcgtgcaccaccacacccggctaattttgtatttttagtagagatgggctttcaccatgttggtcaggctgatctcaaaatcctgacctcaggtgatccgcccacctcagcctcccaaagtgctgggattacaggcatgagccactgcacctggcctatttaaccattttaaaacttccctgggctcaagtcacacccactggtaaggagttcatggagttcaatttcccctttactcaggagttaccctcctttgatattttctgtaattcttcgtagactggggatacaccgtctcttgacatattcacagtttctgtgaccacctgttatcccatgggacccactgcaggggcagctgggaggctgcaggcttcaggtcccagtggggttgccatctgccagtagaaacctgatgtagaatcagggcgcaagtgtggacactgtcctgaatctcaatgtctcagtgtgtgctgaaacatgtagaaattaaagtccatccctcctactctactgggattgagccccttccctatccccccccaggggcagaggagttcctctcactcctgtggaggaaggaatgatactttgttatttttcactgctggtactgaatccactgtttcatttgttggtttgtttgttttgttttgagaggcggtttcactcttgttgctcaggctggagggagtgcaatggcgcgatcttggcttactgcagcctctgcctcccaggttcaagtgattctcctgcttccgcctcccatttggctgggattacaggcacccgccaccatgcccagctaattttttgtatttttagtagagacgggggtgggggtggggttcaccatgttggccaggctggtctcgaacttctgacctcagatgatccacctgcctctgcctcctaaagtgctgggattacaggtgtgagccaccatgcccagctcagaatttactctgtttagaaacatctgggtctgaggtaggaagctcaccccactcaagtgttgtggtgttttaagccaatgatagaatttttttattgttgttagaacactcttgatgttttacactgtgatgactaagacatcatcagcttttcaaagacacactaactgcacccataatactggggtgtcttctgggtatcagcgatcttcattgaatgccgggaggcgtttcctcgccatgcacatggtgttaattactccagcataatcttctgcttccatttcttctcttccctcttttaaaattgtgttttctatgttggcttctctgcagagaaccagtgtaagctacaacttaacttttgttggaacaaattttccaaaccgcccctttgccctagtggcagagacaattcacaaacacagccctttaaaaaggcttagggatcactaaggggatttctagaagagcgacctgtaatcctaagtatttacaagacgaggctaacctycagcgagcgtgacagcccagggagggtgcgaggcctgttcaaatgctagctccataaataaagcaatttcctccggcagtttctgaaagtaggaaaggttacatttaaggttgcgtttgttagcatttcagtgtttgccgacctcagctacagcatccctgcaaggcctcgggagacccagaagtttctcgcccccttagatccaaacttgagcaacccggagtctggattcctgggaagtcctcagctgtcctgcggttgtgccggggccccaggtctggaggggaccagtggccgtgtggcttctactgctgggctggaagtcgggcctcctagctctgcagtccgaggcttggagccaggtgcctggaccccgaggctgccctccaccctgtgcgggcgggatgtgaccagatgttggcctcatctgccagacagagtgccggggcccagggtcaaggccgttgtggctggtgtgaggcgcccggtgcgcggccagcaggagcgcctggctccatttcccaccctttctcgacgggaccgccccggtgggtgattaacagatttggggtggtttgctcatggtggggacccctcgccgcctgagaacctgcaaagagaaatgacgggcctgtgtcaaggagcccaagtcgcggggaagtgttgcagggaggcactccgggaggtcccgcgtgcccgtccagggagcaatgcgtcctcgggttcgtccccagccgcgtctacgcgcctccgtcctccccttcacgtccggcattcgtggtgcccggagcccgacgccccgcgtccggacctggaggcagccctgggtctccggatcaggccagcggccaaagggtcgccgcacgcacctgttcccagggcctccacatcatggcccctccctcgggttaccccacagcctaggccgattcgacctctctccgctggggccctcgctggcgtccctgcaccctgggagcgcgagcggcgcgcgggcggggaagcgcggcccagacccccgggtccgcccggagcagctgcgctgtcggggccaggccgggctcccagtggattcgcgggcacagacgcccaggaccgcgctycccacgtggcggagggactggggacccgggcacccgtcctgccccttcaccttccagctccgcctcctccgcgcggaccccgccccgtcccgacccctcccgggtccccggcccagccccctccgggccctcccagccccycccyttcctttccgcggccccgccctctcctcgcggcgcgagtttcaggcagcgctgcgtcctgctgcgcacgtgggaagccctggccccggccacccccgcgatgccgcgcgctccccgctgccgagccgtgcgctccctgctgcgcagccactaccgcgaggtgctgccgctggccacgttcgtgcggcgcctggggccccagggctggcggctggtgcagcgcggggacccggcggctttccgcgcgctggtggcccagtgcctggtgtgcgtgccctgggacgcacggccgccccccgccgccccctccttccgccaggtgggcctccccggggtcggcgtccggctggggttgagggcggccggggggaaccagcgacatgcggagagcagcgcaggcgactcagggcgcttcccccgcaggtgtcctgcctgaaggagctggtggcccgagtgctgcagaggctgtgcgagcgcggcgcgaagaacgtgctggccttcggcttcgcgctgctggacggggcccgcgggggcccccccgaggccttcaccaccagcgtgcgcagctacctgcccaacacggtgaccgacgcactgcgggggagcggggcgtgggggctgctgctgcgccgcgtgggcgacgacgtgctggttcacctgctggcacgctgcgcgctctttgtgctggtggctcccagctgcgcctaccaggtgtgcgggccgccgctgtaccagctcggcgctgccactcaggcccggcccccgccacacgctagtggaccccgaaggcgtctgggatgcgaacgggcctggaaccatagcgtcagggaggccggggtccccctgggcctgccagccccgggtgcgaggaggcgcgggggcagtgccagccgaagtctgccgttgcccaagaggcccaggcgtggcgctgcccctgagccggagcggacgcccgttgggcaggggtcctgggcccacccgggcaggacgcgtggaccgagtgaccgtggtttctgtgtggtgtcacctgccagacccgccgaagaagccacctctttggagggtgcgctctctggcacgcgccactcccacccatccgtgggccgccagcaccacgcrggccccccatccacatcgcggccaccacgtccctgggacacgccttgtcccccggtgtacgccgagaccaagcacttcctctactcctcaggcgacaaggagcagctgcggccctccttcctactcagctctctgaggcccagcctgactggcgctcggaggctcgtggagaccatctttctgggttccaggccctggatgccagggactccccgcaggttgccccgcctgccccagcgctactggcaaatgcggcccctgtttctggagctgcttgggaaccacgcgcagtgcccctacggggtgctcctcaagacgcactgcccgctgcgagctgcggtcaccccagcagccggtgtctgtgcccgggagaagccccagggctctgtggcggcccccgaggaggaggacacagacccccgtcgcctggtgcagctgctccgccagcacagcagcccctggcaggtgtacggcttcgtgcgggcctgcctgcgccggctggtgcccccaggcctstggggctccaggcacaacgaacgccgcttcctcaggaacaccaagaagttcatctccctggggaagcatgccaagctctcgctgcaggagctgacgtggaagatgagcgtgcgggactgcgcttggctgcgcaggagcccaggtgaggaggtggtggccgtcgagggcccaggccccagagctgaatgcagtaggggctcagaaaagggggcaggcagagccctggtcctcctgtctccatcgtcacgtgggcacacgtggcttttcgctcaggacgtmgagtggacacggtgatctctgcctctgctctccctcctgtccagtttgcataaacttacgaggttcaccttcacgttttgatggacacgcggtttccaggcgccgaggccagagcagtgaacagaggaggctgggcgcggcagtggagccgggttgccggcaatggggagaagtgtctggaagcacagacgctctggcgagggtgcctgcaggttacctataatcctcttcgcaatttcaagggtgggaatgagaggtggggacgagaaccccctcttcctgggggtgggaggtaagggttttgcagktgcacgtggtcagccaatatgcaggtttgtgtttaagatttaattgtgtgttgacggccaggtgcggtggctcacgccggtaatcccagcactttgggaagctgaggcaggtggatcacctgaggtcaggagtttgagaccagcctgaccaacatggtgaaaccctatctgtactaaaaatacaaaaattagctgggcatggtggtgtgtgcctgtaatcccagctacttgggaggctgaggcaggagaatcacttgaacccaggaggcggaggctgcagtgagctgagattgtgccattgtactccagcctgggcgacaagagtgaaactctgtctttaaaaaaaaaaagtgttcgttgattgtgccaggacagggtagagggagggagataagactgttctccagcacagatcctggtcccatctttaggtatgaagagggccacatgggagcagaggacagcagatggctccacctgctgaggaagggacagtgtttgtgggtgttcaggggatggtgctgctgggccctgccgtgtccccaccctgtttttctggatttgatgttgaggaacctccgctccagcccccttttggctcccagtgctcccaggccctaccgtggcagctagaagaagtcccgatttcaccccctccccacaaactcccaagacatgtaagacttccggccatgcagacaaggagggtgaccttcttggggctcttttttttctttttttctttttatggtggcaaaagtcatataacatgagattggcactcctaacaccgttttctgtgtacagtgcagaattgctaactcggcggtgtttacagcaggttgcttgaaatgctgcgtcttgcgtgactggaagtccctacccatcgaacggcagctgcctcacacctgctgcggctcaggtggaccacgccgagtcagatannnnnnnnnnnnnnnnnnnnnnnnnnnnnnnnnnnnnnnnnnnnnnnnnnnnnnnnnnnnnnnnnnnnnnnnnnnnnnnnnnnnnnnnnnnnnnnnnnnnnnnnnnnnnnnnnnnnnnnnnnnnnnnnnnnnnnnnnnnnnnnnnnnnnnnnnnnnnnnnnnnnnnnnnnnnnnnnnnnnnnnnnnnnnnnnnnnnnnnnnnnnnnnnnnnnnnnnnnnnnnnnnnnnnnnnnnnnnnnnnnnnnnnnnnnnnnnnnnnnnnnnnnnnnnnnnnnnnnnnnnnnnnnnnnnnnnnnnnnnnnnnnnnnnnnnnnnnnnnnnnnnnnnnnnnnnnnnnnnnnnnnnnnnnnnnnnnnnnnnnnnnnnnnnnnnnnnnnnnnnnnnnnnnnnnnnnnnnnnnnnnnnnnnnnnnnnnnnnnnnnnnnnnnnnnnnnnnnnnnnnnnnnnnnnnnnnnnnnnnnnnnnnnnnnnnnnnnnnnnnnnnnnnnnnnnnnnnnnnnnnnnnnnnnnnnnnnnnnnnnnnnnnnnnnnnnnnnnnnnnnnnnnnnnnnnnnnnnnnnnnnnnnnnnnnnnnnnnnnnnnnnnnnnnnnnnnnnnnnnnnnnnnnnnnnnnnnnnnnnnnnnnnnnnnnnnnnnnnnnnnnnnnnnnnnnnnnnnnnnnnnnnnnnnnnnnnnnnnnnnnnnnnnnnnnnnnnnnnnnnnnnnnnnnnnnnnnnnnnnnnnnnnnnnnnnnnnnnnnnnnnnnnnnnnnnnnnnnnnnnnnnnnnnnnnnnnnnnnnnnnnnnnnnnnnnnnnnnnnnnnnnnnnnnnnnnnnnnnnnnnnnnnnnnnnnnnnnnnnnnnnnnnnnnnnnnnnnnnnnnnnnnnnnnnnnnnnnnnnnnnnnnnnnnnnnnnnnnnnnnnnnnnnnnnnnnnnnnnnnnnnnnnnnnnnnnnnnnnnnnnnnnnnnnnnnnnnnnnnnnnnnnnnnnnnnnnnnnnnnnnnnnnnnnnnnnnnnnnnnnnnnnnnnnnnnnnnnnnnnnnnnnnnnnnnnnnnnnnnnnnnnnnnnnnnnnnnnnnnnnnnnnnnnnnnnnnnnnnnnnnnnnnnnnnnnnnnnnnnnnnnnnnnnnnnnnnnnnnnnnnnnnnnnnnnnnnnnnnnnnnnnnnnnnnnnnnnnnnnnnnnnnnnnnnnnnnnnnnnnnnnnnnnnnnnnnnnnnnnnnnnnnnnnnnnnnnnnnnnnnnnnnnnnnnnnnnnnnnnnnnnnnnnnnnnnnnnnnnnnnnnnnnnnnnnnnnnnnnnnnnnnnnnnnnnnnnnnnnnnnnnnnnnnnnnnnnnnnnnnnnnnnnnnnnnnnnnnnnnnnnnnnnnnnnnnnnnnnnnnnnnnnnnnnnnnnnnnnnnnnnnnnnnnnnnnnnnnnnnnnnnnnnnnnnnnnnnnnnnnnnnnnnnnnnnnnnnnnnnnnnnnnnnnnnnnnnnnnnnnnnnnnnnnnnnnnnnnnnnnnnnnnnnnnnnnnnnnnnnnnnnnnnnnnnnnnnnnnnnnnnnnnnnnnnnnnnnnnnnnnnnnnnnnnnnnnnnnnnnnnnnnnnnnnnnnnnnnnnnnnnnnnnnnnnnnnnnnnnnnnnnnnnnnnnnnnnnnnnnnnnnnnnnnnnnnnnnnnnnnnnnnnnnnnnnnnnnnnnnnnnnnnnnnnnnnnnnnnnnnnnnnnnnnnnnnnnnnnnnnnnnnnnnnnnnnnnnnnnnnnnnnnnnnnnnnnnnnnnnnnnnnnnnnnngtcagataagcgtcatgcaacccagttttgctttttgtgctccagcttccttcgttgaggagagtttgagttctctgatcaggactctgcctgtcattgctgttctctgacttcagatgaggtcacaatctgcccctggcttatgcagggagtgaggcgtggtccccgggtgtccctgtcacgtgcagggtgagtgaggcgttgcccccaggtgtccctgtcacgtgtagggtgagtgaggcgcggcccccgggtgtccctgtcccgtgcagcgtgattgaggtgtggcccccgggtgtccctgtcacgtgtagggtgagtgaggcgccatccccgggtgtccctgtcacgtgtagggtgagtgaggcgtggtccccgggtgtccctgtcccgtgcagcgtgattgaggtgtggcccccgggtgtccctgtcacgtgtagggtgagtgaggcgccatccccgggtgtccctgtcccgtgcagggtgagtgaggcgccgtccccgggtgtccctgtcccgtgcagggtgagtgaggcgtggcccccgggtttctctgtcacgtgcagggtgagtgaggcactgtccccgggtgtccctgtcacgtgcagggtgagtgaggcgcggtccccgggtgtccctgtcacgtgtagggtgagtgaggcactgtccccgggtgtccctctcaggtgtagggtgagtgaggcgctgtccccgggtgtccctctcaggtgtagggtgagtgaggcgcggccccagggtgtccctgtcacgtgtagggtgagtgaggcaccgtccctgggtgtccctcccaggtatagggtgagtgaggcactgtccccgggtgtccctgtcacgtgcagggtgagtgaggcgcggtccccaggtgtccctgtcacgtgtagggtgagtgaggcactgtccccaggtgtccctgtcacgtgcagggtgagtgaggcgcggtccccaggtgtccctgtcacgtgcagggtgagtgaggcgccgtccccgggtgtctctgtcacgtgcagggtgagtgaggcgccgtccccgggtgtccctgtcacgtgcagggtgagtgaggcgccgtccccgggtgtccctgtcccatgcagggtgagtgaggcgccgtccccggatgtctctgtcacgtgcagggtgagtgaggcgccgtccccgggtgtccctgtcacgtgcagggtgagtgaggcgccgtccccgggtgtccctgtcccgtgcagggtgagtgaggcacggcccccgggtgtccctgtcacgtgcagggtgagtgaggcgcggcccccgggtgtccctgtcacgtgcagggtgagtgaggcgcggtccccgggtgtccctgtcacgtgcagggtgagtgaggcgccgtccccgggtgtccctgtcacgtgcagggtgagtgaggcgccgtccccgggtgtccctgtcacgtgtagggtgagtgaggcactgtccccgggtgtctctgtcacgtgcagggtgagtgaggcgccgtccctgggtgtccctctcaggtgtagggtgagtgaggcgccatccccgggtgtccctgtcacgtgtagggtgagtgaggcgccgtccccgggtgtccctgtcacgtgyagggtgagtgagkygcggcccccgggtgtccctctcaggtgcagggtgagtgaggcgctgtccctgggtgtccctgtctcgtgtagggtgagtgaggctctgtccccaggtgtccttggcgtttgctcacttgagcttgctcctgaatgtttgctctttctatagccacagctgcgccggttgcccattgcctgggtagatggtgcaggcgcagtgctggtccccaagcctatcttttctgatgctcggctcttcttggtcacctctccgttccattttgctacggggacacgggactgcaggctctcgcctcccgcgtgccaggcactgcagccacagcttcaggtccgcttgcctctgttgggcctggcttgctcaccacgtgcccgccacatgcatgctgccaatactcctctcccagcttgtctcatgccgaggctggactctgggctgcctgtgtctgctgccacgtgttgctggagacatcccagaaagggttctctgtgccctgaaggaaagcaagtcaccccagccccctcacttgtcctgttttctcccaagctgcccctctgcttggcccccttgggtgggtggcaacgcttgtcaccttattctgggcacctgccgctcattgcttaggctgggctctgcctccagtcgccccctcacatggattgacgtccagccacaggttggagtgtctctgtctgtctcctgctctgagacccacgtggagggccggtgtctccgccrgccttcgtcagacttccctcttgggtcttagttttgaatttcactgatttacctctgacgtttctatctctccattgtatgctttttcttggtttattctttcattccttttctagcttcttagtttagtcatgcctttccctctaagtgctgccttacctgcaccctgtgttttgatgtgaagtaatctcaacatcagccactttcaagtgttcttaaaatacttcaaagtgttaatacttcttttaagtattcttattctgtgatttttttctttgtgcacgctgtgttttgacgtgaaatcattttgatatcagtgacttttaagtattctttagcttattctgtgatttctttgagcagtgagttatttgaacactgtttatgttcaagatatgtagagtatcaagatacgtagagtattttaagttatcattttattattgatttctaactcagttgtgtagtggtctgtataataccaattatttgaagtttgcggagccttgctttgtgatctagtgtgtgcatggtttccagaactgtccattgtaaatttgacatcctgtcaatagtgggcatgcatgttcactatatccagcttattaaggtccagtgcaaagcttctgtctccttctagatgcatgaaattccaagaaggaggccatagtccctcacctgggggatgggtctgttcatttcttctcgtttggtagcatttatgtgaggcattgttaggtgcatgcacgtggtagaatttttatcttcctgatgagtgaatcttttggagacttctatgtctctagtaatctagtaattctttttttaaattgctcttagtactgccacactgggcttcttttgattagtattttcctgctgtgtctgttttctgcctttaatttatatatatatatatwtwtttttttttttgagacagagtcttggtctgtcgcccagggtgagtgcagtggtgtgatcacaggtcagtgtaacttttaccttctggcctgagccgtcctctcacctcagcctcctgagtagctggaactgcagacacgcaccgctacacctggctaatttttaaattttttctggagacagggtcttgctgtgttgcccaggctggtctcaaactcttggactcaagggatccatctacctcggcttcccaaagtgctgaattacaggcatgagccaccatgyctggcctaattttcaacacttttatattcttatagtgtgggtatgtcctgttaacagcatgtaggtgaatttccaatccagtctgacagtcgttgtttaactggataacctgatttattttcatttttttgtcactagagacccgyctggtgcactctgattctccacttgcctgttgcatgtcctcgttcccttgtttctcaccacctcttgggttgccatgtgcgtttcctgccgagtgtgtgttgatcctctcgttgcctcctggtcactgggcatttgcttttatttctctttgcttagtgttaccccctgatctttttattgtcgttgtttgcttttgtttattgagacagtctcactctgtcacccaggctggagtgtaatggcacaatctcggctcactgcaacctctgcctcctcggttcaagcagttctcattcctcaacctcatgagtagctgggattacaggcgcccaccaccacgcctggctaatttttgtatttttagtagagataggctttcaccatgttggccaggctggtctcaaactcctgacctcaagtgatctgcccgccttggcctcccacagtgctgggattacaggtgcaagccaccgtgcccggcataccttgatcttttaaaatgaagtctgaaacattgctacccttgtcctgagcaataagacccttagtgtattttagctctggccaccccccagcctgtgtgctgttttccctgctgacttagttctatctcaggcatcttgacacccccacaagctaagcattattaatattgttttccgtgttgagtgtttctktagctttgcccccgccctgcttttcctcctttgttccccgtctgtcttctgtctcaggcccgccgtctggggtccccttccttgtcctttgcgtggttcttctgtcttgttattgctggtaaaccccagctttacctgtgctggcctccatggcatctagcgacgtccggggacctctgcttatgatgcacagatgaagatgtggagactcacgaggagggcggtcatcttggcccgtgagtgtctggagcaccacgtggccagcgttccttagccagtgagtgacagcaacgtccgctcggcctgggttcagcctggaaaaccccaggcatgtcggggtctggtggctccgcggtgtcgagtttgaaatcgcgcaaacctgcggtgtggcgccagctctgacggtgctgcctggcgggggagtgtctgcttcctcccttctgcttgggaaccaggacaaaggatgaggctccgagccgttgtcgcccaacaggagcatgacgtgagccatgtggataattttaaaatttctaggctgggcgcggtggctcacgcctgtaatcccagcactttgggaggccaaggcgggtggatcacgaggtcaggaggtcgagaccatcctggccaacatgatgaaaccccatctgtactaaaaacacaaaaattagctgggcgtggtggcgggtgcctgtaatcccagctactcgggaggctgaggcaggagaattgcttgaacctgggagttggaagttgcagtgagccgacattgcaccactgcactccagcctggcaacacagcgagactctgtctcaaaaaaaaaaaaaaaaaaaaaaaaaaaaattctagtagccacattaaaaaagtaaaaaagaaaaggtgaaattaatgtaataatagattttactgaagcccagcatgtccacacctcatcattttagggtgttattggtgggagcatcactcacaggacatttgacattttttgagctttgtctgcgggatcccgtgtgtaggtcccgtgcgtggccatctcggcctggacctgctgggcttcccatggccatggctgttgtaccagatggtgcaggtccgggatgaggtcgccaggccctcagtgagctggatgtgcagtgtccggatggtgcacgtctgggatgaggtcgccaggccctgctgtgagctggatgtgtggtgtctggatggtgcaggtcaggggtgaggtctccaggccctcggtgagctggaggtatggagtccggatgatgcaggtccggggtgaggtcgccaggccctgctgtgagctggatgtgtggtgtctggatggtgcaggtcaggggtgaggtctccaggccctcggtaagctggaggtatggagtccggatgatgcaggtccggggtgaggtcgccaggccctgctgtgagctggatgtgtggtgtctggatggtgcaggtctggggtgaggtcaccaggccctgcggtgagctgggtgtgcggtgtctggatggtgcaggtctggagtgaggtcgccagacggtgccagaccrtgcggtgagctggatatgcggtgtccggatggtgcaggtctggggtgaggttgccaggccctgctgtgagttggatgtggggtgtccggatgctgcaggtccggtgtgaggtcaccaggccctgctgtgagctggatgtgtggtgtctggatggtgcaggtctggggtgaggtcgccaggccctgctgtgagctggatgtgtggtgtctggatggtgcaggtctggmgtgaggtcgccaggccctcggtgagctggatgtgcagtgtccagatggtgcaggtccggggtgaggtcgccagaccctgcggtgagctggatgtgcggtgtctggatggtgcaggtctggagtgaggtcgccaggccctcggtgagctggatgtatggagtccggatggtgccggtccggggtgaggtcgccagaccctgctgtgagctggatgtgcggtgtctggatggtacaggtctggagtgaggtcgccagaccctgctgtgagctggatatgcggtgtccggatggtgcaggtcaggggtgaggtctccaggccctcggtgagctggaggtatggagtccggatgatgcaggtccggggtgaggtcgccaggccctgctgtgaactggatgtgcggcgtctggatggtgcaggtctggggtgtggtcgccaggccctcggtgagctggaggtatggagtccggatgatgcaggtccggggtgaggtcgccaggccctgctgtgagctggatgtgcggcgtctggatggtgcaggtctggggtgtggtcgccaggccctcggtgagctggaggtatggagtccggatgatgcaggtccggggtgaggttgccaggccctgctgtgagctggatgtgctgtatccggatggtgcaggtccggggtgaggtcrccaggccctgctgtgagctggatgtgctgtatccggatggtgcaggtctggggtgaggtcaccaggccctgcggtgagctggttgtgcrgtgtccggttgctgcaggtccggggtgagttcgccaggccctcggtgagctggatgtgcggtgtccccgtgtccggatggtgcaggtccagggtgaggtcgctaggcccttggtgggctggatgtgccgtgtccggatggtgcaggtctggggtgaggtcgccaggcctttggtgagctggatgtgcggtgtctgcatggtgcakgtctggggtgaggtcgccaggcccttggtgggctggatgtgtggtgtccggatggtgcaggtccggcgtgaggtcgccaggccctgctgtgagctggatgtgcggtgtctggatggtgcaggtccggggtgaggtagccaaggccttcggtgagctggatgtggggtgtccggatggtgcaggtccggggtgaggtcgccaggccctgcggttagctggatatgcggtgtccggatggtgcaggtccggggtgaggtcaccaggccctgcggttagctggatgtgcggtgtctggatggtgcaggtccggggtgaggtcgccaggccctgctgtgagctggatgtgctgtatccrgatggtgcaggtccggggtgaggtcgccaggccctgcagtgagctggatgtgctgtatccggatggtgcaggtctggcgtgaggtcgccaggccctgcggttagctggatatgcggtgtcggatggtgcaggtccggggtgaggtcrccagrccctgcggttagctggatgtgyggtgtccggatggtgcaggtctggggtgaggtcgccaggccctgctgtgagctggatgtgctgtatccggatggtgcaggtccggggtgaggtcgccaggccctgcggtgagctggatgtgctgtatccggatggtgcaggtctggcgtgaggtcgccaggccctgcggtgagctggatgtgcagtgtacggatggtgcaggtccggggtgaggtcgccaggccctgcggtgggctgtatgtgtgttgtctggatggtgcaggtccggggtgagttcgccaggccctgcggtgagctggatgtgtggtgtctggatgctgcaggtccggggtgagttcgccaggccctcggtgagctggatatgcggtgtccccgtgtccgaatggtgcaggtccagggtgaggtcgccaggcccttggtgggctggatgtgccgtgtccggatggtgcaggtctggggtgaggtcgccaggcccttggtgagctggatgtgcggtgtccggatggtgcaggtccggggtgaggtcaccaggccctcggtgatctggatgtggcatgtccttctcgtttaaggggttggctgtgttccggccgcagagcaccgtctgcgtgaggagatcctggccaagttcctgcactggctgatgagtgtgtacgtcgtcgagctgctcaggtctttcttttatgtcacggagaccacgtttcaaaagaacaggctctttttctaccggaagagtgtctggagcaagttgcaaagcattggaatcaggtactgtatccccacgccaggcctctgcttctcgaagtcctggaacaccagcccggcctcagcatgcgcctgtctccacttgcctgtgcttccctggctgtgcagctctgggctgggagccaggggcccygtcacaggcctggtccaagtggattctgtgcaaggctctgactgcctggagctcacgttctcttacttgtaaaatcaggagtttgtgccaagtggtctctagggtttgtaaagcagaagggatttaaattagatggaaacactaccactagcctccttgcctttccctgggatgtgggtctgattctctctctcttttttttttcttttttgagatggagtctcactctgttgcccaggctggagtgcagtggcataatcttggctcactgcaacctccacctcctgggtttaagcgattcaccagcctcagcctcctaagtagctgggattacaggcacctgccaccacgcctggctaatttttgtacttttaggagagacggggtttcaccatgttggccaggctggtctcgaactcatgacctcaggtgatccacccaccttggcctcccaaagtgctgggtttacaggctaagccaccgtgcccagcccccgattctcttttaattcatgctgttctgtatgaatcttcaatctattggatttaggtcatgagaggataaaatcccacccacttggcgactcactgcagggagcacctgtgcagggagcacctggggataggagagttccaccatgagctaacttctaggtggctgcatttgaatggctgtgagattttgtctgcaatgttcggctgatgagagtgtgagattgtgacagattcaagctggatttgcatcagtgagggacgggagcgctggtctgggagatgccagcctggctgagcccaggccatggtattagcttctccgtgtcccgcccaggctgactgtggagggctttagtcagaagatcagggcttccccagctcccctgcacactcgagtccctggggggccttgtgacaccccatgccccaaatcaggatgtctgcagagggagctggcagcagacctcgtcagaggtaacacagcctctgggctggggaccccgacgtggtgctggggccatttccttgcatctgggggagggtcagggctttccctgtgggaacaagttaatacacaatgcaccttacttagactttacacgtatttaatggtgtgcgacccaacatggtcatttgaccagtattttggaaagaatttaattggggtgaccggaaggagcagacagacgtggtggtccccaagatgctccttgtcactactgggactgttgttctgcctggggggccttggaggcccctcctccctggacagggtaccgtgccttttctactctgctgggcctgcggcctgcggtcagggcaccagctccggagcacccgcggccccagtgtccacggagtgccaggctgtcagccacagatgcccaggtccaggtgtggccgctccagcccccgtgcccccatgggtggttttgggggaaaaggccaaagggcagaggtgtcaggagactcacgagagctgattctgctccttggctgagctgccctgagcagcctctcccgccctctccatctgaagggatgtggctctttctacctgggggtcctgcctggggccagcgttgggctaccccagtggctgtaccagagggacaggcatcctgtgtggaggggcatgggttcacgtggccccagatgcagcctgggaccaggctccctggtgctgatggtgggacagtcaccctgggggttgaccgccggactgggcgtccccagggttgactataggaccaggtgtccaggtgccctgcaagtagaggggctctcagaggcgtctggctggcatgggtggacgtggccccgggcatggccttcagcgtgtgctgccgtgggtgccctgagccctcactgagtcggtgggggcttgtggcttcccgtgagcttccccctagtctgttgtctggctgagcaagcytcctgaggggctctctattgcagacagcacttgaagagggtgcagctgcgggagctgtcggaagcrgaggtcaggcagcatcgggaagccaggcccgccctgctgacgtccagactccgcttcatccccaagcctgacgggctgcggccgattgtgaacatggactacgtcgtgggagccagaacgttccgcagagaaaagagggtggctgtgytttggtttaacttcctttttaaacagaagtgcgtttgagccccacatttggtatcagcttagatgaagggcccggaggaggggccacgggacacagccagggccatggcacggcgccaacccatttgtgcgcacrgtgaggtggccgaggtgccggtgcctccagaaaagcagcgtgggggtgtagggggagctcctggggcagggacaggctctgaggaccacaagaagcagcygggccagggcctggatgcagcacggcccgaggtcctggatccgtgtcctgctgtggtgcgcagsctccgtgcgcttccgcttacggggcccggggaccaggccacgactgccaggagcccaccgggctctgaggatcctggaccttgccccacggctcctgcaccccacccctgtggctgcggtggctgcggtgaccccgtcatctgaggagagtgtggggtgaggtggacagaggtgtggcatgaggatcccgtgtgcaacacacatgcggccaggaacccgtttcaaacagggtctgaggaagctgggaggggttctaggtcccrggtctgggtggctggggacactggggaggggctgcttctcccctgggtccctatggtggggygggcacttggcyggatccactttcctgactgtctcccatgctgtccccgccaggccgagcgtctcacctcgagggtgaaggcactgttcagcgtgctcaactacgagcgggcgcggcgccccggcctcctgggygcctctgtgctgggcctggacgatatccacagggcctggcgcaccttcgtgctgcgtgtgcgggcccaggacccgccgcctgagctgtactttgtcaaggtgggtgccggggacccccgtgagcagccctgctggaccttgggagtggctgcctgattggcacctcatgttgggtggaggaggtactcctgggtgggccgcagggagtgcaggtgaccctgtcactgttgaggacacacctggcacctagggtggaggccttcagcctttcctgcagcacatggggccgactgtgcaccctgactgcccgggctcctattcccaaggagggtcccactggattccagtttccgtcagagaaggaaccgcaacggctcagccaccaggccccggtgccttgcaccccagtcctgagccaggggtctcctgtcctgaggctcagagaggggacacagcccgccctgcccttggggtctggagtggtgggggtcagagagagagtgggggacaccgccaggccaggccctgagggcagaggtgatgtctgagtttctgcgtggccactgtcagtctcctcgcctccactcacacaggtggatgtgacgggcgcgtacgacaccatcccccaggacaggctcacggaggtcatcgccagcatcatcaaaccccagaacacgtactgcgtgcgtcggtatgccgtggtccagaaggccgcccatgggcacgtccgcaaggccttcaagagccacgtaaggttcacgtgtgatagtcgtgtccaggatgtgtgtctctgggatatgaatgtgtctagaatgcagtcgtgtctgtgatgcgtttctgtggtggaggtacttccatgatttacacatctgtgatatgcgtgtgtggcacgtgtgtgtcgtggtgcatgtatctgtggcrtgcatatttgtggkgtgtgtgtgtgtggcacgtgtgtgtccatggtgtgtgtgcctgtggtgtgcatgtgtgtgtgtctgtgacacgtgcatgttcatgctgtgtgctgcatgtctgtgatgtgcctatttgtggtgtgtgtgtgtgcatgtgtccgtgacatatgcgtgtctatggcatgggtgtgtgtggccccttggccttactccttcctcctccaggcatggtccgcaccattgtcctcacgctctcgggtgctggtttggggagctccacattcagggtcctcacttctagcatgggtgcccctgtcctgtcacagggctgggccttggagactgtaagccaggtttgagaggagagtagggatgctggtggtaccttcctggacccctggcacccccaggaccccagtctggcctatgccggctccatgagatataggaaggctgattcaggcctcgctccccgggacacactcctcccagagcggccgggggccttggggctcggcaggggtgaaaggggccctgggcttgggttcccacccagtggtcatgagcacgctggaggggtaagccctcaaagtcgtgccaggccggggtgcagaggtgaagaagtatccctggagcttcggtctggggagaggcacatgtggaaacccacaaggacctctttctctgacttcttgagctatcgcagctacttgcaaatctcagcagaattttaccctcatggaaagctgatggccaccacctgtgcccaggtgtagaaagtcactagagcccaggagacccccccgtccccaccgcccacctgtgcccgggtgtagaaagtcaccagagcccaggagaccccccccccacatccccgctgcagcggaagctaccgcccccaccgtgaccctcgttccgacctcgacctccatggtctccctctcccggtctccatgtgagtgagatcaggcaggaggtgggttttggggttcgagcctcagctatgctgaatgcctcagctgtgcgttctgtccatgaatggcatccgttgtggaactcgccacgtggatgtatccttcccgctgctgtggaggctcctgggtgcggactgcacggctgcgcctgctgtgagcctgctgggttctgggagtgtcccaggggtcagaggccctcgcctctgggtgaattccaggggtggggttgctgggtcacagacgtgctttagggatgttgtgggagtttccaggggggtgacagtgacaccccggctggctgcttgtgagggcgatgcctccggtggccgctggcctgaaggtgtcgaagccgcctcgtgggattgtgcagggggctctcttgatgcccacgtgcccacagtgttcccgtgctggccgccccggggctcttgcgggaggtggctgtccgtcctgccccgctctgtatggggcgcctgcctgccatcatcggcttgcaggagctctttgtgtgttctgctgcaagtgtggcatcacatgcgtgcactgtgaatctctgtgccgtgtgtgtcttgcttttgtgctctcaagtcaagccttttgaggactggaagattgtacttctatcgcagtccactaacacagtccagtaacgcagtccactttatcagctgtttgtggctaaagctgtttgtgttctctgcaggaactcaaggtattgaggttgtggtgacgttgcttctgtgcctccttttagaacagtctttactgtgtcagcttgcaaacctgggtggggattggtggaattggttttcatgtgtggggtaggtggggatctgtgggattggttttcatgtgtggtgtaggtggagatctgtgaattggttttcatgcgtggggtaggtggggatcggttgggattggtttttatgtgtggggtaggtgggattggttttcatgtgtggggtaggtggggatctgtgggattggtttttatgtgtggggtaggtggggatatgtgaattggttttcatccgtggggtaggtggggatctgtgggattggtttttatgcgtggggtaggtggggatctgtgaattggttttcatccgtggggtaggtggggttctgtgggattggttttcatgtgtggaataggtggggatctgtggagttggttttcatgtgtggtgtaggtggagatctgtgaattggttttcatccgtcggggtaggtggggatctgtgggattggtcttctatgtgtggggtaggtggggacctgtgggattggtttttatgtgtggggtaggtggggatctgtgaattggttttcatccgtggggtaggtggggatctgtgggattggttttcatgtgtggggtaggtggggatctgtgggattggttttcatgtgtggggtaggtggggatctgtgggattggttttcatgtgtggggtaggtggggatctgtggagttggtttttatgtgtgggggtaggtggggatctgtggagttggttttcatgtgtagggtaggtggagatctgtgggattggttttcatgtgtggggtaggtggggatctgtgggagttggtttttatgtgtgggggtaggtggggatctgtggagttggttttcatgtgtagggtaggtggagatctgtgggattggttttcatgtgtggggtaggtggggatctgtgggattggttttcatgtgtgggataggtggggatctgtgggattggtttttatgagtggggtaacacagagttcaaggcgagctttcttcctgtagtgggtctgcaggtgctccaacagctttattgaggagaccatatcttcctttgaactatggtcgggtttatagtaagtcaggggtgtggaggcctcccctgggctccctgttctgtttcttccactctggggtcgtgtggtgcctgctgtggtgtgtggccggtgggcagggcttccaggcctccttgtgttcattggcctggatgtggccctggctacgctccgtccttggaattcccctgcgagttggaggcttgctttctttctttttttctttctttttttttttttttgataacagagtctcgctcttttttgcccaggctggagtggtttggcgtgatcttggctcactgcaacctgtgcttcctgagttcaagcaattctcttgcctcagcctcccaagtagctggaattataggcgcccaccaccatgctgactaatttttgtaattttagtagagacgaggtttctccatgttggccaggctggtctcgaactcctgacctcaggtgatcctcccacctcggcctcccaaagtgctgggatgacaggtgtgaaccgccgcgcccggccgagactcgcttcctgcagcttccgtgagatctgcagcgatagctgcctgcagccttggtgctgacaacctccgttttccttctccaggtctcgctaggggtctttccatttcatgactctcttcacagaagagtttcacgtgtgctgatttcccggctgtttcctgcgtaattggtgtctgctgtttatcgatggcctccttccatttcctttaggctttgtttattgttgtttttccggctccttgaaggaaaagtttcgattatggatgtttgaactttcttttctaaacaagcatctgaagttgccgttttccctctaaagcagggatcccgaggcccctggctgtggagtggcaccggtctggggcctgttaggaacccggcgcacagcgggaggctaggtggggtgtggggagccagcgttcccgcctgagccccgcccctctcagatcagcagtggcatgcggtgctcagaggcgcacacaccctactgagaactgtgcgtgagaggggtctagattctgtgctccttatgggaatctaatgcctgatgatctgaggtggaaccgtttgctcccaaaaccatccccttccccactgctgtcctgtggaaaaatcgtcttccacgaaaccagtccctggtaccacaatggttggggaccctgtgctaaagacctgcttcagcagcctctcgtcagtgttgatatattggcttttctgtgttgagtccagaataattacggatttctgtgatgctttcygccgacctcagacccatgggctatttgtgggcgtgttgcctgctcctgggttgggaagggtgcaggccccatgtaccttcctgttactgccttccaggttggttctcagggttgaatcgtactcgatgtggttttagcccacggccctgccgccagctcctgggggctggggaacatgctgaagcacagagtcaccgtgcgcgtcttttgatgcctcacaagctcgaggcctcctgtgtccgtgttagtgtgtgtcacgtgcctgctcacatcctgtcttggggacgcaggggcttagcaggtcccgtagtaaatgacaagcgtcctgggggagtctgcagaataggaggtgggggtgccggtctctctcccgcgtcttcagactcttctcctgcctgtgctgtggctgcacctgcatccctgcaatccctccagcactgggctggagaggcccgggagctcgagtgccacttgtgccacgtgactgtggatggcagtcggtcacgggggtctgatgtgtggtgactgtggatggcggtcggtcacgggggtctgatgtgtggtgactgtggatggcggtcgtrgggtctgatgtgtggtgactgtggatggcgatcggtcacaggggtctgatgtgtggtgactgtggatggyggtcgtgggrcctgatgtggtgactgtggatggcggtcgtagggtctgatgtgtggtgactgtggatggcggttgtggggtctgatgtgtggtgactgtggatggcggttgtgggggtctgatgtgtggtgactgtggatggcggtcgtggggtctgatgtggtgactgtggatggcggtcgtggggtctgatgtggtgactgtggatggcggtcgtggggtctgatgtgtggtgactgtggatggcggtcgtggggtctgatgtgtggtgactgtggatggcggtcgtggggtctgatgtggtgactgtggatggcggtcgtggggtctgatgtggtgactgtggttggcggtcgtggggtctgatgtggtgactgtggatggcggtcgtggggtctgatgtggtgactgtggatggcggtcgtggggtctgatgtggtgactgtggatggcggtcgtggggtctgatgtgtggtgactgtggatggcggtcgtggggtctgatgtgtggtgactgtggatggcggtcgtggggtctgatgtgtggtgactgtggatggcggtcgtggggtctgakgtggtgactgtggatggcggtcgtggggtctgatgtggtgactgtggatggtgatcggtcacaggggtctgatgtgtggtagctgcaggtggagtcccaggtgtgtctgtagctactttgcgtcctcggccccccggcccccgtttcccaaacagaagcttcccaggcgctctctgggcttcatcccgccatcrggcttggccgcaggtccacacgtcctgatcggaagaaacaagtgcccagctctggccggggcaggccacatttgtggctcatgccctctcctctgccggcaggtctctaccttgacagacctccagccgtacatgcgacagttcgtggctcacctgcaggagaccagcccgctgagggatgccgtcgtcatcgagcaggtctgggcactgccctgcagggttgggcacggactcccagcagtgggtcctcccctgggcaatcactgggctcatgaccggacagactgttggccctggggggcagtggggggaatgagctgtgatgggggcatgatgagctgtgtgccttggcgaaatctgagctgggccatgccaggctgcgacagctgctgcattcaggcacctgctcacgtttgactgcgcggcctctctccagttccgcagtgcctttgttcatgatttgctaaatgtcttctctgccagttttgatcttgaggccaaaggaaaggtgtccccctcctttaggagggcaggccatgtttgagccgtgtcctgcccagctggcccctcagtgctgggtctgaggccaaaggaaacgtgtcccccttcttaggaggacgggccgtgtttgagccacgccccgctgagcgggcctctcagtgctgggtctgtccacgtggccctgtggccctttgcagatgtggtctgtccacgtggccctgtggctctttgcagatgcctgttagcacttgctcggctctaggggacagtcgtgtccaccgcatgaggctcagagacctctgggcgaatttccttggctcccagggtgggggtggrggtggcctgggctgctgggacccagaccctgtgcccggcagctgggcagcaactcctggatcacatatgccatccgggccacggtgggctgtgtgggtgtgagcccagctggacccacaggtggcccagaggagacgttctgtgtcacacactctgcctaagcccatgtgtgtctgcagagactcggcccggccagcccacgatggccctgcattccagcccagccccgcacttcatcacaaacactgaccccaaaagggacggagggtcttggccacgtggtcctgcctgtctcagcacccaccggctcactcccatgtgtctcccgtctgctttcgcagagctcctccctgaatgaggccagcagtggcctcttcgacgtcttcctacgcttcatgtgccaccacgccgtgcgcatcaggggcaagtgagtcaggtggccaggtgccattgccctgcgggtggctgggcgggctggcagggcttctgctcacctctctcctgccccttccccactgcccttctgcccggggccaccagagtctccttttctggcccccgccccctccggctcctgggctgcaggctcccgaggccccggaaacatggctcggcttgcggcagccggagcggagcaggtgccacacgaggcctggaaatggcaagcggggtgtggasttgctcctgcgtggaggacgaggggcggggggtgtgtctgggtcaggtgtgcgccgagcgtttgagcctgcagcttgtcagctccaagttactactgacgctggacacccggctctcacacgcttgtatctctctctcccgatacaaaaggattttatccgattctcattcctgtccctgtcgtgtgacccccgcgagggcgcgggctcttctctctgtgactagatttcccatctggaaagtgcggggttgaccgtgtagtttgctcctctcggggggcctgtggtggccatggggcaggcggcctgggagagctgccgtcacacagccactgggtgagccacactcacggtggtagagccacagtgcctggtgccacatcacgtcctctggattttaagtaaaaccacacacctcccggcaggcatctgcctgcgaccctgtgtgtgcctggggagagtggtagcacggaggaaattcgtgcacactcaaggtcatcagcaaggtcatccgcagtcaggtggaacgtggaggcctctctctgggatcgtctccagcggataaaggactgtgcacagcttcggaagcttttatttaaaaatataactattaattattgcattataagtaatcactaatggtatcagcaattataatatttattaaagtataattagaaatattaagtagtacacacgttctggaaaaacacaaattgcacatggcagcagagtgaattttggccgagggacacgtgtgcacatgtgtgtaagcggcccccaggcccacagaattcgctgacaaagtcacctccccagagaagccaccacgggcctccttcgtggtcgtgaattttattaagatggatcaagtcacgtaccgtccacgtgtggcagggctttggggaatgtgaggtgatgactgcgtcctcatgccctgacagacaggaggtgactgtgtctgtcctgtccctaggacacggacaggcccgaagctctagtccccatcgtggtccagtttggcctctgaataaaaacgtcttcaaaacctgttgccccaaaaactaagaacagagagagtttcccatcccatgtgctcacaggggcgtatctgcttgcgttgactcgctgggctggccggactcctagagttggtgcgtgtgcttctgtgcaaaaagtgcagtcctcttgcccatcactgtgatatctgcaccagcaaggaaagcctcttttcttttctttctttttttttttttgagacggaacgtcactgttgtctgcctgggcttgagtgcagtggcgcgatctcaactcactgcaacctccgcctcccgggttccagcatttctcctgcctcagcctcccgagcagctgagattacaggcacccaccccctgcgcctggctaatttttgtatttttagtagagaggggtttttgccatgttggccaggctggtctcgaactcctgacctcaggtgatccacccacctcggcctcccaaagtgctgggattacaggtgtgagccatcacgcccagccggaaagcctctttttaaggtgaccacctatagcgcttcccgaaaataacaggtcttgtttttgcagtaggctgcaagcgtctcttagcaacaggagtggcgtcctgtgggctctggggatggctgagggtcgcgtggcagccatgccttctgtgtgcacctttaggttccacggggctattctgctctcactgtttgtctgaaaacgcacccttggcatccttgtttggagagtttctgcttctcgttggtcatgctgaaactaggggcaaggttgtatccgttggcgcgcagcggctacatgtagggtcatgagtctttcaccgtggacaaattccttgaaaaaaaaaaaaggagtccggttaagcattcattccgggtcaagtgtctggttctgtgaataaactctaagatttaagaaaccttaatgaaagaaaaccttgatgattcagagcaaggatgtggtcacacctgtggctggatctgtttcagccgccccagtgcatggtgagagtggggagcagggattgtttgttcagaggtctcatctggtatgtttctgaggtgtttgccggctgaatggtagacgtgtcgttkgtgtgtatgaggttctgtgtctgtgtgtggctcggtttgagtgtacgcatgtccagcacatgccctgcccgtctctcacctgtgtcttcccgccccaggtcctacgtccagtgccaggggatcccgcagggctccatcctctccacgctgctctgcagcctgtgctacggcgacatggagaacaagctgtttgcggggattcggcgggacgggtgaggcctcctcttccccaggggggcttgggtgggggttgatttgcttttgatrcattcagtgttaatattcctggtgctctggagaccatgactgctctgtcttgaggaaccagacaaggttgcagccccttcttggtatgaagccgcacgggaggggttgcacagccygaggactgcgggctccacgcaggctctgtccagcggccatgtccagaggcctcagggctcagcaggcgggagggccgctgccctgcatgatgagcatgtgaattcaacaccgaggaagcacaccagcttctgtcacgtcacccaggttccgttagggtccttggggagatggggctggtgcagcctgaggccccacatctcccagcaggccctcgacaggtggcctggactgggcgcctcttcagcccattgcccatcccacttgcatggggtctacacccaaggacgcacacacctaaatatcgtgccaacctaatgtggttcaactcagctggcttttattgacagcagttacttttttttttttaatactttaagttctagggtacatgtgcacgacgtgcaggttagttacatatgtatacatgtgccatgttggtgtgctgcacccattaactcatcatttacattaggtatatctcctaatgctatccctccccactccccccatcccatgacaggccctggtgtgtgatgttccccaccctgtgtccaagtgttctcattgttcagttcccacctgtgagtgagaacatgtggtgtttggttttctttccttgcaatagtttgctcagagtgatggtttccagcttcgtccatgtccctacaaaggacatgaactcatccttttttatgactgcatagtattccgtggtgtatatgtgccacattttcttaatccagtctatcatcgatggacatttgggttggttgcaagtctttgctactgtgaatagtgccgcaataaacatacgtgtgcatgtgtctttatagcagcatgatttataatcctttgggtatatacccagtaatgggatggctgggtcaaatggtatttctagttctagatccttgaggaatcaccacactgtcttccacaatggttgaactagtttacactcccacyaacagtgtaaaagtgttctggtgctggagaggatgtggacagcagttatttttttatgaaaatagtatcactgaacaagcagacagttagtgaaggatgcgtcaggaagcctgcaggccacacagccatttctctcgaagwctccgggtttttcctgtgcatcttttgaaactctagctccaattatagcatgtacagtggatcaaggttcttcttcattaaggttcaagttctagattgaaataagtttatgtaacagaaacaaaaatttcttgtacacacaacttgctctggsatttggaggaaagtgtcctcgagctggcggcacactggtcagccctctgggacaggatacctctggcccatggtcatggggcgctgggcttgggcctgagggtcacacagtgcaccatgcccagcttcctgtggataggatctgggtctcggatcatgctgaggaccacagctgccatgctggtaaagggcaccacgtggctcagagggggcgaggttcccagccccagctttcttaccgtcttcagttatttttccctaagagtctgagaagtggggccgcgcctgatggccttcgttcgtcttcagctggcacagaattgcacaagctgatggtaaacactgagtacttataatgaatgaggaattgctgtagcagttaactgtagagagctcgtctgttggaaagaaatttaagtttttcatttaaccgctttggagaatgttactttatttatggctgtgtaaattgtttgacattcagtccctcgtagacagatactacgtaaaaagtgtaaagttaaccttgctgtgtattttcccttattttaggctgctcctgcgtttggtggatgatttcttgttggtgacacctcacctcacccacgcgaaaaccttcctcaggtgaggcccgtgccgtgtgtctgtggggacctccacagcctgtgggctttgcagttgagccccccgtgtcctgcccctggcaccgcagcgttgtctctgccaagtcctctctctctgccggtgctggatccgcaagagcagaggcgcttggccgtgcacccaggcctgggggcgcaggggcaccttcgggagggagtgggtaccgtgcaggccctggtcctgcagagacgcacccaggttacacacgtggtgagtgcaggcggtgaccyggctcctgctgctctttggaaagtcaagagtggcggctcctggggccccagtgagacccccaggagctgtgcacagggcctgcrgggccgaggcggcagcctcctccccagggtgcacctgagcctgcggagagcaggagctgctgagtgagctggcccacagcgttcgctgcggtcacgttcctgcgtggggttgtttgggatcggtgggagaatttggatttgctgagtgctgctgtcttgaaccacggagatggctaggagtgggtttcagagttgatttttgtgaatcaaactaaaatcaggcacaggggacctggcctcagcacaggggattgtccaatgtggtccccctcaagggcgccccacagagcyggtgggcttgttttaaagtgcgatttgacgagggacgagaaaccttgaaagctgtaaagggaaccctcagaaaatgtggccgccaggggtggtttcaggtgctttgctgggctgtgtttgtgaaaacccatttggacccgccctccaagtccaccctccaggtccaccctccagggccgccctgggctgggggtatgcctggcgttccttgwgccgcagcccggagcacagcaggctgtgcacatttaaatccactaagattcactcggggggagcccaggtcccaagcaactgagggctcaggagtcctgaggctgctgaggggacagagcagacggggaacgctgcttctgtgtggcaagttcctgagggtgctggccagggaggtggctcagagtgtatgttggggtcccaccgggggcagaactctgtctctgatgagtcggcagccatgtaacaggaaggggtggccacagggagctgggaatgcaccaggggagctgcgcagctggccgaggtcccagggccaggccacaggaagggcagggggacgcccggggcyacagcagaggccgcaggaagggaaggggatgcccaggccagagcagaggctaccgggcacaggggggctccctgagctgggtgagcgaggctcatgactcggcgagggaacctccttgacgtgaagctgacgactggtgttgcccagctcacagcccagccaggtcccrcgcctgagcaggaactcagaaccctcccctttgtctaaagcacagcagatgccttcagggcatctaggagaaaacaggcaaagtcgttgagaaacgtcttaaaagaaggtgggatggtggcaatttcttgtccagattttagtctgccccggaccacagatgagtctataacgggattgtggtgttgccatggggacacatgagatggaccatcacagaggccactggggctgcacctcccatctgagtcctggctgtcccgggtccaggccaggttcttgcatgctcacctacctgtcctgcccgggagacagggaaagcaccccgaagtctggagcagggctgggtccaggctcctcagagctcctgccaggcccagcaccctgctccaaatcaccacttctctggggttttccaaagcatttaacaagggtgtcaggttacctcctgggtgacggccccgcatcctggggctgacattgcccctctgccttaggaccctggtccgaggtgtccctgagtatggctgcgtggtgaacttgcggaagacagtggtgaacttccctgtagaagacgaggccctgggtggcacggcttttgttcagatgccggcccayggcctattcccctggtgcggcctgctgctggatacccggaccctggaggtgcagagcgactactccaggtgagcgcacctggccggaagtggagcctgtgcccggctggggcaggtgctgctgcagggccgttgcgtccacctctgcttccgtgtggggcaggcgactgccaatcccaaagggtcagaggccacagggtgcccctcgtcccatctggggctgagcagaaatgcatctttctgtgggagtgagggtgctcacaacgggagcagttttctgtgctattttggtaaaaggaaatggtgcaccagacctgggtgcactgaggtgtcttcagaaagcagtctggatccgaacccaagacgcccgggccctgctgggcgtgagtctctccaaacccgaaacacaggggccctgctgggcatgagtccctcygaacccgagaccctggggccctgctgggcgtgagtctctccgaacccagagacttcagggcccttttgggcgtgagtctctccrctgtgagccccacactccaaggctcatccacagtctacaggatgccatgagttcatgatcacgtgtgacccatcaggggacagggccatggtgtggggggggtctctacaaaattctggggtcttgtttccccagagcccgagagctcaaggccccgtctcaggctcagacacaaatgaattgaagatggacacagatgcagaaatctgtgctgtttcttttatgaataaaaagtatcaacattccaggcagggcaaggtggctcacacctataatcccagcactttgggaggccgaggtgggtggatcacttgaggccaggagtttgaggccaacctaaccaacatagtgaaattccatttctacttaaaaaatacaaaaattagcctggcctggtggcacacgcctgtagtccccgctatgcgggaggctgaggcaggagaatcatttgaacccaggaggcagaggttgcagtgagccgagatcacaccactgcactccagcctgggcaacagagtgagacttcatcttaaaaaaaaaaaaaaaagtatcagcattccaaaaccatagtggacaggtgtttttttattctgtccttcgataatatttactggtgctgtgctagaggccggaactgggggtgccttcctctgaaaggcacaccttcatgggaagagaaataagtggtgratggttgttaaaccagaggtttaaactggggtcctgtcgttctgagttaacagtccagatctggactttgcctctttccagaatgctccctggggtttgcttcatgggggagcagcaggtgtggacaccctcgtgatgggggagcagcaggtgcagacgccctcatgatgggggagtggcaggtgcagacacccttgtgcatggtgcccagcatgtccctgttgcagctccctccccacaaggatgccggtctcctgtgctccccacagtccctgcttccctctcacagccttacctggtcctggcctccactggctttgtctgcatgatttccacatttcctgggctcccagcacctcttcgcctctcccaggcacctctgcagtgctggccataccagtcagctgtgaactgtccactgcttattttgctccccatgaaatgtattttttaggacaggcacccctggttccagcctctggcacagcatcagtgaatgttattgaaggacaaaggacagacaaacaaatcaggaaaatgggttctctctaaacacattgcaaagccacagaggctagtgcaggatgggtgggcatcaggtcatcagatgtgggtccaatgccagaatattctgtgctcccaaaggccacttggtcagagtgtgtgcttgcagaggtggctctaaaagctcagcagtggaggcagtggttcgccatactcagggtgaactcacatcctctgtgtctgaagtatacagcagaggcttgaagggcatctgggagaagaaaacaggcaaaatgattaagaaaagtgaaaaaggaaaagtggtaagatgggaattttcttgtccagattttagtctcccaaaccacagctcagatggtagaatgtggtcagaactgatggacagaacaatagaacaaaacggaagccctatctctcagaaacgtgtgttaatgtggtatgtggcacagctgatggaaaagagagtgtgtgtgtaatttttttttctgagaaaactgactggaagcaaataagttgtgtctttacagcatataccagagcagattctaggtagaagaggagacacatgcaaacaacaccagcaacagaaataaaacaaaagactcaaagggaagggaggtgaacgttccctggtttggtgttggggaaggacacacagggaggcggatgaaaccagtgaggcaacgggcattgctttcactgcagagaaactcagcttgcctgagccacagtgaaaatggccattccctggagcgtttgtgcacgtgatttatttaaggcgccctgtgaggtcctgcacattcatcctctcactttgttctcctaaccacctgagaggtagaggaggaaaggctccaggggagcagccgcccttggtcacccagctggcaaagggcatgcatgattgcagcctggcctcctgctccggggcccttgctctgcccgaggaccccacacaagtcagacccataggctcagggtgagccrgagcccaaggtcgtgttggggatggctgtgaaagaagaaatggacgtctgatgcacacttgggaaggtcctaccagcagcgtcaaagaaatgcatgtgaaactgacagcgagacccatccctcaaagaaacgcacgtgaaactgatggcgagacctgtccccatccctcatgctggctccttttctgggcttgccaagagccagcatcaggttgaggcaagctggaaagacttttctggaaagcagcttgtttgcatggaagtcctcacaatgtcctgtgtcttcccagtaattccacttctgaagtgaccagacattatcacgggtcttatttaccatttccagtgttccaggcagggggacttgccacagcaagtcacgaacctgcccaaatacagggctaaggagatattatgcatcacaaaacttgctctgccattaaacatttttcaaagaatttttgaagaatgtttaatggcacaaaacgtttatttcaatgtagcagtgttcaaagctggatgtaaaagaacacaccccaggagcctgccgtgratgtcatgtgtgttcatctttggacatggacatacatgggcagtgagtggtggtgaggccctggaggacatcggtgggatgcctccatcctgcccctctggagacaccatgtgtgccacgtgcactcactggagccctgtttagctggtgccacctggctcttccatccctgagattcaaacacagtgagattccccacgcccaactcagtgttctcccacaaaaaacctgagtcacacctgtgttcactcgagggacgccygggagccagggctccacagtttattatgtgtttttggctgagttatgtgcagatctcatcagggcagatgatgagtgcacaaacacggccgtgcgaggtttggatacactcaacatcactagccaggtcctggtggagtttggtcatgcagagtctggatggcatgtagcatttggagtccatggagtgagcacccagccccctcgggctgcagcgcatgccccaggcaggacaaggaagcgggaggaaggcaggaggctctttggagcaagctttgcaggagggggctgggtgtggggcaggcacctgtgtctgacattcccccctgtgtctcagmtatgcccggacctccatcagagccagtctcaccttcaaccgcggcttcaaggctgggaggaacatgcgtcgcaaactctttggggtcttgcggctgaagtgtcacagcctgtttctggatttgcaggtgagcaggctgatggtcagcacagagttcagagttcaggaggtgtgtgcgcaagtatgtgtgtgtgtgtgtgcrcgcgtgcctgcaaggctgatggtgactggctgcacgtaagagtgcacatgtacgcatatacacgtgagcacatacatgtgtgcatgtgtgtacatgaaggcatggcagtgtgtgcacaggtgtgcaagggcacaagtgtgtgcacatgcgaatgcacacctgacatgcatgtgtgttcgtgcacagtcgtgtgggcattcacgtgaggtgcatgcgtgtgggtgtgcagtgtgagtagcatgtgtgcacataacatgtattgaggggtcctcgtgttcaccccgctaggtcctcagcaccagtgccactccttacaggrtgagacggggtcccaggccttggtgggctgaggctctgaagctgcagccctgagggcattgtcccatctgggcatccgcgtccactccctctcctgtgggcttctgtgtccactccccctctcctgtgggcgtccacacccyctctcctgtgggcatccgcatccactccctctcctgtgggcatctgtgtccactccctctctcctgtggttgtccgtgtccactcccccctcctgtgggcgtccgcgtccactccctctcctgtgggcatctgcatccactccctctctcctgtgggcgtctgtgtccactccccctctcctgtgggcatccgcgtccactccctcttctgtgggcatctgcatccactcgtctctcctgtgggcgtccgtgtccactccccctctcctgtgggcatctgcgtccactccctctctcctgtgggcatccgtgtccactccccctctcctgtgggcatccatgtccactccctctcctgtgggcatctgcgtccactccctctcctgtgggcatctgcgtctgctccctctctcctgtgggcgtccgtgtccactcccccctcctgtgggcgtccgcgtccactccctctcctgtgggcatctgcgtccgctccctctctcctgtgggcgtccgtgtccactcccccctcctgtgggcgtccgcatccactccctctcctgtgggcatctgcgtctgctccctctctcctgtgggcgtccatgtccactccctctcctgtgggcatctgcgtccactccctctcctgtgggcatccgcgtccactccctctcctgtgggcatctgcatccactccatctcctgtgggcatccacgtccactccctctcctgtgtgcatctgcatccactccactccccctctcctgtgggcatccgcgtccactccctctcctgtgggcatctgcatccactccctctctcctgtgggcgtccgtgtccactccccctctcctgtgggcatttacatccactccattccctctctcctgtgggcgtctgtgtccactccccctctcctgtgggcatttacatccactccactccctctctcctgtgggcatccgcgtccactccccctctctgtgggcatctgcgtccacctcccctctctgtgggcatttgcgtccactccctctcctggttccttcctgtcttggccgagcctcgggggcaggcagatgacacagagtcttgactcgcccagggtggttcgcagctgccgggtgagggccaggccggatttcactgggaagagggatagtttcttgtcaaaatgttcctctttcttgttccatctgaatggatgataaagcaaaaagtaaaaacttaaaatcccagagaggtttctaccgtttctcactctttcttggcgactctaggtgaacagcctccagacggtgtgcaccaacatctacaagatcctcctgctgcaggcgtacaggtgagccgccaccaaggggtgcaggcccagcctccagggaccctccgcgctctgctcacctctgacccggggcttcaccttggaactcctgggttttaggggcaaggaatgtcttacgttttcagtggtgctgctgcctgtgcacagttctgttcgcgtggctctgtgcaaagcacctgttctccatctctgggtagtggtaggagccggtgtggccccaggtgtccccactgtgcctgtgcactggccgtgggacgtcatggaggccatcccagggcagcaggggcatggggtaaagagatgtttatggggagtcttagcagaggaggctgggaaggtgtctgaacagtagatgggagatcagatgcccggaggatttggggtctcagcaaagagggccgaggtgggtgcaggtgagggtcgctggccccacccccgggaaggtgcagcagagctgtggctccccacacagcccggccagcacctgtgctctgggcatggctgtgctcctggaacgttccctgtcctggctggtcagggggtgcccctgccaagaatcgacaactttatcacagagggaagggccaatctgtggaggccacagggccagcttctgcctggagtcagggcaggtggtggcacaagcctcggggctgtaccaaagggcagtcgggcaccacaggcccgggcctccacctcaacaggcctcccgagccactgggagctgaatgccaggaggccgaagccctcgccccatgagggctgagaaggagtgtgagcatttgtgttacccagggccgaggctgcgcgaattaccgtgcacacttgatgtgaaatgaggtcgtcgtctatcgtggaaacccagcaagggctcacgggagagttttccattacaaggtcgtaccatgaaaatggtttttaacccgagtgcttgcgccttcatgctctggcagggagggcagagccacagctgcatgttaccgcctttgcaccagctccagaggcttgggaccaggctgtctcagttccagggtgcgtccggctcagaccgccctcctctctgccttctctctctgcctcaaatcttccctygtttgcatctccctgacgcgtgcctgggccctcgtgcaagctgcttgactcctttccggaaacccttggggtgtgctggatacaggtgccactgaggactggaggtgtctgacactgtggttgaccccagggtccagctggcgtgcttggggcctccttgggccatgatgaggtcagaggagttttcccaggtgaaaactcctgggaaactcccagggccatgtgacctgccacctgctcctcccatattcagctcagtcttgtcctcatttccccaccagggtctctagctccgaggagctcccgtagagggcctgggctcagggcagggcggctgagtttccccacccatgtggggacccttgggtagtcgcttgattgggtagccctgaggaggccgagatgcgatgggccacgggccgtttccaaacacagagtcaggcacgtggaaggcccaggaatccccttccctcgaggcaggagtgggagaacggagagctgggccccgatttcacggcagccaggctgcagtgggcgaggctgtggtggtccacgtggcgctgggggcggggtctgattcaaatccgctggggctcggccttcctggcccgtgctggccgcgcctccacacgggcttggggtggacgccccgacctctagcaggtggctatttctccctttggaagagagcccctcacccatgctaggtgtttccctcctgggtcaggagcgtggccgtgtggcaaccccgggaccttaggcttatttatttgtttaaaaacattctgggcctggcttccgttgttgctaaatggggaaaagacatcccacctcagcagagttactgagaggctgaaaccggggtgctggcttgactggtgtgatctcaggtcattccagaagtggctcaggaagtcagtgagaccaggtacatggggggctcaggcagtgggtgagatgaggtacacggggggctcaggcagtgggtgaggccaggtacatggggggctcaggcactgggtgagatgaggtacayggggggctcaggcagagggtcagaccaggtacacgggggctctgatcacacgcacatatgagcacatgtgcacatgtgctgtttcatggtagccaggtctgtgcacacctgccccaaagtcccaggaagctgagaggccaaagatggaggctgacagggctggcgcggtggctcacacctgtagtcccagcactttgggaggccgaggcgagaggatcccttgagcccaggagtttaagaccagcctgagcaacatagtagaaccccatctctatgaaaaataaaaacaaaaattagctgarcatggtggtgtgcgcctgtagttccaatacttgggaggctgaagtgggaggatcacttgagcccaggaggtggaagctgcagtgagctgagattgcaccactgtactgcagcctgggtgacagagtgagagcccatctcaacaacaacaaagaagactgacaaatgcagtttcttggaaagaaacatttagtaggaacttaacctacacacagaagccaagtcggtgtctcggtgtcagtgagatgagatgatgggtcctcacaccatcaccccagacccagggtttatgcaccacaggggcgggtggctcagaagggatgcgcaggacgttgatatacgatgacatcaaggttgtctgacgaagggcaggattcatgataagtacctgctggtacacaaggaacaatggataaactggaaaccttagaggccttcccggaacaggggctaatcagaagccagcatggggggctggcatccaggatggagctgcttcagcctccacatgcgtgttcatacagatggtgcacagaaacgcagtgtacctgtgcacacacagacacgcagctactcgcacacacaagcacacacacagacatgcatgcatgcatccgtgtgtgtgcacctgtgcccatgaggaaacccatgcatgtgcattcrtgcacgcacacaggcaccggtgggcccatgcccacacccacgagcaccgtctgattaggaggcctttcctctgacgctgtccgccatcctctcaggtttcaygcatgtgtgctgcagctcccatttcatcagcaagtttggaagaaccccacatttttcctgcgcgtcatctctgacacggcctccctctgctactccatcctgaaagccaagaacgcaggtatgtgcaggtgcctggcctcagtggcagcagtgcctgcctgctggtgttagtgtgtcaggagactgagtgaatctgggcttaggaagttcttaccccttttcgcatcaggaagtggtttaacccaaccactgtcaggctcgtctgcccgccctctcgtggggtgagcagagcacctgatggaagggacaggagctgtctgggagctgccatccttcccaccttgctctgcctggggaagcgctggggggcctggtctctcctgtttgccccatggtgggatttggggggcctggcctctcctgtttgccctgtggtgggattgggctgtctcccgtccatggcacttagggcccttgtgcaaacccaggccaagggcttaggaggaggccaggcccaggctaccccacccctctcaggagcagaggccgcgtatcaccacgacagagccccgcgccgtcctctgcttcccagtcaccgtcctctgcccctggacactttgtccagcatcagggaggtttctgatccgtctgaaattcaagccatgtcgaacctgcggtcctgagcttaacagcttctactttctgttctttctgtgttgtggaaatttcacctggagaagccgaagaaaacatttctgtcgtgactcctgcggtgcttgggtcgggacagccagagatggagccaccccgcagaccgtcgggtgtgggcagctttccggtgtctcctgggaggggagctgggctgggcctgtgactcctcagcctctgttttcccccagggatgtcgctgggggccaagggcgccgccggccctctgccctccgaggccgtgcagtggctgtgccaccaagcattcctgctcaagctgactcgacaccgtgtcacctacgtgccactcctggggtcactcaggacaggcaagtgtgggtggaggccagtgcgggccccacctgcccaggggtcatccttgaacgccctgtgtggggcgagcagcctcagatgctgctgaagtgcagacgcccccgggcctgaccctgggggcctggagccacgctggcagccctatgtgattaaacgctggtgtccccaggccacggagcctggcagggtccmcaacttcttgaacccctgcttcccatctcaggggcgatggctccccacgcttgggagccttctgacccctgacctgtgtcctctcacagcctcttccctggctgctgccctgagctcctggggtcctgagcaagttctctccccgccccgccgctccagcgtcactgggctgcctgtctgctcgccccggtggaggggtgtctgtcccttcactgaggttcccaccagccagggccacgaggtgcaggccctgcctgcccggccacccacaygtcctaggagggttggaggatgccacctctggcctcttctggaacggagtctgattttggccccgcagcccagacgcagctgagtcggaagctcccggggacgacgctgactgccctggaggccgcagccaacccggcactgccctcagacttcaagaccatcctggactgatggccacccgcccacagccaggccgagagcagacaccagcagccctgtcacgccgggctctacgtcccagggagggaggggcggcccacacccaggccygcaccgctgggagtctgaggcctgagtgagtgtttggccgaggcctgcatgtccggctgaaggctgagtgtccggctgaggcctgagcgagtgtccagccaagggctgagtgtccagcacacctgccgtcttcacttccccacaggctggcgctcggctccaccccagggccagcttttcctcaccaggagcccggcttccactccccacataggaatagtccatccccagattcgccattgttcacccctcgccctgccctcctttgccttccacccccaccatccaggtggagaccctgagaaggaccctgggagctctgggaatttggagtgaccaaaggtgtgccctgtacacaggcgaggaccctgcacctggatgggggtccctgtgggtcaaattggggggaggtgctgtgggagtaaaatactgaatatatgagtttttcagttttgaaaaaaatctcatgtttgaatcctaatgtgcactgcatagacaccactgtatgcaattacagaagcctgtgagtgaacggggtggtggtcagtgcgggcccatggcctggctgtgcatttacggaagtctatgagtgaatggggttgtggtcagtgcgggcccatggcctggctgggcctgggaggtttctgatgctgtgaggcaggaggggaaggagggtaggggatagacagtgggagcccccaccctggaagacataacagtaagtccaggcccgaagggcagcagggatgctgggggcccagcttgggcggcggggatgatggagggcctggccagggtggcagggatgatgggggccccagctggggtggcaggggtgatggggggggctggtctgggtggcggggaagatggggaagcctggctgggccccctcctcccctgcctcccacctgcagccgtggatccggatgtgcttccctggtgcacatcctctgggccatcagctttcatggaggtggggggcaggggcatgacaccatcctgtataaaatccaggattcctcctcctgaacgccccaactcaggttgaaagtcacattccgcctctggccattctcttaagagtagaccaggattctgatctctgaagggtgggtagggtggggcagtggagggtgtggacacaggaggcttcagggtggggctggtgatgctctctcatcctcttatcatctcccagtctcatctctcatcctcttatcatctcccagtctcatctgtcttcctcttatctcccagtctcatctgtcatcctcttaccatctcccagtctcatctcttatcctcttatctcctagtctcatccagacttacctcccagggcgggtgccaggctcgcagtggagctggacatacgtccttcctcaggcagaaggaactggaaggattgcagagaacaggaggggcggctcagagggacgcagtcttggggtgaagaaacagcccctcctcagaagttggcttgggccacacgaaaccgagggccctgcgtgagtggctccagagccttccagcaggtccctggtggggccttatggtatggccgggtcctactgagtgcaccttggacagggcttctggtttgagtgcagcccggacgtgcctggtgtcggggtgggggcttatggccactggatatggcgtcatttattgctgctgcttcagagaatgtctgagtgaccgagcctaatgtgtttatggtgggcccaagtccacagactgtgtcgtaaatgcactctggtgcctggagcccccgtataggagctgtgaggaaggaggggctcttggcagccggcctgggggcgcctttgccctgcaaactggaagggagcggccccgggcgccgtgggcggacgacctcagtgggaggttggacagaacagggcggggactcccaggagcagaggccgctgctcaggcacacctgggtttgaatcacagaccaacaggtcaggccattgttcagctatccatcttctacaaagctccagattcctgtttctccgggtgttttttgttgaaattttactcaggattacttatattttttgctaaagtattagacccttaaaaaaggtatttgctttgatatggcttaactcactaagcacctactttatttgtctgtttttatttattattattattattattagagatggtgtctactctgtcacccaggttgttagtgcagtggcacagtcatggctcgctgtagccgcaaacccccaggctcaagtgatcctccggcctcagcttcccagagtgctgggattacaggtgtgagccactgcccttgcctggcacttttaaaaaccactatgtaaggtcaggtccagtggcttccacacctgtcatcccagtagtttgggaagccgaggcagaaggattgtctgaggccaggagtttgagaccagcatgggtaacatagggagaccccatctctacaaaaaatgcaaaaagttatccgggcgtggggtccagcatctgtagtcccagctgctcgggaggctgagtgggaggatcgcttgagcccgggaggtcatggctgcagtgagctgtgattgtaccatcgcactccagcctgggcaacagagtgagaccctgtctcaaaaaaaaaaaaaaaaaagaaggagaaggagaagagaagaagaaggaagaaggaaagagaagaagaaggaagaaggaagaaagaaggagaaggaggcctgctaggtgctaggtagactgtcaaatctcagagcaaaatgaaaataacaaagttttaaagggaaagaaaaaccccagctctttggacttccttaggcctgaacttcatctcaagcagcttccttccacagacaagcgtgtatggagcgagtgagttcaaagcagaaagggaggagaagcaggcaagggtggaggctgtgggtgacaccagccaggacccctgaaagggagtggttgttttcctgcctcagccccacgctcctgccggtcctgcacctgctgtaaccgtcgatgttggtgccaggtgcccacctgggaaggatgctgtgcagggggcttgccaaactttggtgggtttcagaagccccaggcacttgtggcaggcacaattacagcccctccccaaagatgcccacgtccttctcctggaacctgtgaatgtgtcacccgcaaggcagaggctggtggaggctgcaggtggaatcacggctgccagtcagccgatcttaaggtcatcctggattatctggtgggcctgatatggccacaagggtccctagaagtgagagagggaggcaggggagagtcagagaggggacgtgagaaggaccactggccactgctggctttgagatggaggagggggtccccagccaaggaatgggggcagccgctccatgctggaaaagcaagcaatcctccccggtcctgagggcacacggccctgcccacgcctcgatttcaggccagtgggacctgtttcagctttccggcctccagagctgtaagatgatgcgtttgtgttcagccactaagctgcagtgattcgtcacagcagcaaatggaatagcagtacagggaaatgaatacagggacagttctcagagtgactctcagcccacccctggggatcctgtgggacagctcaggtggagttgctgccgagagggagaaaggaacagagacagtggggctgccagcctccctgcgtgctggtcacctggggtcatgatgaaatgtgtgtgctggggcagcagggctcctgtgcccatccagctccaatggccgaggccgctggcggagtcctcacactgacgggcaagggatggagcctcttcaccctggatccagctttgaccagggcccccggcgagtgcaggtcacccaggtttgtggagcctggtgttgggcactccgctgtggcctgcaggagggtcggacaggtctccaaggtgccatctggatgcacaggttccatggtcccatttctgcggccccagagagcgagcatcacgacaggcctgggcctcacctcagcctcatgcaggcatgaaagaaccgagtcttgccggagggggcctggctggctttctcctctgacacagcacgaagccccgggctcgccacctggagtggtawgtccccagcccccagtgtggacgggagactcatgctccctggccgtggcagcggggtcctctctgtcaggtccaggcccacccttgctggaaggggctgcttcccttggagctgggtgggtgagtcctggggcagctccagtgctgactgcgccctccatgacctcccgcctcacttctccttctgcacttatgtccttcacgcattctcccctggttcttggtgacctcagactctcccctgaggatgagccccatcaggcttttgaaaactgggccctgaacctcgttttcccatcaagtgctccctgactcctctgtgcctggcaaagcagccttggggtcaccctctgccaggaacccgctcacgggacagcctgtcctcatgtgaccaccatggtcatgggagctgtgtccatctctggggccggctggcctcatttgcagccggctttatttccagttcaacacggtggcccctggaaggggagagcccctgtggagctacagatcctctattccagccacttctggtcaggtgataggagcattttgttcctgtcccgacactggccagtctgagacacccgcccctggaatgtttttcccaagggtgagggacaagttgaaggtgttgagcatggggcgtggccacgcagggtcagtccctccagttctgctctcgccgcctggcccttgtctccccctccctcgatggtgctcgggtacctccacagcccatgaggcctcagcccctgtccctgaacaaccttggcaatgtgatgggacagaccacctctgcctccctttgtggcgtccgtctgtccacctgtcatcacctattgggccacctctgtccctcctcctttctacccacttttatccatggctgcatcaggcacatgggtggtgtggcattttctggagggctgagcgtccactgtgtcctctgtcccagccccccaccccttcccttttcgtcagctggacaaggactctgaagcttcagggtggggctatagatgctgcttctagctccccccatacagagtgttgggcagagccccagccctcgttaggatgtgctacacccaaaagtctgatccagggtgggagcagggggcacctgctcacatcctagttattttctaagtatggtattgacgcaaaatgtaacctcggataagtctgagtggcttgtcagcacccctgctgccaacagctgcctgtttttctcgtctgggtcaacgacaggacttgcaggccctatggtgagttggggaaggtgtcccaagagctgcctttggggacacacgcccttggcagtgtttgcttctgagcaggttactctaccttttgcgtctgtgagttggtgacaccatggaacgcagctgttgctttggcttctggaggctttcctttggggaaccacccctccctccactccaccctccaggctctgtgagtgggtgacaccatggaacgcagctgttgctttggctgctggaggctttcctttggggaagcacccctccctccaccccaccctccaggctctgcaatcacttttccctgcaatttcgtgtctagactctgaagggggagcatctcacccagatcatgaaccaaaaggattttggaatggtcacagagacgccctacttaaaaaagctgaacagtgtggggagagagtcccatggatcctgtgaactcctgggtccagtagggcctgaagcccaccctgaacttggccagttctgagagctggtgaaggccatttggtttgagtttgtttgtgtcagttacaatggaagaggctggctattaggcccaaggcatggagttgtggcaagattgtgaggctgaactgggggatgccagactgtcctctgcagcagccttatctcacagtggactgactcgctttgtgacatgttcatcctcaagtccccctgccttaccaccggtgtggggggcatcacaactgcaggacggagggacgaagtgcagcacccctctgctgtgggcttgggacacgcttaggtgggcagcttcccctgccgtgggctcgggacactcttaggtgggcagcttcccctgccgtgggctcaggacacgcttaggtgggcagctccccccctgccgtgggctcgggacacgcttaggtgggcagcttcccctgccgtgggctcaggacacgtttaggtgggcagcttcccccactgtgggctcaggatgcgcttgggtggggtgcactggcgttaactgcatgtttagcactcagcttatctgcaggtgggtagcggtgcacgtgc

SEQ ID NO: 94389 - DNA, 45088 bp, Homo sapiens
tttatgaaatatttgtcgtacaaatgaatgaaggaatgaatgaccaaaaacttggaaatcaggaaagaagattcaaatggaactgtcagatctagagcagatcttagaaatcatctggtccaacccagagagggtaatgactggcccacagtcacacagcaagggctggagtgtgaaccaatggactccatgtctgcggctctttctaccttcccacttttgctgcttgggctgggtctgaaggatggagaatgtgattggccaaatactcagggaagacaacctaggagtgcaacataggcaaagggaatggcaggggttagggccacatgtgaagggaatgcgaaaagggggaggaggggaggttcatttagcacctactatgaggcaggcactagcatggcatgagctgagagaaaatctctgcagggaaagcctggacaaagaggcggaaaagcaagaacagccagagaacgtaaggagccgcgaaggtcaggccaaggaggctggctgggcgggttttgacagcagaggatgtccaggtcgtgggttgagtgtttgttgccctggtacatttcttttccccagctcccacttgctcatccaggccacagaaagtagaacaccaacctctggggcctcaacaaagcccagaataattttcttacccagattcttcttcctgtgtgtacctgggtggattctgaggggtccccagcttcccagggctggcacatgttgtcctaggaactgccaagggcatcctccatagtcccatgcacctgtcccttccagccgtgtcctccccaccccacctggaaagcagagatgacattgacagcgccaaggagtgcaagttcaaggtggccctagtctcacagtcaggactgccctgcttcttgaagcctccagcctgcctgcttcccctccaggagccccatttcctgctctctgcagctccagggctgccagacgcctcagatggaaaacaagcccagccccatttcctctgtttaactgctcgagctacttgcaaaatgcctgcaagaggaaggcagggccctgcacagcctccttccagaatagaccttggtctggtggacacagtctccgatgaggccacagcatatagaacccatcttgaggcattcagagataatgggttggagaggaaactgtggaaaagtggggactgagccttgggggcattacatggccatatcccctaccttagagcagcaataggatgttttatttaagagcacagattctggggctagattctcacttctaccacttaccagctgggtgaccttagacaggtaagcttagcagccctgtgccttgatttccccatctgtaaaaggaggaaaataaggccaggtgcggtggctcatgcctgtaatcccaggactttgggaggccaaggcgggcagatcacttgaggtcaggaattcaagaccagcctggtcaacatggtgaaactccgtctctactaaaaatacaaaaattagctgggcatggtagcgcacgcctgtgatccaagctactctgggggttgaggcacaagaatcgcttgaacctgggaggcagaggatgtagtaagcagagatcacgccactacactccagcctgggtgacagagtgaggctcagtctcaaaaaaaaacaaaaaaaaagcaaaaaaaggaggaaaataacaagatctacctcctagagtcattaagaggattcaaagagctacgttacatattcagtaagatttttggcacagaaatgttcaggaactattagccattgttttatgattactgagtattaattattaattgcatagcatgcatttattaaacaaatatttactgaaaaatattatgttcccatcatgagggacacaaaggtgattacagcaccagatggaggtttttaagggtcgggatagcatcttgaagggttctgtagcataaatgtttactgaactgaactgatgctgtttctgtcctcaagaaattcacagtaacaaacacatatacaactaaagaactagttatagagcagggcgattaaagaatgcttgaggaaggtacagtttccttcctagaaccagtcctaagaataaagagtgaatatatgccctagtatttatttaccaaatcctcacaatggccttgaactccagcacagtttggcctctggagatctttccagctcctaacgcattccccctggctccctgttctctggccatgctggcctttttgcaattctccagacacaaatacattctttgttccatgcctttgctctgactctacttccacctagaatgctattctcccaggtaagtcacatagctcacgctccccattcattcaggtctgctctcaaatatcacctccccagagaggccctccctgatcccctccccctgcctaagtcactctcatcactcttctcccttcctttggcttcatttttctttatagcacatctttttttttttttagacagagtctcattctgttgcccaggctagagtgcagtggtgtgatttcagcttactgcaaactccgcctcccgaattcaaacgattctcctgcctcagcctccagagtagctgggattacggatgtccaccaccacacccagctagtttttgtacttttagtagacagggggtttcaccatgttggccaggctagtctcaaactcctgacctcaagtaacccaccagcctcagcctcccaatctttatggcacatcttgtttgctgacattatattgtacatagattgtttgtttcctgaatgtcttccccactagaatctaagctctgtgaggacagagccctgcttccttgtttttagagctatgttctccgatacggtgcctgatgcacagaaggcattcaataagtatttattgaatgaattaatttgtcaaccttcctatctcttctttattcctcagataacaccatgagctcaattttttttttttttttttggagacagtgtctcactcttgtcacccaggctggagtgcagtggcgcgaactcggctcatcacaacctccacctcccaggttcaagcgattctcctgcctcagcctcccaagtagctgtgattacaggcacctgccaccacgccgggctaatttttgtatttttagtagaaatggggtttcaccatgttggccagactggtctcaaactcctgagctcaggtgatctgcccacctcggcctcccaaagtgttgggattacaggtgtgagccaccatgcctggcctattactccactttacagatgagaaaactgaggctcagaaaatctccctggcacatgtattcattagtttatttgtttataggctaccttgtcccaaaagttatttagaggactccgagaggtttatgacctgatccaggccacacagagctggtaagaggcagaacaggacacatgctcatgtctccaggctccatcctcattgctcatttctctacaccaccttcctgtatgcccagccctgtgtaagatggtatgctgcacacagaagtgctaggaagagagcgctctttgagggctgggcacacccagccattgtacctggtggttgtcataaagcgggagacctcagcaggaccaagagttgaaaatcagacagtttaaatggagaggaaaaccagacaggagcccaggtgcagattccagcccaagcaagccccatggctgcctcctggctgctggtctgggcttgtccccacctgccccttgctttcttgtgcagctcttcacggcagctggccccagccagcggaaggcgcctatgagccctgagcctgtggtcctcagcttgggcggccagcggcctctagcaggcccccccctcgaccccacccccgtcaggaagtgccgaaagaggaagagagtcgccgggcaggatgagcgcaccgggggctggccacagtgccgggggaagctgcaatgaatcctcagctctgggcccagtggaggcgctggggacggaagaaggggagcggccggggtcactgaggcagatgtggcgctaccgctcctgggacgtgccacagatcccatcagrggcaccccagacacagtaggtacaaggggtggcctgggagtgggcatgggacctctgtccctctatgagccttttatctgagatgggggtgacagaagtagggtcacccatctgtcatccagcactctgcagaggcacagagtagggcaaaggagttattggcagggtgcagggagctctgatgtttggactgtgtggaggaactgagctcgagagaggccaggagttgagcaagctagcagtggggggatctgggaagaggagcccccccaggagtgtggcactggatgctggagatttctgacccagctgcaaggccttgtggagactccgtggggtcttcagttgcctctgatctcttctctcagagcttggagtaagagccattgggaaacttccccaaaaggacccatgcaccccagaggccagttgtcaggcatacttggggattgatctgccctcctcctggccaccctggcaccagctgctggctggagggctggagccccacctccctgatcagaccttctcccaacttgcaggaaactgggagagggttctgggcctcggggtgctggttcttcctcaaaatcacaggcttgtccgcaggtcacagccctaagcattggctatttgcggctgactaaggctggaaaacgggctgccagaacccaagaggggaggatgaaagcgaaggtgacacaggatgtggcttggcagagaggcgtgcacacagaagtagtgggcagctggtgtgggcagcagggtggtagggtttggggaggtggaagaccatgcttcccagctcctggcctcccttcgtcagccctgcgggggccatcagaaacagccccggtgtgtgtgatggctgtgcccctacaggtgactgcttgggttccaattgctctcatttctggagggggacggcctcggctgcattgtggggtgtctttgtgtgtgcatgtgaggtatatttctggatgggagtgtgtgcatatgcacacacatacatatgtgtgagggatgtggcaaccggtaaccattgtcctgggagtatttgtatgtaggagaaaggtgtgtgttctgtgtgggcatgtgtgcttgtgaatgggagtgtggtacctgttgtccttctgtgtatttgtgagtgtgtaagggctgtgcaggtgattcccgtagcatatgagatctataggttctgttgaatactatgtcaggaaaatgcgatgtgttgggcctgggtgagaaggttggaaaccattgtgaatagctgtggaaggatgactttgtaggagaaacttgtgagttctttgttggtgtgtgtgcgagtcattaagtgactttggtcactgagtgcgagaggctggggtgggaagtgttcgtttaagtaatgagtgggcataattgtgtaagggatgtgtttgttctgcgtgcatggggagcactgtgtgacttttgttcccctgggtgcgatttgggggagccaaggaggtatgggtggagattgtgagtggctatgagtagggtgtgcgagagcggaggggaggtggtgacagcagccctcgcgagtgtacacttgtgagcgtgcagttgtttggtagcggagggatcgggggaggaaagatgcgcgtctggatgcgcgcagtgcgagtgtgccaggccgggagattcagtcccatccaggcgggccgggccgggctgggggcagggctttctgctgccccgcccattcgtcgccccgcccctcggaccgccccagcgggctgcagcgcagcgggcgtccggcagagggcgctgcgggcccggtgccaccgtgcggccgagggggcgtgctcggcggcgggcaggcagcggcccggccagctatgcggggtcctgcggccgcggctggcggcacttcctggagcggcggcggcagcggcttcccgggcacctgggcgtggggagcgggggcgcgcggcgcggggcgggcggagcgagcgcgcgccatggaggtggcgggcggcgcggagcgggcgtgctgaaccccggccgccggcccggcatgggcgtctcccgcgggccctccgccggccggggctagggccggatggagccgcgggacggtagccccgaggcccggagcagcgactccgagtcggcttccgcctcgtccagcggctccgagcgcgacgccggtcccgagccggacaaggcgccgcggcgactcaacaagcggcgcttcccggggctgcggctcttcgggcacaggtgagcggggcggcggcggggcaggcaccgaggcaccggcaggttaccgctccctcaccgggggacattcctcggccactgggggtccgggccacttcggtactgacactgagtcggggagaggctggcaccggcggcacgagccgtcttggcgtgggcacccactgggagtcatcccccagggccgggacacgggcgggatcggtcggcttggcactgtcaccgggtgggggtcattccctggcaccggcagtctagtgcgcctcatgtgtagtaccgtgggaggatcggctcccaaccctccagcaggaagatggaatcaccccagcccccggcacaagcaggttgggcccccaggactggtcacccacgccttcttggcactgatagaacagggcctctctgagcctcctggcaccactgaggtggggatcacaccgccctttggactttcgtgggaccaggttgcctaccatcactgcgtggcatctgcagaacgtagccccgttgataccgtcaccacacatggcttgtccccaagctctggtcactggtttaattgtttaacatgttaagcttctccttggggttgggggtgcctgatcatctgccctaccttgctcttaattagcagagagaccccagcccatccctctgctaggcaggcagcatgtctccctctaccctcttccagcccatgctgggaaagggatggggtgggctggagtctggaatcygctggctgttcaagcttcatcttgccccctcccccagcactccaaatgtcaccatcttgtgcctgtgacagagctttgaccaggactctagcggggaaccggggggagagtgtggaaagactgagtgcaggcagttcatggcaagtgtgctgctcttggtcgtgagccgctgcctgccctggtagccgtggtgtaaggtaagggacgtgaggccccaggagtacctgacctggctccctgcgcttcttcctgaccgagccttgcccttccctggtggccaaggagcttgtagccaatcagccaaggaccccagagccacctcagactgaactctgaccacttggagtctgcccaaggcctccctctcacttttctgcagctgcctagacttggtggcattcacccccaccccgccccttagctttgctctgccccttccctgggtagactttacccaccaataacatgggcggttttctcctgtcgtgtgggctagcatacccgtgatgctgacttgtgccctctacccgtctcacccgggctagggcccactctttgcacctgcactctgtctctgagcacatgcacagatctgaattcttacactggcagatggagctccgtgggctcctgtgttaccacgcaggcttcaatgtcatrtaaaacagagcagggagtgaaacttccagtagctctgttttgtcacccacagccctgcaagatggagcagtttacacccagctctgcaggatgtagcctccagtattcacaggctccgcagggggagggaggggcgccaccagaggcttcctgttgctgcccacagrgtatcaagtgttgggttcttctgacctgtggctgtgccccttctgaagggcacaggtttgtgggtatagggatgagcacattcgggaggaagaacaagaaaccagagaaccaacagatacctttatgtaattctctaaaataagcagggtaggtggtattcttccttttgtaaaacaaaaaaaaaccaattttttgtagagatgagatctcacacagcattgcccagcctggtcttgaattcctgacctcaagcagtcctcccacctcggactcccaaagtgctgggattataggtgtgagccaccacacctggcctgtttctccatttttatagatgaaagaaacacagtcagaggggatttgctcagagtcacatagcaaggaagaggtagagataaggtttgaagtcaagttggtgtgattccaaaatccacatccctttctctataccaggatcccaaacggaacatcacaatggccaagggagctttaagaaatacagattcctagatcttcccttggcgtgtctgacccatcaggtctggaggtggggcctgggcattgtttgaagcttcccaggtgattctcatgtcccatcaagtttgagaagcacagtagtccgtcacgctggggagtgtaagtgctcttataggatgcctgatgagaggaaagaaaattcagcagcacctctggaagcatgtaaggagtgtcctttgtttgggagcactgtgctggggatagtggggccttcagaaatgaatacattcagagaacccagtagtatcaggcagagagcagcaagggaaagcactttctcctggcaggcctgggagctcactggggctggcctccttccctttgacttgatggggccaaggggtgggtgctgggggcagacatgtggaagggtggaatagtacacctgctctgggttctgccccctccaatgctgcttggctggtcctgctacctttgtttgtttgttgcagcctcaggtaaaagtcctcgaagccccagctgaaaccagcccttcatcttatcccagctccatgctagctcttaacctagctcttgcttctccccagtcatccaccccatgtcccccatcccgccccctccccaccccacccacatacacacatccagccttggggttgaggggcccgacgggaagatcaagggtaacaactaggttggcagtggctgctgaagccaggtggagaattctgcatgcgggccctggctcatggggagagttccatgaacaattagcagtgtctgctgtgggcttggcagggggtcttgatggcacatgggccacatgtttgccatcctggcccctctgggtaggacagtctctgaatggcagcccctgtggggctgaaagaggcttttccttaaagtccatctctgccccacacaactggcgtcatcctctcagaatcggggggtggcagcttgccatctccctttttttttttttttagctcagtgagccatgattctccccagcttgtggattcctcccaccccaactgcatcccaccttacttcttgccggaactatcagtctcctccctgaggaggaggaggaggagaggaggtacaggcccctactctgatcccagggtatttagttttcctctaccctgagcagagggcaggcaggacctttccatttaagcttctgttgaccctaaggattgggcagccaggagtgggagagaagtggactctctctcctcctccaggamccaccgggaaggaggacccgcttatcctctggcctggtctcagcagcctgatcctggcaggtcacagggcttctggattagctggttttacaccccaggggcatcagaaattacctggcacctcacacatgtagacataaggagccttggcctcagagcccctaggagcctgagcgtctgtgccgccatcccctgcccttcacggtgctcaaagtcacaagctcccagagggcaggaggcacacctgcagaaccagtgtgagacaatgggtcccatttagaggcactgccacacrgccccagcgagcatggccctgaagtcagggctgcagagggtgcccagcgggtgcctgagcagaagcagcccctgtttgagttggttctgcaatgaatagggagggacgtgttgagggacgcctcttttgcagaggtgagaaccctgtctatggtgccagggtgtctgggagcgaaaggaaacctctttgagtggtttgtctcacctgggctaatgctgggagcagcccaggttgctgtgagaggcagggacaacctagaatccttgggttccagcaagtttgggaaagaaaaatgggcctcagtggccgagctgcgttcatctcactgtgtttgctccccacacaaggtcaggtgccagagtatacagctggcccctgctgggaacccagtgtagaattctcacagtctccctctgtgccaaacgctgtcaggggagggaatgacaattcttgtcattttgtctccatgccatactccaaaaaggtcagatcctgggatgtggagctgcccaggattctcggttggcacaggagcttgagagttggtgtcccctcaggcaaggacagaggaaggactaagtgacccctggtgagagaaagctgaggctccaggcagctgggctgggggagagtgagagaaacgggcctgccctcctcggctccctggaggcctctccagaattcgccagtggcccccccggggcagaggtgaaagtggagtcataggttagccctgagtcttaggccgcgcgggcccctcggagaagcagggatccggagcccttccacccactttaaggcaggagagaattgggaggtgtggaagcagcccctggaggctgccctgcagtgcckctggagcgacacaagggggcgacagctgccgttgtgggaggccggtgggcgaggagcttctccttccgccagtccacaggcccacggggacccacaggcactcgctggaagttacctgcagctctagctgccgggcggagccaatcagtgcggcccagggcaggctgggtgggtgcctctagcctcctggccccacccctcccgtcccctgaggcccaggcccagccaggtggccttgactcagccaagttctcgcagctagccggggtcatctgggactcccgcgctgggcttccagggccatgttcattaaggcctcatcacaggacccaggacaggctgaccacctctcctccctgccccctctgcctcctccttgaacagccctctaagtcagctgcgggggcagtgtgtgcaggaagcgggatctgccacacctgcggccaggttcttccgctccccgagttcctgggccacccctgagcggtgccaggcactcattccttgctcttcttggctctcctctgttccgtgtcggggtcagccccacatccagcctgcagtgtgggtttcagcacaggacttggctggcacttgggtcacaggtgtggagggtaggccaaaactaaccaaatgccctggaagagctatcattctgccatctttcctcttcaccccctgcctcgctgaaacaccagagacgtggttaggtcgggaaagcaggttcgagtgagaccaagggctctgtggccgcggaggggagggagaggctgaagagacaggagtggcgttccagctcctctgtctttggtgattaacagctgccagaagcttgtaaattcatcagtttcatgtgatcttcataacatctttgtagttggtttgattcccattttgcagataagaaaaccaaggctcagaaaggtcaggggcctggccaggatcccccagctcacactggagcccagcccaatgatcttctcatgacattgggccactctacttaggagtactcttttcttctattatttgccatccctaaactgggaagacctaagaagaggtttgagtgctccatggggtttagtgaaaggtctttgcctccggtgccaacggtgtgagacccatgagataatctgacctggacccccaagggagaatggccaccaagatccctcaagtcaggggagcaggctggactgggagagacccttggtaaagagactggggctgtgagcccgtcatcatgtggcgtccgggctgggtctggcgtggaggacaagtctgatctttttccttgctttaagggcgcagggagtctaaagcccaatggacatgctcagaggagcccccataccacccaggggtcggtggctggtctggggcagggaagatcgcttcactcgtacccagtgcctcatggtgagaggtctgagaggagagggagggccccagcatcctcctcatctacactgagacctcctccccttgctcctggcagagcatcagttcagagctcccacgtagaggcctctcccctgccagggatgagcccatctcagcacatgccaaaatagctgtctgggagcctgggcccgcaccgcccacaccccagcatctcgcgggttaacagcttgcctgtctctccgcccccttccccagcttgctgacattttacagagagaggcgggggcggttgtgaaagggggcaagctggttcttgctccccaacccacacggacaccccactgacacagcctgccaccacccacccacctctggaaggcatccccttgggggagaccttccttccatcctgagggccctgaaagggtgagggacaggctgccaaaaccatccctggtagacccagggagctctagggggctggtctccctcaaggggtcttttgtaggacacaggatctccctctgtcacccaggctggagtgcagtggcacaatcatagctcactgtaatttcaaacccctaggctcaagcaatccttccacctcagcctcccgagtagctaggactataggtgggggcccccataccgggctcattttttctttctttctttcttttgtagagacgaggtcctgctatgttgcccaggttggtctcgaactcctggccttaagtgatcctcccaccttggcctcctgagttgctgagattacaggcctgagccactgtgcccagcctctggagtctttttaagaaatgattttgaaatctttctaaacacattaaatatcttggcgttagaaaagtgtgcagaataaggtgacacctactgcctagcttggttggagcttagcattaggccatatttgctttagatagagatggaggcccctgtgtcttactccctggaggaaaccacaattctgattttggtgtgtgtgatgttcttgtgcctgtttttaaaattgtcctacataggtattcatgcctagcaacatacagtgctgtttcgtatgattttactctggtttaaatggtataccaggcatattctgcatttaggtttttccctcaatattgttttggagatttaaccatcctaaacatgaattctcacggatccattttaacctccacgtccgattccattgtgtaacagcagcttatttgcccaggctctgttgacggacacttgggtggtgtgcagtttttcgctattgcaagcgatccctctgtgttctctccaccagtgcttgctcacagggtctgtgtattttcagcttagacagatgttgccaaattgtgctccgaagtagttgtcctaatttttaggcctctgtgtttatttttttattttattttatttttttgagacagagtctcactctcgcccaggctagagtgcagtggtgcgatctcggctcactgccagctctgcctcccgggttcaggccattctcctgcctcagcctcccaagtagctgggactacaggcgcccgccaccacgcccggctaattttttgtatttttagtagagacggggtttcgccatgttagccaggatggtctcgatctcccgacctcgtgatccgcccgcctcagcctcccaaagtgctgggattacaggcatgagccaccgcgcccggctattttctttcttaaaactttcagtaaactggggaattgtttcccaggaacaaacactttctccttcaagcctgcaacactcccttgagagagacgagggtgggcattagccctatttatcagatcaggaaactgaggctgaggcaggttaaaaggcttagcttgaggtcatgtagctggtcagaggcagatcctctgggcctttgaagctaaacctactgtgaaggcctttgtcccctgtgtgagtagtgtggaagcctggagagtggggtggggccctgggggctgatgggggagggagcaacatggtcagaaagttgaggggggaggtgttaaattttttttttttctttttttgagatggagttttgctcttgttgcccaggttggagcgcaatggcgcggtctcggctcaccgcaacccctgcctctgaggttcaagcgattcacctgcctcagcctcccaagtagctgggattacaggcatgggccaccacacccggctaattttgtatttttagtagagatggagtttctccatgttggtcaagctggtctcgagctcctgacctcaggtgatctgcccgcctcagcctcccaaagtgctgggattacaggcatgagccacccgcccggccrgggtgttaatattgaatgaggggtgagggggaaatgcttctcccagcagatggggaatgggagccctctgcagacacaggagaagacaaggatgggacggtcaccagagaagagtgggggcccgcgaggggtttataacaaaggggcccctttgggaggctaagggagatatatyggcattcccatcagggatcggtttcagtgttgcctctgagacaccagagctcagcccagaccagacttgtccacccagtgcagcaggaagttctcgggagctggcccactcctggggctctgtgcccacctgaagcctgtgctgtcagcgggatccatgaggctgagtccagaccatgcgctgttccctccactcactcttcaaaccacacccagcacttctacactctggggatgccattagaagcaatgtgaggccctgrggctcacagcctgtccggggatgcagatttgcacattagtgctgattgcccagggtctgagaggaaaaccatgagggagaattcactgagtagagaggggagtggtattccaggtagggagaccaccggatgccacgtggtgccacgtggaaaagggacccgcggtgttttgtttgccagaagcatccagggtggagcctgaggggtcgagggtatgtgccatggaacacactactgagttcaaaccccagcactgccacatgttagctggacgacttcaggcaaatgacttaaccgctttgtctctcagtttcctcatctgcaatatgaggatacgggccatggggataagaataccaactattcttaggaggattcgtagcttaatatttgtaaaaacacttagagtagtgtctggtggagtgagttatgtaagtgtcaaatacagcattaaaaatatgaaagagcagagaggaggctgggaggcctgttgcctgccagccccaggtctttgcattttgctcagctgacagtagagtcagtaaaaggtgattgggtgctttaggatgaattctgatggcagcgggagtctggcttggagggaggcactaaaggaatgggttggtcatttgttgcgcaaacatctctttgaggcctagcaggggctgagtcaggkactcggatgtgaaagaagagactgggggtatttcaccaaggagctcaggccagcttaggatccccgcctagcccccaagcctctgagacagcccctcctcccctttccttgcccaccaccctccccttgtgacttcatgtcaccaaaccgactatctagttttcatgagaaagccatggagaacatggagcgggcgatagcatccagcccagaaaggggcctccaggtgtcactcttggggtcctctagagaggagaggaaggtggccacccaaaccaaggctgttgccatccccttgtacccaacaaagagaagtggcctgagccagctggagcctgtggtcagccgttgcatgtggttacacaaggtggaagaagcctttctcctcccttaaggtgctggcccctcccctgtggaattccctgttctttcctcctgcactgatcagcagtaaatgctggactcactgccaggcaccatgccgggcatgcccagatgcgctagacctggccccggccccccaggagctcgcggtctggtggaggagcaggcatgtgggctgaaagaagcaggcctcccagggctctagtggcaggggagccaaatgggcagtgcggagctgtgagtaggaggggtgttccgttggctgtgagcaggcagctgcttatcaggtagagagggaggccagtattcggggcagaaggtgtgccaggtgcggcggcacagcagtaagycaggcacagccagattggggcacagagaataggctggcttggttagaactaaggcttcgtgtcacagtacaggaggcttagtgccacaccgcaggagccacgtctgccagggtggagaaggcagattcactctgaatcagtggtcttaaaaagtatggtcctgggggtgccctgacccatttcagggatttgataaagtcaaaactattttcagagataccctggttcctgccttttttttgctgtgctgatggcacaaaagcagtggtgggtaaaactgctagcccctcaacgcgaatctaggcaggggccccaacatcagagtccttactccatacatacatttctttaaaagtagtgaagatcattaattttataaagtctagacccttgtgtacctatatcttctgatattttacatgaaggaatatgaaatatatataaggcacctttgctgcaaaccaaactgtgatgaggaaaagctcttaactcgatgcagttgtaagctgtactagatgcttttttttttaagaacaccatttgtacttggacacctgatagacaaactagtcagatgtaggtatttggcagacattttctcaaaagtgcatgacatgagcttgtcatttccaaaacagtgtcattatttgttgccaggcacaggccaccatggctcatatctgtaatcctatcactttgggaggccaaggcaggaggatcacttgagcccacgggttaaagaccagcttgggcaacatagtgagacctcatctctacatatattttttaaaaataagtaataaaatatttgttgccaatgataaaatttgagcttttgagcaaaaatgagaattttggaaaccttttattcacttcctagagcctgacggcttcctcaggcttaaaatttttctgatgagatcagtagtgaagttagtgtgatttttggtattgtataataacatgtgggccaggtgtggaggctcacacctgtaatcccagcactttgggaggctgaggcgggcagatcacctgaggtcaggagtttgagagcagcctggccaacatggtgaaaccccatctctactaaaaatacaaaaattagctggatatggtggtgcacacctgtaatcccagcaactcgggaggctgaggcaggagaatcacttgagcctgggaggaggttgcagtgaactgagatcgcaacactgcactccagcctgggcgacagagcaagactgtatctcaaaaaaaaaataataaaataaggccaggtgctgtgaatcatgcctgtaatcccagcactttgggaggccaaggcgggcggatcacgaggtcaggagttcgaggtcagcctggccaacatggtgaaaccccgtctctactaaaaatacaaaaaaaaattagctgggcatggtggcccatgcctgtaatcccagctagtcaggaggctgagacaggagagtcacttgagcctgggaggctggggttgcagtgagctgagattgcgccattgcactccagcctgggcgataagagccagactccatctcaaaaataaaataaaataaaatgtgtcaccatttggaagatctgcataactcagtaaaccagtattttccaatgactggtgcttgatgttacaaaattcaaaatgcaaggtagtccagtggaaagttcattgacgtggttttatatttatatttatttatatttatttatttattttgagatggagtctcgctctgtggccaaggctggagtgcagtggcgtgatctcggctcactgcagcctccgcttcccaggttcaagcgattctcctgcctcagcctcccgagtagctgggattacaggcacctgccatcatgcccggctaatttttttttttttttttttgtattgttagtagagacggggttttgccatgttggccagactggtctcgaactcctgacctcagttgatccgcccacctcggcctcccaaaatgctgggattacaggcgtgaaccactgtgcccggcctgatacggttttagattccacattgcaactaacctttgagaaactgtcatttgtcatattttggtgtagtagcaaagaaaatctataattacctggaaaggctgttaaagatattccttctttttgtaactacatgtctgtgtgaggcagaattttcttcatatacttcaaccaaaacaacatgtcacaacagattgaatgcagggatagacaggagaatccagctgccttctattaggccagatgttaaagagatttgcaaaaaatgtaaaatgatgccactctttttgctaacttttttttagaaaattatttataaaagtgttgtttatattaacgtaatgggcttattgttttaagctagtaagtatcttaaacatttctcagttttaacatctgatatgatacatattaatagctgtcaccccctaaaacaaaactcttttgggatcttcaccaattttgagagtgtaaaggggtctgggagctttcaagttgctgaacacatggaggttcctggaggatggtgtgcccagggagggcgtggaagctcctcgcccctttcctcatcaaaaaaaaaaaaaaaaaggctgggtgcggtggctcatgcctgtaatcctagcactttgggaggccgaggtgggcggatcacgaggtcaggagttcgagaccagcctggccaacatggtgaaaccccgtctctactaaaaatacaaaaattagctgggcatggtggcaggtgcctgtaatcccagctactcgggaagctgggccaggagaatcatctgaacccgggaggcggaggttgcagtgagctgagatcacgccattgcactccagcctgggtgacagggcaagactccatctcaaagaaaaaaaaaaagagtttaaagaggtcttgggatcaggcagttggacagctgccactccagaccctagggtaccatgtcaggactgggagttgggggggtggcattccrgtcaggatacatataacacagactggtgtcttctgggcgttccttagcttggcagagccagaagacccagaagctggagtcccagctcaaccaaatcggagttgtgggcagtcacgggcttccacaagcctcgagttgccccatctattcagtgggacagtagtgctgtctgcacaggggaaataccagcctcccgtttgtaatgctggtgaaaagtactttgtaagttgtgaaacactccacagatacttatttttgtgattgttttgtctggagccggtgtgattagcttccccagacctcagaaaacctgtccagtgggcgtgagaaggcattaggtggctaaatagggggcattagtggggggccccctccctaaaagggcctggctcccacttctccctccttagacctcgttcccaagctgaggcatgggctgggctgtactgggtgccaggtggaagggaggccactgggttgtcacccagcctggctctgggaaccttgggaaaaggagctgggaggcacgctcgtgcgctgtgtgcccgtccgcccacccgtcgcctgctgcagggcctggagccgctgctgggagaggaagtgcgttcagttaccaatcgggttattttcataacggctgtctcaggctgcagggaggagggtgacaagggggagggggcagaggagcagccacggctgctagctctccaaactaggacttgctcagcagaggccgccagcccggagctggatccagagcccggccttggggaccccagctcccacctgcgccctgccttccagatcaggtcaaaaggggcccccagcccctccttgctttctgcttcctccctctgtatctggctgggtgggtgyggggagggttggatccgggcggacccgggccccaccatccctaggcaaggagcctgccctgccaggttcctgaagctgatggaaaagggtccccccgagctcctgctgagccagggcagaccctgccgactaaacactcactggcctggtcgccttcttaccatccagcctggcccacctgctccccgaggtacattttgtttgttgtttttgacaggatccctgtggtgagtctcagcctggggaagggaggaggactctgcctccccagcccctaggctgactggggagggactggcctcccttccagcttccccacctccttccctccaacccaggtctgtgggagcagagccgagggggttctggggaggcagctgcaggcccttgctctggggctgctggaggtggggtcgccatgcaccatgcccagccttcacggagcagaaggcggacgaggccctgcccagggtgtggagtgggcgctctgggtcagtcccatggggtatcctgtgagagcaactcagggggccaggcctggtaccgggtgcagagggcattcctcatggcacgagcagatacccaggtgacacctgtggccggctctgttcctcatgcggtgggtggtggccaccctgggcactcctgcttccctttctgggttcctggcctcactgtgggcagacagaccccaggaggtagcacaatcacatgctctggtgtctatggtgggtgtaggccctgccaggccctgctgtctgccaggtatcaccaggcactctctctctgtcatcgcatccagacctcctttaggccaatcttctgaaccaggtggtgtgagctccattttgcagatgagaaaattgaggctcagaaaggttagtggatcagtctagggtggcagtggcagattcaggatgccaacgcccttgaaactagcacagggcgtgagatggcctgggctctggagggtgggtgtcctgtccgctccagctgtagctgatgaagctctccggcctgcctgccccgatagcagccactgcagctcggccacctgcagccacagccactgtccagcaagggtgcacggccagacaccaatggtcttgtctcctgacttcctctgtcctttcccaggccctgtccttgtcaggccccagagccggccragggttgatggggtcccctgagtcctttcccatcctgtccccattggtgtaacaggctccccacccggagaccgagggacagccattttgctgtgctcttggtgttgaagccctcagggtgacctttacacgtactgtgtggcgaggtggaggtgaccaagagcacgaggtgagaagacactgtcacgcagagctgcgctatgggagaggcttaggcccagggcgggctccaacaaggcccaggagaagccccagcagagataggaagtgaggagtcaggctcttgctgaccagggacagaggtttctatggagaccagaggaacaggaaactcaggcctgcggggaggggcatgggagcacggaggcatgggtgcccagcaggagagcctgtgacaaattgtcagctcagccactctgacagcctccccagacacacagggaaactgaggcccgtgaggggccaacttgcacacagtcacacagcactgccggccttgcccaccccactctgctgggaggggcggcatcatcggccgccgaggagactcctggacagatgtggacctgggctgcctggcagtgtgtggagccgggcaccacaggagctcctgtaagccgcccttgtctctcgagggggtcctggcccctgttgtcagtgcaggtctggggccgcaagctgggctcagccctcaccgctgcccacgggtgcagcggcacctccccccactgactgtggccttttgttttctgggtgacagtagcatcaggcggtgtgtccgggtgactaatctcctccaggctgggcagctgtcacagggcggcctgaccaggcaggcaggaaagctgacaccctggggagggctggcaggccggtgccctgacggcagggggcagttgggccttcaggctcctcttcccctgacacaaagcaggccccaggtcgggaagacccgggttcaggtcccgaatgccgctgactggccgtgggactgtggcatgttactggccctcttgaagcctcagtttccccatctctagaatggagctgcaggtcctgcttacctcacagggctgtggtgaggattacacgagatgataaagtacttagcccagggcctgtcacgtagcaggtgttcgttattattccctatctggttccctttcctaccccatcccagcctcatgttccaggaggaaggaccctgcaacccaccccatttctgggacgcaggctttgccgttaggtagacttggactccagcactgactccacactgacttgccgtggactctaggcggtcacctctgcgtcaacttcctcatcaggaatgcagtgtgatgcagtacctattccttggggttgcagtttatgaaatgatctaagtgtttgtcaggggcttagcacagtgcctgacacataggggctcagtaaatgtcagccgtgacactggtgattttgggggagacccagcgctctccacccatgcctgctgtcctgcccctgcagctccctccggcccaggtggtctgctttgagtggggcactatttggggtcataagagcactgccctgacctccctgtcatctgaggcagctggaaactccaataggcagagaccaagagctgagctgtgcagaactctgcttccctaggcacctccaccctgtccatctctcccccaacacccctgtacctggcctgaagctgctcaagacctgcagggcagtagcaaatcagtgcagtgtatggaaggagaaggtgctagacgtgcggcctgggcctgactcctccagcccttcatctttgccttcatccttcctcctgcccaacatgcgtccagggcatcacccaccatgcctaattaatgccagccttcaggggaccacagggcttcttctgtcagccccaggcagcactgtcccagggctgtgaccttgacctctgtggctgccagcggttaggatgcatcccccaccagtctctccccaggaccagggcccaggagatcacctgctgtggggcacaggtggcctcaggtacctggaggcatcgccagcctgatccatgccaggcaggctgcccttcccccactgttaggagaggtagggcacaggagctcgatgctggctgtgaagaagggtaggcagggctgaggtgagctggcagagggagcaaagcatgagttcaggatgggtccatggaggccaggtccaggtgggagctaggatgatgcccacagctcctgcctgcctgcaggagggagctctgggctgtgcagcgtttggaattgtgagtatgggggcttccagcatcagggccgcagaagaatgtgcagtcacaggctccatcaggagcagagtcagaagggtttcccggcatcacccagcttcaccctggggtatccgtactttgtcccttcagaaaggtgagacagagcagtcgagcaccagaaagttcttaccatcagcacttcagacatacaggcacgcacacacccagaatccagaaggctttgcttttggcccaagcctattgtcacggccccctgggtgtgaagggagactgagcagcctctctcccaggagagccagacagtgactctccagttccctgagacctggtctcccctgagctacacattagaccctctctatttccaggagtcaccttcagcctgaccccaaggctatgggctgagagactctgggggtcctgtcaggattaagttcctttgcagagagcctcattttgttatagcttggtttgctccatgtcccatgaggggacacctaacctgcccccaccatgttggtggcaaaacaaaggcccagcaagtgggaagccctgccctgggccccaccgtccatccaggcagaccgactccccattttctttttgttttcttttccatcagcttccggcagggcaggtggaggcctttaggcccagagctctgtagattctggtgcctggatgggggaagaaggggtagcctgaagcacccacctccctgggactccagggctccctagggtgcaatgggggagagcatcagtgccccaacagctgtaaacgtgggctcccctgagcacccctgggatcctcacatggaggtcagaggctgcagtgacccctccctccctcaggggttgcttcccttctcatggggcagaggctgtgaatgggctcctggttgcttcccttctcatggggcagaggctgtgaatgggctcccggacacaggacagaccgtggcctgatccagctcctgatgctcccggtctctgtgcccaacagccaaccgcctgccatggagactttctttaggagacatttccgggggaaggtgccaggccctggagaggggcagcrgcggcccagcagcgyggggctgcccacaggcaaggcccggcgtcgctcccccgctgggcaggcctcctcctcactggcacagcggcgccgctccagcgcccagctccagggctgcctcctgagttgcggggtgagggcccagkgttccagccgccrgcgctccagcactgtgcccccttcctgcaacccccgcttcatcgtggataaggtgctcactccacagcctaccaccgtgggggcccagcttctgggtgcacccctgctgttgaccgggcttgtgggcatgaatgaggaggagggtgtccaggaggatgtggtagccgaggcatcgagcgccatccagccaggcacyaagacaccagggccacccccacctcggggcgcccagccgctgttgcccctaccccgctacctgcgccgagcctcctcccacctgctccccgcggatgccgtatatgaccacgctctctggggcctgcacggctactatcggcgcctcagccagcggcggccctcaggccagcaccctggccctgggggccgaagagcctcaggcaccaccgccggcaccatgctgcccacccgtgtgcgcccactgtcccgcaggcgccaggtagccctacggcgcaaggcggccggaccccaggcctggagcgccctgctcgcgtaggtatagctgtggccagcagggcgagtggtgtgacctcctgtgggtctggcctgggcatgggccttgaagctctgcctggctgagggttccccacttgggaacactctgggcagtaccctgaagccagcgtaccccaaaaggccatgtctcttgcagggagcctcttagtgtctggggctgctgggaggctcctccgccctccctgttgccgaggtcacggaaagggcagaggccccaggaggtgggaggaagtagggtcagcaagtgctcagccccctcctcagctgtcttctcctctctaggaaagccatcaccaagtcgggcctccagcacctggccccccytccgcccacccctggggccccgtgcagcgagtcagagcggcagatccggagtacagtggactggagcgtgagtgcctgaacacccctgggtcccagaccctctgggctcttggccaaggcgcagctggcgggtggaggcactaaaggcagctgggagagccaagcctggaagggttgggacagtggggcagacggaacagagcagggtcgatcggggcgctggagtgggtttgtcttgggagagggcgggtgggcgggggctgatgggagggagggctgggcggccagcgtgtgctgagcaagcccatcccgtggctaggagtcagcgacatatggggagcacatctggttcgagaccaacgtgtccggggacttctgctacgttggggagcagtactgtgtagccaggatgctggtgagtgctcgtaggggcacgccgccccctgctggtggagccagtagccgcagccyttccgggaacgtgggattgagcccgctccctggcacccctgctgtgggccgccccaggatggtgaggggtgcaggggctttgtccggatgccagsactggggcttcccagtgcacacaaagggcagctgtgctggggcaggcagcctccgagatagacttacctggtgcctcaggggccctctcttcctgtcctgcagcagaagtcagtgtctcgaagaaagtgcgcagcctgcaagattgtggtgcacacgccctgcatcgagcagctggagaaggtgggtgggtagctcagctttgcccgcccctgccctttgggtgctgaggccctttcagcgcgcactcacacccacatgttatacaaacggcctgccaggagtgacccagcactcgggggtgaagagtcaaggaccctggagccaaatgcctgcgttcgaatcctggctcctcactgattagctgctgtatccccactgcctggaacaaacctggcgcctagtgggttcgttgaatatcactcaatggaatgaattgacgaatggtggcccttgtaccatttcaccatgtccaaactagtgcttagaagaggccattgatttgctgaagcttcataactcagctgtggctacaccctgcctctgtggagacctttccccaagggccattgtccactgtgcatttgcagctgggggcatgtctgggcactgtgcttctagaggtggaggcagcactgggcagacgggtcaaggccaggggcagaagggttcgcatggaggggcagcgcttcccagcctgcagaaacccaggccatcatacgggagagactgtaagactaggagtggttcaggcaggctcacacaggctgctttccccagcctctgaattgtaaagtgaggcttccttatacctctaataaggctgaagtagggacagttatgagaagggaaatagaaatgcagccccaagcactgtacactcatcatttaaggtggaaatcgacctagggttccacaaattagctaaaggtctccaggggccaggcagtgcaagtctgcgtgtgaggaccaggctggctgcgtgtgcccgggtcgggagtgccagagggcgaggaagaaaggatgcggccgagtgcggtggctcatgcctgtaatcccagcactttgggaggccgaggtaggtggatcaccctgaggtcaggagtttgagaccagcctggccaacatggtgaaaccccatctctactaaaaatcacaaaaattagccaggcgtggtgatgcacacctgtaatcccagctactcgggaggtggaggttgcagtgagccgagatcgcaccactgcactccagcctgggcaacagagcgagactctgtctcaaaaaacaaaaacaaaaaaaaaacaacgagcaaaccatggtcccatgttagtgggggagacggacccaaagctcccaacctccccctcatcctgggtcctgggtggaagaaggaaagatccctctggctagtgaggaggaggcagagaggcaggagggcttctcacaggaggtgtctcgtgtttcaaggactctcgtgacgatttgggggtatccccaccttgtgaggatgactctgggttgtcctggagggagtgaccacatacctgaccccgaagggaggttctgacattttggtggtcactgccatgtttcacagataaatttccgctgtaagccgtccttccgtgaatcaggctccaggaatgtccgsgaggtaagtgcccagggtggtcagggatggggccaccctaagattcctgcatgggcctctgcgcagtgcctctggagtgccaccagggggctcggctccctctaggctgctgctcactgaggtctgtctgaggtctgccatgcggaggcctaactagcgctgcctgcggagtgggtgggacagcttgtgcctcctggtgcttcccagccttctctgtccctctgagtctgagcctcccycaggccatgaagagagtctttagcccctcctccactcatgcgcaggactgcagagcgcttcctgcagccccgtgtgttgagccgtgtgggcagtcctcaggactgtgcccctgcccacccctcacccagtgaaatttttccccttctcccccagccaacctttgtacggcaccactgggtacacagacgacgccaggacggcaagtgtcggcactgtgggaaggtgagaggccctgcccgaggacatcgccacctgcacctgcggkcctgagcccaggccatgtggccggtgtggcctgccgatcactgaccacaccctggtgtgcagagtccggggctgaccctcagcctggctgcagtgccttcagttctcaagcaccctggcctgctcttggtctctgggcttagtaggagagcagggaggaaagttttcttcccatgtggcacacctggcctgctttgaagctgcaagtggccctttggagaatcgtatagacttactcattcggtgactccatggatacttgtgtgccgagcgccaagctgggcagcggtttcccaccctcctgaggacagtgtggcttgaagccaggctttccaggcgaccgcctaacccagtccacagttgtttggttcactttcttgtttgcttcttgcccgcctccctcagtaagtgcaggctctcaaagatggagaggcttgcttcactgattctcagcgcctggcccactgcaggcctttcataacagcctgtgtgatgaacagggaatgaatgtgataggtactcggaagcggcagtaaatttctttaacagcacatgggggtctggtcaggcctcgggggtaggaaggagggaaaatccgagtgaggcaggagttagcctgcagtgtggcagaacgggtatgcatgtggtgccgtgcaggtaacttcagggagtcagggggcccgggctaagccaccctgctcttcaggcttatcttatacatatttttttttattttaaaaaatgtgttcagactgggtgtggtggctcacgcctgtaatcccagcactttgggaggctgaggtgggtggatcacctgaggtcaggaattcgagaccagcctggctaacatggtgaaaccctgtctctactgaaaatacaaaaaattagctgggcgtagtggtgggcgcctgtaatcccggccactcaggaggctgagacaagagaatcgcttgaacctggaaggtggaggttgcagtgagccaagatcacgccactgcactccagcctgggcaacaagagcgagactccatctccaaacaaaaacaaaaaatgtgttcaaagctgggcatggtggcacatgcctgttgttcccagttacttgggggggctgaggcagattgcttaagcccaggagtttgagaccagcctgggcaacatagcgaggccctgtctctgggtggagagaggctggcaccaggagaggggctgggtctgctgctccacgcctgccctggttcccatccatcctgtctaccctcagggattccagcagaagttcaccttccacagcaaggagattgtggccatcagctgctcgtggtgcaagcaggcagtgagtggtgcccccgcccccagggccaggccctgcactgctgggtttgggtccccgagtctgaacacggtcccgctgagcccggcccctcgctctcctcagtaccacagcaaggtgtcctgcttcatgctgcagcagatcgaggagccgtgctcgctgggggtccacgcagccgtggtcatcccgcccacctggatcctccgcgcccggaggccccaggtgagtactgcctgcacccttgatgccccgtacgcayttggggtctgccagctaccccagcctgcccacctcgtcaccaacacccctgcttcccttgcagaatactctgaaagcaagcaagaagaagaagagggcatccttcaagaggaagtccagcaagaaagggcctgaggtcagccccaggctgggcagaggctgcaggggagcaggagagaggggtctgttgctcagggtacagaacttccacccccagctaatgctgccagctggtgggggtctgtgtgggctctggggcctctgaggaaggcaggattagatgccagtttctgctctgtggcctggtaagatctggcccagagatggtacgtgagggtacaaagagggaacaaagtcacccagggggcctgctaaggatgatggyagggtgtcctggacgggaaggagcttacagcctctcaccttgtctcccaggagggccgctggagacccttcatcatcaggcccaccccctccccgctcatgaagcccctgctggtgtttgtgaaccccaagagtgggggcaaccaggtgaacgcggccttgcctctcagctaagggctcgggygggggttggggtccagcccgtctgccagcagctgttcccagagcccgtttctggcttctaccccaatccctctttcccagggatcctgagaaaatcctgtcctttctccacccctcaccccttattggccctggttcccacagtcacacccctctccctctgctgctcccacttcgtcccaccactgcctgactgtctctyggctccccatcccatccagggtgcaaagatcatccagtctttcctctggtatctcaatccccgacaagtcttcgacctgagccagggagggcccaaggaggcgtaagtacttgccaaggttttgtgggggacatgggggggarcttgcctcactcctggggtacagcacacatcccctgaccccactgccatcttcccatgagcccaggctggagatgtaccgcaaagtgcacaacctgcggatcctggcgtgcgggggcgacggcacggtgagctccccgcatgggccagccgagcaccagggctgggcctgaagccggggtccctgtgggcctgatttgcctctgttcttcctcccccaggtgggctggatcctctccaccctggaccagctacgcctgaagccgccaccccctgttgccatcctgcccctgggtactggcaacgacttggcccgaaccctcaactggggtggggtaagcacccataggaggggggtgcagctggggcctctccagccacagagggctcagtccctgcctgctcccccagggctacacagatgagcctgtgtccaagatcctctcccacgtggaggaggggaacgtggtacagctggaccgctgggacctccacgctgagcccaaccccgaggcagggcctgaggaccgagatgaaggcgccaccgaccgggtaagttggccagggttggtggggggcagggcaggtgactggggactggatcccacttttccacttgctggttctgggacctcgggcgtgtctcttcatttctccaacttccacttcttccttgtacgatgggaataatagtacttgcctcacaagatgctgttttttctgtgttttttttttgttttttttttttttttttgagactgagtctcgctctgttacccaggctggagtgcagtggcgcaatcccagctcactgcaacctccgcctcccaggttcaagcgattctcctgcctcagcctcctgagtagctgggattataggcaggtgccaccacacctggctaatttttgtttttctgttttcttttttttttcttgtttttttttttgtttttgttttttgttttttgtgacagagtctcactgtcacccaggctggagtacagtggcacagtcttggctcactgcaacctctgcctcccgggctcaagctattctcctccrtcagcctcctgagtagctgggactacaggcacccgccaccacacccggctaatttttgtatttttagtagagatggggtctcaccatgttggtcagcctggttttgaactcctgacctcaggtgatccatctgcctcggcctcccaaagcactgggattacaggcatgagccaccacgcctggtcagaagatgctgctttattccatagacatgcactgagcgcctgctacctgccaggcacttctctaagcagtgagcaaaaccaagcctcgctgttgtgctccacatggcatgtcaggaagaagtgttaggggagctgacagggaagagatgctgcaggcacgcagggaaatcccccaggagccaccaggcagagcagggctgtgcctgacagcgggtgagctgggctgagccctagcggacgctgctgaccaggaaaagcctgtgaacagatgggctgagctggctcggccacacgaggcccctggagcggggacatttgtgaggcccagccctcattttggtcccttgacctttttccagttgcccctggatgtcttcaacaactacttcagcctgggctttgacgcccacgtcaccctggagttccacgagtctcgaggttggcagcctcccactgaggccagggcagggtgggcacaggagtgtccccgggaggktcagaccctgctcccgccagtgaaggcatccatcccagccctcccccaaccccacctgggcaggctggggtgactcactggyccccactgcttgtctccacccagaggccaacccagagaaattcaacagccgctttcggaataagatgttctaygccggggtgagtggggtctgcacccccgcctgtgcccacctcttctaccacccgtgcccgtgcccacctgtgtccaccaggccccaggagccctgccgggtgctggtgaggaaagatctctgtcagcagatggtgacgccctctgtctcccacagacagctttctctgacttcctgatgggcagctccaaggacctggccaagcacatccgagtggtggtgagcggggccaggctgccgtgggtgggtgggccggaagggagggaggcggaggccacctggcacatgcacctcaacaccctccccgcccgcctccagtgtgatggaatggacttgactcccaagatccaggacctgaaaccccagtgtgttgttttcctgaacatccccaggtgaggagggggctaccggagctggggggagccctgctgtccttgtcctgcagagactgtgttttgaggcccatgtcatcgcccgccttygcaggtactgtgcgggcaccatgccctggggccaccctggggagcaccacgactttgagccccagcggcatgacgacggctacctcgaggtcattggcttcaccatgacgtcgttggtgagtgggccctgggcccatggtgcctgggagcacagcccaaaggtggaaggggtcacccatactcacctccatgggccacggcggcctagttcaccctcacctcccttctttgtctcattcctctggcttgagagcggcacctaccccctctcctcactatgcctcgggataccttcactccccactctgactggagcgtcaccctcattgcctctgtcccttccctttcctacctggggtctcagcctcccctctgccctctggccaggggtcactctcacctttgttctctggctagagtttctgcttcggaaggagcagagtctgggacccccctgcccccagccctggtgccatctgacccaagmttcctgtgcccacaggccgcgctgcaggtgggcggacacggcgagcggctgacgcagtgtcgcgaggtggtgctcaccacatccaaggccatcccggtgcaggtggatggcgagccctgcaagcttgcagcctcacgcatccgcatcgccctgcgcaaccaggccaccatggtgcagaaggccaagcggcggagcgccgcccccctgcacagcgagtacgtcccaccctgccacgtgccctgggtgccaaggccagaccctgccctctctgggccttgatttccccatctgtaaaaggggctgactgtccctctgccccaggggtgttgggagtggagcgggaccttctctcggcamgtggtttggtgccaggccgagggtggcaccaaggcagggcccttgctgagcccccgcttgccggccctgcccgacagccagcagccggtgccagagcagttgcgcatccaggtgagtcgcgtcagcatgcacgactatgaggccctgcactacgacaaggagcagctcaaggaggcctgtgagtgcggtggggcggcctggcagggtggccaggaggggctgaagcagccggggcccccttgggcagggctgtggggtgcagccagctgctgacaggtgctctgttctccagctgtgccgctgggcactgtggtggtcccaggagacagtgacctagagctctgccgtgcccacattgagagactccagcaggtaaggggtgggggcttccccaggtgcccaccgagagggtggtgggaagtgaggccaggcctcttcctcccgcagccagctcgccctgcggagcctcctctgtgctggttccccctactccaagttcccttccctccctggcccccactctatcccagcctggcctttgcttctctcaacaggagcccgatggtgctggagccaagtccccgacatgccagaaactgtcccccaagtggtgcttcctggacggtgagtctactcccagggtgccaagctgtttcgtgttccctccctaggggatcccaggtaggggcagcagaggacctgggcctggacatggcactccctgatcctcagctgccctctctcccacagccaccactgccagccgcttctacaggatcgaccgagcccaggtgagcgattgcaggcctgctccagccacagctgcttccgggccccagggtcgcctctcctgggacgccttccctgttagctcccccgatgggytcacctctgtcctcatgcctctgagagcttttactattgcctgtgtgcatggacagcgtgcrgccctgccctccacactggagagtatagggcggtgccagccagaaaggcagtggggtacctaccaaaggcttgctgggtgggtaggagggcctggaagcccagagccatccagggagacacagaagcaaaggcattctggtcaggcgccagctcacctggtaaagtctgggcagtcggaggaggtgtcaggaatgggaaggagtgggagagggacaggcagggccccttgcctggccacctcctttcagtgtttgtgctcatggcagaggcttctccaggtctaccagccttgctgcccctcggcccccaccgtcaggtgccctgacctcccgccctgacctccccccacaggagcacctcaactatgtgactgagatcgcacaggatgagatttatatcctggaccctgagctgctgggggcatcggcccggcctgacctcccaacccccacttcccctctccccacctcaccctgctcacccacgccccggtgagtcctggtgtcccgtccctccagcccctggctttcagccccacctgtaagccgatgacttctgaatccctgcttctagcccctccaccagttaactaaatggtgtcaacctgaacctggccaaagcccacctgacggccttcagccctgtggttctgtggggaagcggcctcacgtccaccctggttccctccctgacttctccctcctctggacctcatccttcagccagtcctggcagcccccggacccaccacctgagcactcctccccacccctactgccaccagcccttcccggctgccacgccctggcccccagctcttatatccctgtggccattcgtgccctcgaacccccatctccataccacggtcaactaaaaatgcagagcataccaggccactccccaacctagaagcttctttctcagcagccctttggacgtggattctccccaggccccccgtcattgcactgggctcccagccccctccctgagttcacctccatggtcctgccccactctcttctcttggttctttgaggcatcaggtgtttgccaccactggacttctgtcatcgctgcctccaactcttcccccatctttccggagctcccccacccccatccccttcgaatctcagcttggctgtttcctccttggagagatcactcccaggaccccctctgcaggggtgccacatcacctgttctgaattcttaagagcacccctgctctcagaactccttatttatttgacttgtttgyatccctgaactagaatgtaagctccatgagggcaaggccttcctctgtctcgtttccctgctgtatccccagtgcctggaatagtgcttggtgtgtagcaggcactcaataaactgtggaaaggatgaagatgcccccagttggggttggggagggcgaccagctggcctgtgccgtagccggtcacagcacatcatgctctgttgcaggtcactgcaaggggatgctgcaccccctcaaggtgaggcctctccctctggggcccctcctttctgcctggttgggggcaggaggctcagtggggtggggatagggcccagacacagccttacacaaacacagcctttgagcttcacgcaccaacggagccctgggcacacatgcctggccggcacagtcctgtccactgaggcaccaacccaagcccaggcctccgactgcagagtaacaggcaggtattccgtgcaggtgaagagctgattgaggctgccaagaggaacgacttctgtaaggtactagctccaggctccagttccttcccccagcagctccctcgggccctggggagcgaggcctctgggttgggccaagagctgacctgctcaggtgctgtcatctgtcatcgtctggccctctgtgggatctccagtgatcgtcccattccacttcactgtatctctgtctaggccacaatagatggctcctagtaggggcttcctrgctcagtccacctgtccctggtgcttagaaaggagcaggtcagaggaagcactgctccagggcttggtcaccagtgctgccagagagcccacaggctgtggggtgagaggcccctcctccggtgtgctccagagagacccacagaggcaactcaggagtaagatgtgtgagcgcactcgtttcaggcctgtgctggtgtacccggctgtgggccagcgtgtgagctcagggaaggaggggtggccccaggaggtccagccctgccatgcctcctgccctcagctccaggagctgcaccgagctgggggcgacctcatgcaccgagacgagcagagtcgcacgctcctgcaccacgcagtcagcactggcagcaaggatgtggtccgctacctgctggaccacggtgagccgggcagtggagcccagggcctggggccaaggtgggaggaggaggggctgccaggcctctctgaccaccacctccccttctccagcccccccagagatccttgatgcggtggaggaaaagtaagtatctgggcagtgcagaaccgtggtcaccccggaaaccacccttttccccacccctcccattttgtcaggtcagagcccataaacttcctggtcacatctgtcatcccctgggccacccctattgccccagagccctgaacttcctgccctttctgatggcccttgggagacagatgggtggatcaggggacgggatggggtacacagccagcccctgctcccccagcggggagacctgtttgcaccaagcagcggccctgggccagcgcaccatctgccactacatcgtggaggccggggcctcgctcatgaagacagaccagcaggtgagcagacggcaggcagggagcccacgagggcaccaaccaaacctttcccaaggtcctaggcgggagctggggctgggggctgtccctgggaagacacagtccagaccctgggaaacctgagccagcaggggaggagctggtgggcagagaggcctccctccctgaccaggccacagggaggtagagcccctgcctctcagcctgctaggggttaggcctgcctctggcccctgctgatcgcagctccgccctcctccagggcgacactccccggcagcgggctgagaaggctcaggacaccgagctggccgcctacctggagaaccggcagcactaccagatgatccagcgggaggaccaggagacggctgtgtagcgggccgcccacgggcagcaggagggacaatgcggccaggggacgagcgccttccttgcccacctcactgccacattccagtgggacggccacggggggacctaggccccagggaaagagccccatgccgccccctaaggagccgcccagacctagggctggactcaggagctgggggggcctcacctgttcccctgaggaccccgccggacccggaggctcacagggaacaagacacggctgggttggatatgcctttgccggggttctggggcagggcgctccctggccgcagcagatgccctcccaggagtggaggggctggagagggggaggccttcgggaagaggcttcctgggccccctggtcttcggccgggtccccagcccccgctcctgccccaccccacctcctccgggcttcctcccggaaactcagcgcctgctgcacttgcctgccctgccttgcttggcacccgctccggcgaccctccccgctcccctgtcatttcatcgcggactgtgcggcctgggggtggggggcgggactctcacggtgacatgtttacagctgggtgtgactcagtaaagtggatttttttttcttttctgcttttcttcttttgcgggggaggtctaacaagcagcgggggctgcggggttgtcctcggggtgggggactggacgctgtcgacagcaccttcctggggccccggctcccgtttggtggttggtcccagggcctgcccggttcctgacctctgcccggcggccgcgctcgtcggggccgggggcggggccgatccctccggcttcccgcttcccgcggagaacaacaatgaaagtgaaagaggggtggggcgggggcgagcccgggttctgtggcccatttgccctgtggccttgagcaagcccctcccccaggcctcgggggctctcccggtttgggggaaccgggcgaggcaatgccacaggcccagggttagagggggtgggcacttgcagctgccgatgtggctggatctggaacttctcagacggctcctgtcagcgccaagtttcaccaaatccaggcctgcgggctcctcccccaggacccccactcgcagtccctcaagcctgtgctcccggaaaggcactgggcgaccgcacccgtggctttctctgggcgaccgggtcccagactccccccagcacagcagagcgcttccctgcccacccgcggaaaccgccccaggtgggccgcgccccctccccagcagccagcagggcgccagggctgagccggccgtggaggggagcgggtcccgcgggttatacaggcgccggggctccgcggcaggcaagagaagctgaggcctgagaacggcccgggccttggcgtacggcaggggacgacctgggatgggggcagcgggcggcggcgcagggagtgggccgggggccggtgtgcgcgggcgggacggggcccggggtcgggagaccaccgctcggaagatggggccgggagaggccgccgtcgcagcgcagagggcaccggcggggagacgcgaggacgcggggccgggaacacggacgccggagtagaagcgcggggggcgcgggctggagcgggggcggggacgccggggtcgggggcggtgcgggtttgaggggagggggcggggcgggtccttccctgggggggtggggagagggggcgggggcccatgtgaccggctcagaccggttctggagacaaaaggggccgcggcggccggagcgggacgggcccggcgcgggagggagcgaagcagcgcgggcagcgagcgagtgagcgcgcggcggcccctggtccgcccggccgcggccgatctaggggctgggggctggaggcgggggtgggggtctgagctgcgtcctgggctcgaggcgtcccccggggagtcgcctcttagcggtgcgtccgggctagcggcgaggggccgccccaagtcttcccaccgccgccaccttagcagcccgacttggggcctggaaagtggagcacgcggaggtgggagggccctgcacgcggcccccggtggggaaggggacgggccagggattcagactcgggctctcccctcaggatgcagcaccgaggcttcctcctcctcaccctcctcgccctrctggcgctcacctccgcggtcgccaaaaagaaaggtgatgggggatgatcgaaggagggctggggacgggcaggcgaggcccctccacttctgggctgggccgcctgggttcctagcctggaaccccaggaaggcggctcccgagggagtctccccgtgccccagtcctgaactctgttcctcgcgcgttgtagataaggtgaagaagggcggcccggggagcgagtgcgctgagtgggcctgggggccctgcacccycagcagcaaggattgcggcgtgggtttccgcgagggcacctgcggggcccagacccagcgcatccggtgcagggtgccctgcaactggaagaaggagtttggaggtgaggcggggcgcagtcagagggcaggagacggggggcacagcctcgccgaagcctgggcggacccttggcggagggcggggccgcgggccgcgcagcgctgacctgggccgctctctcgccagccgactgcaagtacaagtttgagaactggggtgcgtgtgatgggggcacaggcaccaaagtccgccaaggcaccctgaagaaggcgcgctacaatgctcagtgccaggagaccatccgggtcccccagccctgcacccccaagaccaaagcaaaggccaaaggtcagcaaaagaaaaaggggggggggctgtccggggggggctgcccccccccccccgcctgtgaggggacaattccaagttaaaccttaagttttgagtcctggccagtggcttcctgacatcgcctcacttggcttccctgcctggaaaagtctgaagatgggcactacaagagaggccgcaggtgatgctggggacataaatcctccctggcccaaatagggaccaactcaaactactccattggagcatctggcttaggacccagggagagtgtcctggaacggcttgcctttgtcagctctccagccacgggcagcatttggtcagctctgccctttctagtgttgggaggaggtcaaggcccaccctgggcctctcagctcactcgtgactcagcccagcgaggccagcagggcaggggtgaatctgcccgcttctcaggtgaggaggctgaggatgcccagggctgctgtgaccaggactaggactggaaacttgaaggttttctgatcccaagtggaaataggaagctggggatgtcccatgtccacatcacaatggctgccccatcccctgcttccgagtcagctgattggaaaccactagggggcagaatcttctccttccctgatgcccgggtgtttgtggagccggcggtctgcaatgggtcagcctaactgctgatatggtattaatatttctttcttgttttacagccaagaaagggaagggaaaggactagacgccaagcctggatgccaaggagcccctggtgtcacatggggcctggcccacgccctccctytcccaggcccgagatgtgacccaccagtgccttctgtctgctcgttagctttaatcaatcatgccctgccttgtccctctcactccccagccccacccctaagtgcccaaagtggggagggacaagggattctgggaagcttgagcctcccccaaagcaatgtgagtcccagagcccgcttttgttcttccccacaattccattactaagaaacacatcaaataaactgactttttccccccaawaaaagctcttcttttttaatatataaaagccccttcccaaggagtttgctgtggaaatgtgtttgggagtgggaaggtggggagaaagaccaggctgtagggactggtgggtttcagggggcttggtggtgggtgctctccagagctcatggaaaaagcagaacaattacaaacatttcttccagggcccctgaaagggtgctccccatcaagtcacctaagcctttcggtcctcatctccctcagggaccagggctggggaagggaacctggctgactcactggaaccaccacacccatctcagcctcacccagtcaaaggtcttttgatacaacccacagccaatcaggaaggttctacccatgggggagagcagatgcgagggctgcgtgcctacctcactgcccacctccccccttcccactgtcatggaaacccgagtgagccaccaggttgacccctttcctcttgcctgtgtgacccaggcctccaccctgcagaagccagggggtgagaggtttgaagagggcagatgggaatgccatccaccacagcctcaccctgactcgatgtgtgacctgggacagccttctaaggccggggctgcagggggctgtcttctgaatacgtggaccactcacggctcagcctgggatcgcagaaggccagacctcagttcctgagacagaacctctgacctcccagctgccccatcttaatgtgacaagggcagtgctgctggggcgggggggacctggcctccatcatacccacccagaacctggctaagtagctgcagccagaggagatttctgcccctggagtgggatttggggagagggggctgagcctacatgcggggtgcaagggggcagaaagcaccgattacagcagaatgggggaccccacccttctactcccttcccaagcctccttttccaagcactggcccctttgttcttcctgagggggccctgggcttcggcccccatccagatgtccattcttccagcactgctgatggttggtcacagtggggcaggtgcccacccaggccagtgccccgcagctcgctgaagcagggccacagaggtgggccaggcagccccagttcagacactccctggggtgagcctcctcagcctgagcagagatctggtctctgaatgcagccacagagcctcttctgaacttcctcctcagcaaacgtgaacgcagaatggtgcctgcaactcttccccacagcaagtgagccgtgtggtccccccagcacacgcacgcaacaccagcacctcctagggcactcctgcctgcctacctggcagtgccgatgttccgatactggcacagcagcaggtgccggaaggtctttttaaaggtggcgttgcacagagcatagcaggcagggttgatrgtgctgttgacgtagcagagccagtagccaatggaccacaccgtgtcagggatgcagctctggcagaaggtgttcaccaggaccatgacrttgtagggcgtccaggtgaggatgaaggctagcagaatggcaaagatcgttcgtgtcactttgcgctcccgggccgccatctgccgcttcttgcgcacctggttgcgagcgatgctggcgaacttgcgggccacgttggccgcagggcgcatgccagccggcgtggcaggcacaatctcaatggctgtcacacactcattgcctgtctgcttcgtcacaatctggatcttggaccatctggaggctgggttgagggcccgcggctgcaggggaggggcgggcatggcgggcgtggtggcctctgtggtggacagctctgtggctgggcgttccttggtgttctgggtggcactgcctgagctggactcattggaagtgtccttatcagccacggggcgcggtggcggtggcagcgctggcgggggggcctcctccagcttgccattgcgcagctcctcccgggcggcctccccgggcgggggcttcttgacgctctgcttcattagtgggctcttgaggaaggccagcgtcttggctttcttctccttcgggccctcgggccggtgcttgtggactcggctgcgactggccagggagatgtggatgtacagcaccgtcatgatgaccacaggcaggtagaaggcagcaatggctgtgccaaaggtcactgctgggttggacaggaactggatgaagcactggttgtcgggcaccgtccgcttacccaccacaaactgccagaacaagatggcaggcgcccagagcacgaaggacagtacccaggcagcagcaatcatgaggcctgccatcttggtggtgcgccgggcagggtaggtgagaggcttggtgacgcagaagtagcggtcaaagctgatgatgagaaggttcatgacggaggcgttgctcaccacgtagtccagggccagccacaggtcgcagaccacggcgcccaggggccagtagcccttgatgatgtacacggtgtagaggttcatggagaaggcgcctatgatgagatcagcacacgccaggctgaagaggaagtagttgttgactgtctgcagctgcctgttgaccttgatggacagcatcaccaggatgttgcccacgacagtcaccaggctcagggagcctgtcactgtggcaatgaagaccatttccaccgtctcatagcgattgtgggatgatgacgtgaccaggcgcacggactgattgcccgagctgccattgacaggtgtgaagttggy

SEQ ID NO: 94390 - DNA, 171134 bp, Homo sapiens
  misc_feature (1)...(171134): n = A,T,C or G
tggcctacccgctgggacccgctgagtgagacgcagggctgagctggcccagagcacagtggggagaggactcttgttatataatagataacgacatggcttgcttgagcagatcctgtgaatttctccagagccaccatattactccaacacactcccacactgcttctttcctctacatgcacctaaatggtgtgctttttagggggacagggatgggcaggactagctgaataatgtgtgggacccattgcaaaatgaagtgtgtgggggccctttgttcaccaatgattaataatttcaggcagggcgccatggctcacgcctataatccctgcactttgggaggctgaggtgggaggattgcttgaggccaggagtttgagaccagcctggacaacatagtgagacctcatgtctattttttaaaaaatttggctgggcacggtggctcacgcctgtaatcctagcactctgggaggccgaggcgggtggatcacctgaggtcaggagttcaagaccagcctgaccagtatggtgataccccgtctctactaaaaatacaaaaattagctgggcgtgatggcacacatgcctgttatcccagctactcaggaggctgaggcaggagaatcgcttgacatgggaggcacaggttacagagagctgagatcacaccactgcactccagcatgggtcacagagcgcgacctctgtcttaagaaaaaaaaatcaaaatggtggcctcagagcattaaaccaagagtgagacccttgtagacacaggccctgtgactgcagaggtttcacactcacgaagccagcccttagggtacgaacagacaccccccagaacactacctattaagaacttcggacaagaaacttccttgctgtcgtagaaaccaacagtgcagtcatgcggctgtgaaggtggaaggtggggaatcccaaaggccttggtttcatcatcacagaaaacctcatcaggaaggtcaagttgtcgggactgtgagagtgctagtggcatctgggtccatgttgctgagttcatcttgaccttcctgtattttgggtaggtgaacccctaagcccctaagtacctacctttgctaagctcagtgaaattggatttctgacatttaaaaatatagcagtgttgagaatcctggactttatccagtaattgggagaggatttgactcccttgcctggtgggaagcagggtggagtcaagaggagagggcatgcggggtgagtattggggacagagccatttgttggaagataagtctgagactgtggcagttaataaggtcattttgagaaagggagtccatactgaggtgttaatccagggctccagctgaactacaaaaaccaaggtctggagggagatggatacaggtgcacacctgaactctggaggtagaacgagggtcctcccggggttttactcctttactattctggccccagaggtgctgctccctctaaacttacagttttcccttaagggtggtcacttggtcccccccttatctaaaaaaggctggaacattcaagaacactttactaaaggcttggaagtaccaagagaaataaagataagggtgcccatgaatctggagatgaccgagaggcctttatctggagatggctggaccccccttttctaggagcagagaggggatccagggagttctctgttttagtctctcagcttctggtggcctctctctctttcatttcccctcatccattctggagctgagggggtgaaggggataaaatacctttagatcaagcaattccacttttagttcatcctacagaaaaagttacattcaaggatgttcactgtagctgtaatattgtaatagctgtgcgtgtgcaagtgtgtgtgtgtgtgtgtgtgtgtgtgtaatatattttatgtagaaacaggtctggaagcatacagtccaaactgttaacaatagttacctctacggaaggaagggagtggggaaggaagagagactttcctttgcctctgtacactttatatacttctgcttacttcggattttttttttttttttttaccatttttccattatgtattcatgtgtataattataaaatgtgtaatttaaaaataatgaaacttaaaaatcatattatacaaaattttgaaagttcgaggaaagaacatgaagtcagataccatagatttgtagggctgttaatccccatggtaatttcattttttccaccagttttcagcagtctgggggcaggactggaggaaggtgatgttaaatggacccgggagaaggcagctaaggcacaggggcctagttgttgttctaggcatttgacatcagtgagcccatttactctctgaggtagatagtagtcctagatttacagtggaggacagtggctgggagagatgaagtcaggagctcaaggtctaattgatggcagagctgggattcagacctcagggtgtggagctctctcacttgtggctgcctccagcatggttcaatgggggaaggcaaggaaaggaagacaaagaactgggtgcaggtggcacagtctttgaatggctgacccctgggtggagacggagatcaagccaggagggagaactggctgtacagaggctcaggtttagtagaagaggtgtggaagcagaataggtttggattttagacaggcaaagctgtgagggacccggcatctgcatgcctttaatgaacaggtgaggggggccatgagggctaaggagtctcctgggaatggactgacctataacccacaaatctgtgccagtcacaggggtaggagggaggctgggcctaggtcctttggtttatctcctttcccagccccattgacctcatgctcaagtcctggagtaagaattgaagcagacattcagctacaagtctgagtcttgtggaagtcaagcagttcgggctgggggtccctatacccgggcaaaatggattggggcagctggtgaagcgtgttccactttgtgccacggaatagtgaggctgaacatggctggtgtggtggaggcagcctaccttccagcagtactgggattgttcatgagccctctagacacctggtagggataggattctttgcaggggcctgggagtcttgggtgactttgtgggtggcacacgccagtgaggtttgggttacttctgtcagtgtgacccattttcagtccactgtcacagggtacagaagtgttcagggacctcaaggtgcaggttagagccaggggaggaggggtggggtggaattgatgttaggtggttggagctgagaggaagcctgtgacttcctggagtgtcccaggctgaggttctgtgtatgggaaaaagtgggctgagactccagaagcaggcagatgactcctatttttcctatctgcttctgcatcattcatagccccaggtctctaagtctagggtcccaaaattgcagaactggaaattagttacagctttccgggaacagagagggtaagtgaccagctcaggacagcacaaggcagtccgggcagtcagcaaggtgtggggcggtgcacacggggcttttcaggccagctgatcccccagccctagtccccaactccttcatttagtgcatggcccaaggaccaacaagggaggcgggacgccgaggtcctgcctaggaggggagggccgagaggactagagctgcttggagccccagaagcggcaaggtcagcgccgggagtcgtcaaggccgtacttctctgcagggcggggaggagaggtcgcgctttaaacttccatgaactctgttggttccaagcattttctccatgaagtatcctttatttacaagagctccagattctacctggaaaaaagacctcttaaaattgcagagcaaaggcagaaaaaaattatacgatttaggcggaataaagagtgatgtttaaaaatcttttcctttgttttttaagacatcttcaccaagccagtagtacttttataaggcagagaagcataaatattaatattgcttaatgggcttaaacttggtaatagagccacgtgccagtggttcggggcagtttcgccagtaacgtgctctcgggttaccctgctcgggccagagatcgaggctccggggacccggcacctgaacctgtgctgcagtcccagcgcgacagcagggaatccagcccgcagcacgcctccgggtctttgcagtagcckggccaaggcgggagcggctgcctytcagggtcgctccagggccgcgctaggaaaggtgtggacggtcggagaggacaggaaggagccggctgcaccgcgccagggtctccgcaaaccgggagcccagggagggcgggaagactggcgggggtccgaggcagcccgctacaggatacgtgatggacgcccagagacaccgccctccagctggtgggggaggagccccagccaccaagaagttaagtgactggcccagttcacacagcaagctagtggctgtgtgcgtgtccggggtcctcatgggccccaggcctgcaatgcgtacgccccttcccctggctctgcctttggggtctcggacgcccgactagcactttggttaaaatgagaggaggacgggcgcctgcagcctgcccggtgctgtagctttgcggccgccccggcgcctgtgtaatccgaggcgtggcgcgccaggttttggcctgcgagggagcgcacgtgggctgcggcttctcgcggacgcccaggccccacccacccgggacccggcgcgcggcgccccagtttgactttcactacccccaaaggaggtctttccaccggcctcttttctgggtaacagctccagggctcacacttggtgaccccaccgaggtcaagtagccgctaagttacggagccggaattcgaatttggcggtcgggcttctggtggcctcgggacggaggtggctgtgtgtccctgggcaagtctctttccttctctgggtagcccagtcgggcgccccgcctgtcgtcgccgcgcatgctcagttgcgggcggcgtccggaggaggtggcgggcgccccagctgctttgcattgacgccagcacccgctggaggtcaccgctgggggctcggcgcggcacgctgccggcaaaacccggcccggatcacggagccggagccggagccgtaccgccagcaactcctgggtgcgcgcagccgtttctgcgcttctcgacggtgcggccccaggccccgctggagccgagctgctcccctccctaccctggcggacgtggcccggccgctccgaggggtttccctcggaccccgcgcctaaaccccggccagcgggagcgtctaaggctagccttgtaccccaccggcactcggcctgggggggcttttccgcgaggcggcggcccagcgggcggagcggcgtgggtgtccacatctaggcggagtctggagccgnnnnnnnnnnnnnnnnnnnnnnnnnnnnnnnnnnnnnnnnnnnnnnnnnnnnnnnnnnnnnnnnnnnnnnnnnnnnnnnnnnnnnnnnnnnnnnnnnnnnnnnnnnnnnnnnnnnnnnnnnnnnnnnnnnnnnnnnnnnnnnnnnnnnnnnnnnnnnnnnnnnnnnnnnnnnnnnnnnnnnnnnnnnnnnnnnnnnnnnnnnnnnnnnnnnnnnnnnnnnnnnnnnnnnnnnnnnnnnnnnnnnnnnnnnnnnnnnnnnnnnnnnnnnnnnnnnnnnnnnnnnnnnnnnnnnnnnnnnnnnnnnnnnnnnnnnnnnnnnnnnnnnnnnnnnnnnnnnnnnnnnnnnnnnnnnnnnnnnnnnnnnnnnnnnnnnnnnnnnnnnnnnnnnnnnnnnnnnnnnnnnnnnnnnnnnnnnnnnnnnnnnnnnnnnnnnnnnnnnccaccgcagccgccgccgccgcagcgcccgcaccgcgataaaaggggcggccgcgtttcctgacgcgagatccgcgctcgccgccgcccgcccaggcggcgatgacacggcgcccgcggcggcccggaggcgccgggtgggccgtttgctgaccggatcgcggctacccgccagcgtgtccgcggcgccgccgccagcatgggctgtgccccgagcatccacatttccgagcgcctggtggccgaggacgcgcctagccccgcggcaccgccgctgtcgtccggcgggccgcgcctcccgcagggccagaagacggccgccttgccccggacccgcggcgccggcctcttggagtcggagcttcgcgacggcagcggcaagaaggtaaggggcgccgggcactctggggccgccgcgaaactcgggcccggccagtaagcaactttcccgcaggggccgggcggggtcccccccacccggcctcggtgccctcttgtcccgctttggatggttctgattgacgccagtctcccgccttgccggggcagcgttcagagaaggaccgacccaggtcccgcgaccctgatttcctagggttgcgattaggacgccgcctgtgtcgcggcgtcggttttttggacacatccgactcccggagcggcggggcccgatgtgaagttgactgaggcgcttgcatcaatttcctctccaagagcgggtgtttgagggaaacccccaggatattctggcgcgcccctgcaatgttaaatcagtgtgaactttgttcttttcctgtggtagaaagggaagggcgactggcctcaccactcttttccctctgtcagctttgcacatgcagttgcaggttaccattttcttcgggactgctagaatgtaatctggaacatcagctttgcttcattgcacatgtatttgaggtccacgtttattagcatacatactgtatttaaagcatatgtaattagaaaatactgtgaaacgcgatttttgaagcattcagcagaacaaagttaatcttttattaagccgacttactgggacattttgtgactggggttttttgtttttttacattgcgtgtcttctccagcgcatgttgccttggcttatgttttgtcaaagtttctgggcttagtctttgttgaggttttctaaaggaaagttaaaaaggaaaaagaaaaacgtgatcattaaggcacacagcagcagctttccagttctctcatttcagaatttaaagctggaactcatgcgttggtttatgttttgttaaaccagtaaaagacaacaacaacaaaattcgtgcatggctgcagattgttggctgtcatccctctcatcacgaccagtttttgaaagagtaatttgcaaaatttgtttgatttttccttgcttgctgagaactgctgaacctccgaagtttgagggatatagtttgatgtactttctgtcttacatttctagcagtcgtcatgatactttttctgtacgaaaggggaaagtctttttcagtgttgcataacagttgatttccccaccattcccataccctaagtgaaaattcaactttgttctgattatcagaaattgaattccttctcctatagattctttaaagaaacctctgatggtttaggcttactaactcaaggtgctcttaatatcagtgttaagctgtgtgttaagcctacttggctttaaaaaagtgttacacaggtgcatatggaaactttaacagctttcaagttttcagtccaaatctaacattttgcagactaatgtgataatttcagattaccaaagtagcccttttatagtgaggggcctttgtgtcttacaggctttttttgtggtggattgggtgtcctaaaattcacctaggtgtcttgtaagcctccccagtgcagcagcagcttgctcttgtgctatcgcagtgccgttaggtccctgagtttttaagtacttacttcaaccattcttctgtattggcagaccattgtcttgtgttgggggctcagaaaatactttcatccttaaagtgcctaacccagtggcatacacatagtaggtactaaataaatgtttactgatttcttaaaaaattgttaactgattgatgaaactttttcagtcattggaatttgatttcataaagcctcctatgtagacttcaaaataatagtatttccagagcaggagtcaaattataaattataacaccacaaccacagaaataatagccccatacttgttattcatgaactgtacatgttgatatctcatttacagttatttgcatttaggcatgtcagatagtagagcagaggtaaatgtcagcattttttctagtctaatattttttctttgaaaatgaatctttttaaattttaagatattaactatgctctggaaattcatgttagagaaggcaaactgctagcaatttagcaaaattaaatcataaaattagtttctttgtattatctcaagatgcaatttaattcattacaaaatttcttattaaaactgtaagtcagcatatctttaagtgaatttcaacaagaaattcattgggggatgcttttatagtcctacagcatttagtaaataccagtttatcagtgtgggtgggagattgataactaattgcatttttaggttaagcagtatgtactttgcgttaaagtgtatcctgcatgtgttctatggaacaatatgtggactgttagtattgtatgagaaaagagttccgtggtctggtaagtttttgggaaatacaggttgaatatccctaatcagaaaatgagaaatgttccaaagtctgttttgagtgctgacatgatgctcaaaggaagtgctcaatggagcatttcagagtttggattttcagattagggatgctgaactkgtaaatataatgcagatattccaaaagccaaaaaaaaaaaatccaaaacacttctggtctcaagcatttgggataagagatatgcggcctatactggctcagactaagttcaacagagttcttttatgtagggcttgtcagagaacctaatttctgaaagtaatctgtgagtctccaagtggtttttagagtgtgcatcatttcctaaactagttgattgtggagcccttttcttgaggtgtatgtcaggcaggccacatgttaagacctgattctttatgtgagataccaatattcaaagtacaagaaatataattaacagtaaaactcaacgaatgtaatttgcttcttaatgattccaaaggtactttagatcttgcaatatattaggctgggttgtctgtatgaacttatttaagtattactaaaaataccctctgtctgtttattcctttcgggagtttaagtttatgtggttacagataatgaatgctgtgttcagtttgaacacttagagttttgtttatttttaatcagtgtgagtgagccttaactgtaacattttaatattttcttgccagtctttggatttaccccatttccactttccctagccaggacttgagttgcccttgaaagatttgcatgtagtgttagagaccctatgctcaccccctatcttcctttttgcaaacacccactgcactgctaatgattgatgctccccacaccccaactaatcaactctgtgagatggcagtcatgtttgttttgttcactgctgtatcccccaggcctgatgcacagtaggccttccgtaaacgtatgttgaattagagaattttgtgaaccaggctgtcaagttgaaaatccacccaggccaggtaagtagaaatagaagccagttttaaccagagtagaggctgtaaagtttggatttggttttgtggaaatctctggttattgctcttcagagcactgtacccagggaataatatatttctaccctgttgagcagagtagatttccctgtaaagaaagattaaagaggctgggcgcggtggctcatgtctatagtcccagcactttgggaggccaaggcagaaggattgctagagcccaggagtttgagaccagcctggacaacatctcaagactctgtctctaccaaaaaataaaaaaaattagctgggcatggcaccgcacacctttagtcccagatacttgggaggctgaggtgggaggatcacctgaggtaagaagttcaaggttgctgtgagccgagagtgcgtccctgcactccagcctgggcaacagacagaaaccctatctcaaaaataaataataaataaaagatgtaaggattagtgcagctaaggtgatagataatagtacagctgcaagccaacctctaatcgagtgttactgctgtcagcactcacttaaaatctcagacattctctagttggtccatttctgtttccctttgcttctgtcattcacttccttcaacctcttttctcttactttgcatcacctcccgtcccacttccatcttcctccttgcttttttctgctagcccaccttcctgcacaaaactggccactcttgccatcttagtcaactaaagtttagtggtttccaaatgttacttaagtaacatttggaatggaataaaatttattgcctgctcctagtttacaaagtggattagtcaaaactttttttttttttttaagacagcgtcttgctttgttacccaggctggagtgcagtggccaaccatggctcactcagccttgacctcctgggctcaagtgatccccccacctcagcctcccaagtaactgggactacaggtgcgcaccatgcatggccagttttttaaactttttttttgtcgagacgagatcttgctgtgctgcccaggctaggctcaaactcytgggctcctgtgattcccccagcctcagcctaccaaagtgctgggattacaggtgtgggttactgtgcccaactgattactcaaaattttacatttggctaaactaaagcaattttctctttgtgtgtgacctgactgatttttttcctccagtaggggtctttgacccttgctagattatatggaattactgaaagtttcctttgaaagtgtagttgagaaaaatgagaccaaactttctgctgccatagtaagtgactacagtttatctctagagctcaggggttgtgagttccctcattgtgttcttgtgcttttcagtatatagaaagatatttctttattcattttcttgaattccttttacatacataaaatactttgcatttatagcatatgttttttagtacttactgtcattgccaccataactttaagtgtgattcttaagatagacattgtcacaattctgttacctgaaacctgtccctgaccagctttgaccctcgccttgctgaggtaaggtttatgatagggcctgtggtcccttctggcgcaaatgtttcctgtgaagtggcttatgactggttttcccttggatagcttacccatttggattggttcctttttttttttttttttttttttttaaagacagttttttgctcttgttgcccaggctggagtgtaatggtgcgatctcagcttaccacaacctccgcctcccgggtcgaagcaattcgcatgccttagcctcccgagtagctgggattacaggcttgcaccaccatgcccggctaattttttttttgtatatttagtagagatggggtttctccatattggtcaggctggttttgaactcctgatctcaggtgatctgcccacctcggcctcccagagtgctgggattacaggtgtgagccaccgcgcccggccttggattggttcttaaataggagaaggttcatgatgtgaggacacagggtgaggcagacatcccagagtaaccttaaaggacagaatattttaaaaaattttaaaaaaaagaacagagggataagtacttaggacatgagtaagccctcagtcttacccaagcttagtggcttcatcctggtttctcagtacactgaggcagtaggaggtgatggattctgcagttcttagagtgcaaactattcatattaataatagccaccatttcttggatgccctctgtgttgcaagcaccatgttagatgctttaaagatgttatctcatttaatcctttcaaccctgtgaggtggcaggtatcatttccctttagcagataagacaccagaggttagaaacttgtccgaggtcatacatttaagctgagattcaaatccactggtcctggctctcacctgttaggttgttgctctctgttaactagctatgttcattgcatttcccattctttggtcttctgctaagctacagatttcacaggacaactgggttttaagcaggcatcttgaatctgcattatcaggattttgttaagtttcgacttactgtggaagttggttacagctctaccttaggttcctgtgtttgaggaagttgaagtcatcttcagccctgtgccagttaactcctgaagctagatattttgtgacgccctctgaatctgccctctttgctgtctgaaatgagttgggagggcatcccttgggagtttttttcctttcccctttctcctgctcaggtttcaggcagcctgccctaccaagagttccccaggagctggttctttccattgccctttgcctagagtgctgttcccccaccagtgctgcatgtacctatcttctcaggagttagtcaaggcccagctgaaagcttccttgagcccttggctggcttgcactcttttctctgctcttgggacctgctcctgtatccgtgtgagcctaggatttctgtcttcagccttctgctggattatatgctgcttgagggcaagcactgtgtcctagtttccttatagttcccaaagtgcttggcacacttggtaaatatttggataagtacaccagtctctaaggctgaaagggcttttattcatgttccacgagtctatctcaccttgtttagatttaacaaaagttgttggggtgtattctgtgttttaacagaaagctraaatacccttaagccagtgattaatctgtggggtgattagtaaagcttttgcctccaattttgtctgagttagggttaagcaatgttcctgagtcccctccttctgttctacttttgttctgctctgtgtggtaaagagtggtagagtatcatgtcagagagctgttttgacaagtttatattgcatgtcttagctacaggcaccatgtgtagtttgcccatccacacaggaaggatgttgcagatttcccagaactttgagggtgacctccaataatttgggatggggggctttgccagtgcttttattctgtattggttggaaatagacctttgctgttttgaattcatcctctttcactgcttgccttctccctttcatgtcctattagggagtacaggagctgcttcacttcctcttactctgcttataggataacccaaagcgctggtggcacatcagcagttcccaggttgtctgcaaaggtttggtgttgatggcagctccctagtgaggtgttaaaagactataggaggaggagccagaagatgtgtgttttgggtccagctccatcaggctttggctatgtgatacttggcaactcctgatcctgagttttctcaagtacagagtgaagctagaatacctgggttctggtaaggataactaaaaataatctgtgtgaaagtgttttgtaaactccaagacactatcgcatgtaaggattgaccattttcttatgagaacctttctcaaaggcaaacttggttcaaatatatctattttttaacgcagatctcatttttaatatagtttttctccaatattttgtgaaaattttcatagagcaaagttgagagaattatgcactcatatgcctgccatctggattctgcagttaacagttttctatatttgtcttatatctgtccactcctttatccatccatcaacccattttatttttggattcatttcaaagtaagttccacacatcagtatactcaacccctaaatattgcagtatgtatatcaagtactagagcgcaaaatttgaactttgggcatggtaacacacacctgtagtcccatctactcaggagctgaggcagaaggattgctcgagcccaggtgttcgagaccagcctgggcaatatagcaagacctcatctcaaaaaaaaattaattcaaaattaaataaattcaaagtttacatttttaaatgtgaaatgccataaagtaaaatgtgtaaattttatgtgtaccatttgtgagatatgacaaatgtatatgtctrtgtactatgaatctctatcaagatacagaattacacaatattataatcacccccaaaagttctattgtgctccctttccattcttacccccagccaccagcaaccactgttctgaattttttccattataaattatttttgcctattctagatttcatgtaaatagaaccttacagtctattctttttttataaggcttatttcactcagcataatgtttttgagattcttctatgctgcacgagtcagtagtttgttcttttttctaattaaagtagtctgttacatgaagaaaccacagttcacttatctattcttttgttattggatactagggctgtttctaatttttggctattatgactaaagctactatgaatattctagtacacattattttgtggacatgtgctttcattccccttggttaaataccaagaggtgaaattgctgggtcataggataggtatatgtgtagctttttaagaaactgcttgaccttttcccaaaatagttatccaatattacactcatgccaacaatgtataataaaagttcagttgctctacatccttcccatcatttggtgttaatcagtattttaattttagccattctggtgggtgtgtagtggtatctcattgtggttttgatttgtatttccttgatggctgatgattttgagtactttttccgtgtgcttgttgttcatttactgtattgctgtctttttaaagtttttattttaatacttttttattaaaaggaaatataaacattatgacctctgggtagggaaggactgattaagcaagttacacaaggcatttacataaaggaaatggttgataaattcaactacgttaaaataaagaacttctcatcaaaagagagtgaaaaggaaagcggcagactggaagaagacatttgcaatgcatagtaccaataaaggattagtattcagagaggtcctaaaagtcaataagaaaacaaccgcccagttgaaaaattggaaaaggttgggacaggcacagcactaagaggaaaccaaatagctaataactatatgaaaaggttttcaacctcattggggaaatgcaaattaaacccacaatgaaataacattttatactcatcaaattggcagacatttaaaaggttggcagtattttgaggaactgctcaacattaagtagaggtgtaaattagttcaactactagggaaaaacccattgtcattgccaggtagagttgaatatgtgaccctgtgacatagcagcttctcttctagaaactcttatatatctttactggaaacatgtacgagaattttcagagcagcattacttttaattccaaactttcctgtaaaacccaaatgtccattaacaacataatggataaaaaagttatgatatgttcaaagaaaggaatacttcacagctgtgaaaaatggattatagttttagatattaactttgataaatctcagtggagagaaagaagaagccatcaaaaaatctgtaagttaygattctttttatttaaagattgataggctgggagtggtggctcacacctgtaatcccagcactttgggaggccgaggcaggaggattacttgaggccaggagtttgagatcagcctggacaacatagcaagaccccatctctaacaacaaaaaaaagattaatagctaaacaatatatagtaatacacacataggtgttaaaacttaccataaaatcagttcaggcaaataaagtttattttaaggacttaaatgtttagcatgttaatttgagtgcctaatatagaggctgtaggaggataacaggccctgctctcagggaacaattagtcctttctggaaaggtggggtaggtctctgacctggaagtgatgatggcaccttgggggatggattgtggaggcaagagcttggtctggattggtcataaggtatagaaagaggaaaggagggagaggtttgacctgggcttaaaagactgggaggatgtggataagtggaaaatatatctctggataaggggaaggaagggtacgggggttgggtgcatgttccaattatgaggaggctgaccagagataggacgggaggtctaaaagccaggttgaggagtttgaagtccatcctataaacctcagagaactcccaaaggcatttcattttcagcggggtagtcaaaggataaacatgtttcatgaagattaggtttcaggcaaaaattgcagtaggtggggtgagggacagctagaggtggggcactatgcaggacctattgcagtggttcaggcacaaggtatgaccaggtatgactaacttagtgcagtagtttgggagaggagggaatgagagaaggaaaaactgactagtgacaaattggacttggtgagtgaaagggcggagagtggagggtgactcagaggttggggtttaccagcttagaaggactgtgataacatgccacaatttgtacagtgctttatggtttaccaaatgctatttttgtacctcatctcatttgatgttccccaaaccatggggaggtggaaaggagggattttattttccctgtttaaggcctaaagaagcagaaattcagagattgaatgacttgttcaagtttgtggtgaccacttacagaaacaggttcactgtaatagcataagggagaagtcacaggaaagcgaatttagggagtttttaaaaaacctttcttgtcttttggttctgagttcatcttataaaaataaacttttacttttcctgattgtaaaagtcatattcattgtagaaaacttgaaacatatagaaaagaacaaggatcggctgggcgtggtggctcatgcctgtaatcccagcactttgggaggccaaggcgggcggatcacaaggtcaggagatcaagaccatcctggctaacacggtgaaaccccgtctctactaaaaatacaaaaaattagccgggtgtggtggcaggtgcctgtagtcccagctacttgggaggctgaggcaggagaatggcatgaacccaggaggcagagtttgtagtgagccgaaatcgcgccactgcagtccagcctgggcgacagagcgagactccatctcaaaaaaaaaaaaaaaaaaaaaagaacaaggatcacttaaattgtacaatcacttaaattgcacagtcaggagataatgtctcttaaaatggtggtgtgtttccttccatccatgtagattgctttaaataactataattaaaaacttttttgggctgggcgtagtggctcatgcctgtaaatcccagcacttttgggaggacaagatgggagaatcacgtgaggccaggagtttgagaacagcttgggaaacatagtaagacccccattctctataaaaaaaaataataataaataaattagctgggcatggtggtgcacacctgtaatcccagctacttagactgaggtgggaggattgcttgaggctgggagtttgaggttgcagtgagctatgattgtgccactgcactccaacctgggtgacagagtgagaccctgtctcttaaaaagcaaaaaacaaaaatattttttaagcagttttgttttttagttctaggaaacatttaactattatttatttaaatgttgtccccttaagttttctcattttctcttctgcagctccctccaaaagatagattgagacgcatcttgatctgtcctccgtgtctcttcacttttcttttacttcccctctctgtgctatcttctgggaggattttttagctcaatattttaagtcacgaattcattcctcaaggtctactcagctctttagcccactgagtttttaaatttgagtttttgtcttcagtctatggtttgctcttttttcttaattgcttattcatgttttatggttgcagcatacttccttatctctttgaggatattaattacactcactttaaagtcctattctgattgctgtattaaaaacactttttattgagttataaatgtaatcagccaaggtgtacaaaatccctaagtgtacagcttgatgaattttcctcatgctcccatgtaatcaccagccaaatcaagacagaacatttccagcattccagaaggctgccttgtggctgtttactgttttttagtatttttaacattttatgaaaaatctcaaaatacagcaatcttgaaggatttttcacagggtacccctgtgtacccaatgcctgtattttacattagcattttactgtacttgctttatcacatatatccatgtatccattcttctacctatcatactcctttttctttgatatattttaaagtaattgcaagtgaggacgggagcggtggctcacgcctgtaatcccagcactttgggaggctgaggcaggtggatcacctgaggtcaggagttcaagacctgaccaacatggtgaaaccctgtctctactaaaaatacaaaaaattagctgggcatggtggcaggtgcctataatcctagctactagaggctgaggcaggagaatcgcttgaacccaggaggcagaggctgcagtgagctgagatcacaccattgcactccagcctgggcaacaagggcgaaactctgtctcaaaaaaaaaaaagagagaaaaagcaattgtaaatgttagtatactatacttccccttaaatatttcagcatgaatttgatatttgcttaggttttttccttttgaagcaacatttacacacagtgaaatgcacaaatatttagtgtatatttgctgagttttgacaaacgcatacatatatctgcgtaatccaaacctctatgaagttatagaacattattttcattccagaaagtttcattatgctccttattggacaatctcttcttgcaaccacccttctgatttttttcttaccacagattagttttgcctgttctaattttaatataagtggagttacacagtatgtaccttttttttttttctgaggcagggtctccctctgttgcctagactggagtgcagtgctgtgatcatagttaactgcagccttgacttccctggctcaactgatcctcctcccacctcaacctcctgggtagctgggactacaggtacgcaccaccactcctggctaattaaaaaaattttttttgtagagacagggtctcattatattgctcaggctggtctcaaactcctgggctcaagcagtcctcctgcctcagcttcccaaagtgttgggattacaggtgtgagctaccacgcccagtgtatgtacttttatataagacttctttccctaagcgttatgtttttgggattcatctatgtttcatgtctcagtagttcataatattacacgattaacttttaaaagctcacgataaatattgttaaattgccctccaggaaaatgtgatgaaattttgtaattaaaaaatccctgagtggctgggattataggcatgcactactttaccctgccttgtggtcagatttttatttcataaggagcatgtgagagtgctttgtggtgcattcatcaatctgactgtgagaggtggtattttattggtattttagtttaaacttacttcatttattatttgttactctttatttctccctagtatgttttggacatttgaatgtcctcttctgtgaatttttcatgtttgttgcctatatctctattttggttttagaagttaaattattacttaaaagaactttttaataagtttgaatgttaaattttgacctctcatgtgcattgcaaatttttttcctcaagtatctttttcttttttttagatartgtttttaaaattttttttaatttaattatttttagagccagggtcttgctctgttgcccaggctggagtgcagtggcagcctcactgcagcctcaaacttttggactcaagtgatcctcccaccttagcctcctgagtagctggggctatagatgtatgccaccatgcctggccgatttttaaaatttttaaaaaagagacaaggtctccccatgttgtccaagtggtcttgaactcctgggctcagaggatactcctgccttagcctctcaaaatgctgagattacaggcatgagctaccgtgcttggcaggtatttgtgtatctaaacatagaaaaartataataaaaatacagtataaaagataaaaaatgggctgggcatggtggctcatgcctgtaatcccagcactttgggcggctgaggcgggcaaaccacctgaggtcgtaagttcaagaccagccttgccaacatggtgagaccccatttctacttaaaaatacaaaaattaggcgggtatagtggcacatgcctgtaatcgcagctactcaggaggctgaggcaggaaagtcgcttgaacccaggaggcagagattgcagtgagccgagatcgcaccactgcactccatcctggacaacagagcaagactctctcaaaaaaaaaaaaaaaaaaaaaaaaaaaggtggtacacttatataaggcacttagcatgaatgggccttacaggactggaagctgctgagtgagtcagtgaatgagtggtgagtgaatgtgaaggcctacgatattactgtgtactactgtagaccttataaacactgtacacttaggctacactaaatttgttttaaaaatttttatttcttcgataatctcagcttactgtaacttttttactttataaagtttttttaactttctgacacatttgaagtaatacttagcttaaaacgtgaacatattgtatagctgtagctaagtattttttttcttcacatacttactctataagcttttctccattatgtttttttttctttttgagacagggtctcactctgtcacccaggctgtaatgcagtggtgcgatcttggcttactgcaacctctgtctcctgggctcaagtgatcctcccaccttagcctcctaagtagctgggactgcaggtgtgcaccaccatgcctggctaattttttgtatttttttgtagagatggggtcttgctatattgtccaggctggccttgaactcctgggctcaagcaatccacccactttggcctcccaaagtgctgggattacagrtatgagccaacgcacccagccttgatttttaaatttaataataaattgcagccattttcccrttttattaatttcttcagaacatttatatgatggtactaatgctgccatgtacatctttttttgtttttttttgagacagagttttgctctcgttgcccaggccggagtgcaatggtgcgatcttggctcacygcaatccctgcctcccaggttcaagcaattctcctgcctcagccttccgagtaactgggattacaggtgcatgccaccatgccaggctaatttttttgtgtttttagtagagacggggtttctccatgttggtcaggctggtcttgaactcccaacctcaggtgatctgcctgcctcggcctcccaaagtgctgggattgacaggcatgagccactgcgcccagccatgtatatcttcttacaacaggtttaagatgggtacaattttataaggctttgtgcacaaagacttggatttattcttagaatctacttttaagtcttaatttcaggttttaaaacattttagggtagtctgtaatgaaaaagccctaaattaaaaattttttatgtataaacttggctttagataagttacatttacttattgaaatcttccattttcttaagaaatcattcctgagtgggacctttgactttaccatatccaacttactttctcaatttatggaggaggaaatcgaaaccctaaggcagttgtgagacaggtgcaagatcacactgcaagtattggtgaagctgggacaagaaccccaagctaactcttgtcctttatctcatggcaccttttatattcatgggaagtgaaccagttacttcactccctttggtcactgagatggcctggcctcagactctgcatgctcttctaattcaggtttgcaaagtgtagccttgtccagcaggctttactatatcagaagcaataaagaagttgaacacttggaatttctaaacttggatgtcattagaggagttgctagattactgcaaaatggctctgttttcattttgaatgcatgtacagatacctattttttcatctcagtttgtaacccatgcatttggggttggagttggcatgcagtgaaacctacagtatttatcaatatgtagtcagtaactgtatttttgatcagcttcctttacttccctaacatttttaggtaaaaacaggaagtcttgttccttttttctccccaaatcattatgccctgtctttttgttattctagaattaagaaatagggtcttaaaaagccaaaaacttcccatgaggtgaattatagtaaaggctttccttgggatgaagaagtcagggttaaaacctgtgggccagcagtattttcaaaaggcacagaacacctctatggagataattgatagttgactatatgagcaaacatatactcgttttcaatattgctaaaaatcagttcttccattagacactaatctctaatgagattagttttcagacactatgagttagaaattattttagtggttttctagtctgacttcttgaactccatagtaggtattctcttgtcaattctcccatctacacagagaactccagtttggtaaattttyctgataggtcacattctttttttttttttttttttgagacggaatcttgctctgtcacctaggctggatttcagtggtgcaatcttgactcactgcaacctctgcctcctgggttcaggcgattctcctgcctcagcctcccaagcagctgggattataggcacctgccaccatgcctagctaatttttgtatttttagtagagatggggtttcaccatgttggccaggcctggtctttgaactcctgacctcaggtgatctgcctgcctcggcctcccagtgtactgggattacaggcgtgagccaccgcgcctggcccatattccttattgaacaataaaatattccctcattcattcagcaaacctttggtgcttaccatgggctaggaactgcactggacacttgctggtaatgtgatgatgaataagacatggcctcccttttttkttgttgttgttgttgttgttgctgttttttgttgtttttgagacggagtctcgctctgtcgccaggctggagttcagtggtgcaatcttggctcactgcaacctctgcctcccgggttcaagcgattctccttcctcagcctcctgagcagctaggactactggcgggcaccagtacacccagctaattttttgtatttttggtagagacgggctttcaccatgttagccaggatggtctccatctcttgaccttgtgattcacctgcctcggcctcccaaagtgctgggattacaggcatgagctactgckcccggctggcctcccttttaagatgataagctcacaagaccacaggcttgcctctaattgtgtgtgtttccactgcccccttgattttataaaacctgtatagaaatctaaacatattgttgctgcaatacagttaaaaagagcgggggaattgaaatctgaaaacttgcgttcaaattctgggctttctctttggctttggtacttatttagctgtgtgagctggagcaaattgaataacttgtctgtgagccacggttccttgtatataaaatgtggacatgagagaaggtataggaagataccttctaatctgttaatgcaccttagaagtgacagacttttcttgtttttctttgcctattaaccagaattttgttttctcaccagtgggtcactggagaaggaagctgtgttataatcctttcagtgctgctgaatatactgataatggaaaaataaacaggggtgcactggttttctggcctgtaaaccaaaaaacagttttcagtgccaaaagctgtgtttgtcttgcaaggccaagaatgtttctgcagtgtaggacagcttcagatcccactgaatctcttgggtaatcacatggttttggtttaggttcagttgtttatagggctagctttgcttactgtgctcagtttctgctgtagtaaaataatgtaggctggctggaggtggtctctgttcagggttattatgaactggccttgttcttccagtgtgcaggccctggctaatcagagaagtgtacctgtcccatagctaggctctggaaagaccttcaagcatggcatgtgaactgggccctggctcctccccaccaggtccatttggagtcagtggtttctaaatggtggcagtgagtgctttgctctggccctcagccttcttagctttctttaccactgtagagccaggtagctaaaataatctgycctgtttttcttccttatgaggacattttctggaatttttatcccaccttatccattcttctgaaaaacttgtcttcagacctcatttttctaactcccagataaccagaacctacatgcagaggtctaggagatctctaccctgcaagcagaggttcagaaaaggagcagagtgagcaaatgcagataccattgttctgttcccctgtctaacaccccctgtaactcccagttgccaaattcagactcctttctttggtctgtaaagcccagcctgatgggttcctgcgccctctccagcttcttcctgtgcctcacacactgaatgcckcgagtactcacatttccagggacttgataacctctggacttttgacggtgcagtttccttgccaatgctccgcaagaatttcttcccaatttaatcagtgtaattaaccaaaaaaacctcgatgaaggtagagcactaagaaggaagtaggtaactgttaaaagattttatgtctggaaaaaatgcccccttttttttgtatttgcaatattccattacaaaaacaaaaacaaaaaaaggcaagactaagatatgataaagggttccaactgtcaaagtcatgcatgctcagaggatggagaggttcctgtggtctgctgtaggacagtttttccctcctgactgtttcactatggccttgaggacccagagagtggaagaaggtcacggagaatggatggatatcctagggactggaagagcatggtggctggtactgggtatccttgttgaactccaggagggatctgaggttgttgaagtggcttcaccttgttgggcacctraagacgtcattacaaatcaaagatcttctggatttgatggtgcactgctgagtgttggattatgagatcacagtgagtgtgtggcacaaacacactttctatgatcagcttgatacgtttctagctgtgacaccttattaaagcgtgggtcactagcctggaaataactaagactggtataacaataaagctgtcatgtattgactgtttactgcataccaggcactgttctaagtactttrtgcatgaactaagttaatcttatgacaatccagggggcttgaggttaccttaaaggttcaccttttcaaaattctacctttttttttaagagatggggtctcgctrtgttgcccatgctggtcttgaattcctggcctcaagtgatcctcctgcattggcctcctaaaaaactcccacacacgtaaagcagcttttcagtttgtggacaccagcttgggtgccctaaagttcaattcaattctgactggaattagtgtagaccccccaggttaaggaggctgcccccccagttcagatgccaatcgaaagtagtaggtctttaggttgcccctaattgttgtctgacttggctacgaattggaagttctcatgaccaccctcttgggattgatgatttgctagactggctcacagtttacttactagattaccagtttattaggaaggatatatttattaaaggatacaaatgaacagacagacaaagaggtgatacacagggctaggtctagagggtcccaagcacaggagcttcagtgcctgtagagttgggtgcgccaccctctggcatgtggatgtgttcttgttcaccaacctggatggtccctgaacacatctttctggatttttatggaggcttcattacataggcatggttgattaaatcatcggccattggttatcagctcaactctcaacccatttcctctccacttgatcttagccaaaaggccgagaagcgattcccatttcctctcatctttcctgggggaggtgggggaggtatgctgaaaatcccaaccctttaatcctgtggttgcttgctgtggtaaccagcaccccatcttgtggttatctaggggctttccacaaatcacctcattagcataaactccggtgttgtggaaggggcttgttaggaataacagaagtcacttctttcacctttattggcctggagctgctccagagctgtttcaggacaaaagaccaaatattttaacaaaagataagctatgagtgaggaattgtggaagaagaccaaaatatgtatttcttattatatcacaactatactttggtatttctgtgtttttcattttacttctttgagtttagtgagatgtcatgaatttttttttttcagtcaagtttcctgattatattggtcaggtttcttttgactgtaagtgacataatgcattctaaactagctgaagccagaagtggaatttgtggatcaccatattctggcttacataaccagaccaagggaaggacatgggtatgctggcctctggtacaaatgaaaccaggactttttttccatctttccctgtcattggtgccatctttgtttccttgggctactttttgctgttcaacaggaaacaatgtccatcagtagctcctggcctcacattttataacttcatcagtagagagcttcttcccttaattccaatttgaaaatcctggggaaaaaccaagatgggcctggcttggaaacacctgcccaccccagcagccagtggacgacctctgcgatgggcaacaactttcacagaacaggatagttgcaatgagggggagcgcccctcagaggaggtgagggtactgatcagaacaatagctgtccctgcactggggttcagccaaggccccaaaacgctttttcagcataagaattaatactacttttatatgtaatgatagtttttattcctaatcttaccctgaggcagtttgtattctgaattgttagagaacttttccacttactctgtttgctaagagaagaataggtaatttgtaggaaaatttcaacaaggcttcccagttgacgttctcccttacttcgtgtagcctgcctaagagatatttaattaccctgcattgctcatcacttctcattttaccctgtccttagagaagagtggaagactgttctcaaagcagtgattcagggactaaggctccttctatctgtggctcttttatcttcaacatatggttgccaaggttgccatgcttgtctatatggacaagctcccaaaaggagaaaagagcatggagggtcatgagtgagaggtttttaacggccaggtctagaagtggtccatgtcagwttacttactttccattggccacatggccacacttcactgaaggctgggaaatatgatctagctgtgtgcccaataagaagaggaactgagtttcagyagccagcaagccagcctctgccacagcttctttggtaacatttgttgcttccccttttcccctttgccatgcataatagttgtgtagtttgggtgggattgagctcatttccagctctagggtgggccccagcaacatccttgcctcatttattggttcagtaatagatacataacccaggcccaagctgagcaggacatggaattcatctggtcccagttactaattcaggggcaggcatgtcatagaaactgtcccaatcagactatggagtggttgggggaagatgttcctcccacctccctcacagccccccacagtgaggacaaagccaactcctgggtgagaayaggcttagagaattgcaaacccgtattgtgaagtcctaccaaacctttcctgaagctcgcaagagctgaccctggactctgcgttagcatgaggcagtaaatccactctrtcgcctaatactttaagattaattttcttgacttgcaaccacaagcatcctggctgatacaaccaatgaaatggaagaggaatagggagagagaaaggatacaatctgaatctctaagttctgcttccgttcattgctgtcagttctatgatgtttctttgaatacttgaacacaaccaagttgggtctgaatggatgtatcttagtttcacttccccattctctggaattagagtggggataattacattttttaatattcttttttttttttttttacctttagacaatgttttctctctggattgaatgatacatagtttctttgaagaatacattatgacattttatttctcttccaccataatggaatcatatggactcaacatagtccatatgattttttttcctgttttgttttagtgacttttctaaagtttgtctttycatctaggaagtatatagaatacatttatcttacacattgcagtatgcatttgttttatagctgggtattatctctatattactataggacttttttttgttttttgttttgaaacagggtcttgctgtgtcacccagactggagtatagtggcatgatcacagcttgagctcctgggctcaaatgatcctctcacctcagccccctgagtagctgggactgctgccatgcaccaccacatctggctaatgttttaatttttttgtagagaaaggttctcactatattgcccaggctggtcttgaactcccggactcaagcaatcttcctgccttggcctcccaaagtgttgggattacaagtatgtgccactgtgcccagctgttattacaggaacttttaatattttgagttaaatattccaggccattttagaatttgaatagcttgtcaaatttgttgattttatagcacctccgtcttgaaaaatatgccccctggtgttcctaaaagaacattttgagagaattatatggtatttagtaaggcaattagaaatcaccaagtatttagggactattgcttaagaagctaatttgcacaatcagaattcattagcccaggacacagacaccttatacacctgtggtgacaaatgaaaactgtgaaagtccaatctgattcattcctctcagaatatggaggacaggagagtggggacaacctcagcattaggactgccctctctcgttttgtttcaaaaagagtttaagtaacttaaaaaatacatataataagtttaaaaaaaaaaggaaattgggccaagggaacatggcgagaactgaccaattaagtcaggagtgaggtcagtatgtggaaacacatgccacaggggcatgcatgattgccatggggctgggtcacacgttcggctctgagcttccacagcctcaccaaatacgaaaacagttscagaattctggagatttaaaaatggcaaatgactcaggagaagtacagtttctgagctcagacctaaagaaattattctctcaggaaggggaacatcacactctggggactgttgtgaggtggggggagggatagcattaggagacatacctaatgctaaatgacgagttaatgggtgcagcacaccagcatggcacatgtatacatatgtaactaaccggcacattgtgcacatgtaccctaaaacttaaagtattattataataataataataataaaagaaagtattctcatgggtcctttcagagggacaaggttctgaacaatgttgccatcataaatgtggtggtgaatgtctctcagtgcaagctgagggcaggatgccatacacagattccaggtggggctaaagtacatggtccaggcactcagttagtttgatttgggaattaacatttagtctacctggaagaatgtggtattacccatttttaatcttggccaattttatttgcattaagttgatttgaaacggatatcagtctttgtccatatgtttatcaaccatttgtaattttttttatattgtctattactttggctgttttcctattggagaaatagagtttttcttcttgtgtagattttttaaaagttaagaatgttaatctttttgtcatgtgtggtgaataactttttttttttccctggtttgccttttaaacttacccctggtaaacatttttaggattgctcactgaaataggagggaattaggctactgtattgcgagtgggaggatgagattagggcatgtatatgatgtcccttctggcattagagacttttgacatgtacttgagaagagggaatatttggaatttggactagtccctacgaagaggagaggaggagtggttggggacatggagaaagcaccttcggcagcacttggtgtccagctgtggtgggacattgtgcatttaattaccattctgcaagctgtgtgatcttcagcagtgtttggccattcttctgtacatgggtgaaagatagacagttagattgatctggaattggagttttgcatttcgcagaatgtccagtagctactgatgagagagcaaaagtgtgggatgtgggtttgggtttgatagaagggaaaagcattagagggggactaggagaacagatgatatagggccaggcagtgtcagttaaaggggccaaatgattatatgcttagagcagtgcctaataggtggagcttnnnnnnnnnnnnnnnnnnnnnnnnnnnnnnnnnnnnnnnnnnnnnnnnnnnnnnnnnnnnnnnnnnnnnnnnnnnnnnnnnnnnnnnnnnnnnnnnnnnnnnnnnnnnnnnnnnnnnnnnnnnnnnnnnnnnnnnnnnnnnnnnnnnnnnnnnnnnnnnnnnnnnnnnnnnnnnnnnnnnnnnnnnnnnnnnnnnnnnnnnnnnnnnnnnnnnnnnnnnnnnnnnnnnnnnnnnnnnnnnnnnnnnnnnnnnnnnnnnnnnnnnnnnnnnnnnnnnnnnnnnnnnnnnnnnnnnnnnnnnnnnnnnnnnnnnnnnnnnnnnnnnnnnnnnnnnnnnnnnnnnnnnnnnnnnnnnnnnnnnnnnnnnnnnntgggccccatttttaataaccggacccctgtggctgtggacacattccccattttaaattctgctaccaggtataggtcttgctcttataccttatcctggctacctgccagtactccagcttccccacagctgaggtcttctttgcattcggccaaacccttttctgactccaggccccaagggtgcgagcctatcacctgatatgaacttcctcccctcctctagtctgcctgaatcctccattaccaccttcatcccaccctattccaccttgcccctgtctgctgagccatctgcatttgctgaacctcgctaaggcatagtctgccaacattgtctgctgggggtacagagagagcctccctctccctgtgtctcgagttcagcacctattccaccttagtaagcctgtgaggctttccaggcatctctcccaagctggtctgtcccttgtcttcagggctcctgttctgacactgggcccatgggaggtacaagttttgagtcctgtaaaaagaaaaaagaaggaagtgtccttcacacaacttctgacctttttcttcacttcctggtgtgttagtgtgtaagagagagagagakwgtgtgtgtgtgtgtgtgtgtgtgatgtttagggtctgaggatattcaaagtggaaaagggtataagagctaggtaatttttattttgtgactaggcaaaggcagtctaaaaaactgacctatggagacaattttagttctcttctacctgttaatgtaagagatgtaaaaactaaagtctttcttttcaaagtgactactagaaaatccttttggactgtaggtaatacagaatgtttataatcagaccaacaaaatactattcctacacattgttttctatgacctagaaataaggatgttacagatccttctttgtaatggaatttgttgtcctaagatcatacccattgtaaaatttaggacttttcgttggtaaataataaaatttgtggaaagaagtactcacaaggatttcaggctggagaagggactattggccattgtatttttcctggccagttttcannnnnnnnnnnnnnnnnnnntctttttacaggactcaaaacttgtacctcccatgggcccagtgtcagaacaggagccctgaagacaagggacagaccagcttgggagagatgcctggaaagcctcacaggcttactaaggtggaataggtgctgaactcgagacacagggagagggaggctctctctgtacccccagcagacaatgttggcagactatgccttagcgaggttcagcaaatgcagatggctcagcagacaggggcaaggtggaatagggtgggatgaaggtggtaatggaggattcaggcagactagaggagggaggaagttcatatcaggtgataggctcgcacccttggggcctggagtcagaaaagggtttggccgaatgcaaagaagacctcagctgtggggaagctggagtactggcaggtagccaggataaggtataagagcaagacctatacctggtagcagaatttaaaatgggaatgtgtccacagccacagggtccggttattaaaaatggggcccagagtgtggaactagaatgacttcaactttctccnnnnnnnnnnnnnnnnnnnncatgggtggtggtggtaagtgaagactgaagaagcagccagccccagtagcacaaaagcaggcaaaacagatctgtgctgttagaattcagcacagtggtactgggaggggacacagggcggcttctagtatgccggtaatgttgcttcttgatctgggtgctggttatacaggtacgttcagtttgcaaaaataaatctattagtacagttacgctatatgtactttctgtgtatgttcaataaaatgtaaaaaataatgaaagagagcacatacttcggtgccccaccacattgttttcagatctcagctctgcaactttatagctgtgagaccttgggcaaattacttaacctgtttgtgcctcagatttcaagtcatataaaatgagaataatacgtacatcacaggagtgctgggaggattaaatgagtctcccaatagtgttgagtacatagtaaatactcccagagtgttgcstattattattttttaaataattattataaatgcgaatatgtatgagggagaactgatgaattggaaatttgtggtcagagagagctcttggacattctgccaaatgacattcctaagtatggccatacagtggtgcctgtagtggagtggggttggactgcagctcatagtcagaattaaagggaagggtgaggtggttgtgttgccatatgaaccttgaccttgcccagggtgatggtagtacttggagtgagcttgaagcactgaggtccttaatgwatgtgagtgacttagaggtcaagagaaggtggcaggggtggcattgctgtgtgttatgagcctcagggtatctaggagtgacagtgggagagtcagaagctggctccctctaatagggagtggtctgggcagctgtggcctttgcagaaagtcctattccaggactttccctacagtgtctgtgcctgcatagtcagtggctcagggagggatcagaagccagggaactttgcartgttgtgatggtgaaatatgggttaattatatttgcttcaatatattttcagaattccacgtgctgatacccgtaatactctgtcagaccccattactgcctttctccttgaaccttagctatatctgcttcccctcaccagacccttcctccatactgtgtaactcatcccccacccccagttcagttggagaaagttgaagtcattctagttccacactctgggccccatttttaataaccggaccctgtggctgtggacacattcccattttaaattctgctaccaggtataggtcttgctcttataccttatcctggctacctgccagtactccagcttccccacagctgaggtcttctttgcattcggccaaacccttttctgactccaggccccaagggtgcgagcctatcacctgatatgaacttcctccctcctctagtctgcctgaatcctccattaccaccttcatcccaccctattccaccttgcccctgtctgctgagccatctgcatttgctgaacctcgctaaggcatagtctgccaacattgtctgctgggggtacagagagagcctccctctccctgtgtctcgagttcagcacctattccaccttagtaagcctgtgaggctttccaggcatctctcccaagctggtctgtcccttgtcttcagggctcctgttctgacactgggcccatgggaggtacaagttttgagtcctgtaaaaagaaaaaagaaggaagtgtccttcacacaacttctgacctttttcttcacttcctggtgtgttagtgtgtragagagagagagagagagwgtgtgtgtgtgtgtgtgtgtgtgtgtgtgtgtgtgatgtttagggtctgaggatattcaaagtggaaaagggtataagagctaggtaatttttattttgtgactaggcaaaggcagtctaaaaaactgacctatggagacaattttagttctcttctacctgttaatgtaagagatgtaaaaactaaagtctttcttttcaaagtgactactagaaaatccttttggactgtaggtaatacagaatgtttataatcagaccaacaaaatactattcctacacattgttttctatgacctagaaataaggatgttacagatccttctttgtaatggaatttgttgtcctaagatcatacccattgtaaaatttaggacttttcgttggtaaataataaaatttgtggaaagaagtactcacaaggatttcaggctggagaagggactattggccattgtatttttcctggccagttttcatcaaaagtttagattttctccggactgtggtaggttatcttgtctgttatgacaaaaactaaccaaacaaaaaacaaatgtcacatgctgttagcaggaatgtaaattagcaagattactttggaaaactgttggcaatatttactgaagttgaaaatatgcatgttctctcaccaccagttctacttccagttatatagccagcagaaatgtgtagatatrttcaccaaaagtcactactagaatgtccattgtagtattagtcgtactagctaaaaactagaaataaccccatagttcatcagaagaataagctgtaatataagcatataatgaaacactttatagcaatggaaatgaaagatcattgctacatgcaacaccatgcatgaatttcataagcatcgtgttgagtgaatgaagccagacaaaaaaagattacatgctatatgatttagtttatacaaagttcaaaatcaggcagaactatggtgttggcagttaggacagggctcacctttgaggaaggggaggggtagtgatttggagaaggcttgagggcttttgaatgttctatttttgacctaggtggtaattatatgggtgagttcactttgtgataattaaccaagctgcacacttagggtttatattcttttctgtaagtatgttaaccttcaataaaaatgtccatcaaaaaaactttcagtgtttattatacttgagccacatgttcatatgcacctgtcccttctggtcttagggacttagcatgtgctttagcctcagtctcaaacagtttgacttcctttttgcaaaataatactcatcattttggaaaccttatctgataagctgcttccctctcttccttacacacagaagggagtgtgtagtttccctgttatatcctctgtgggcaccatgtcctgaaccacagctaggagttcacatgtctgtrtgtatttgattgcctctcctgatgtttaaacttgaggacgctgggcctatttatgccagtcattatgtctctagggaccactacagtgcctacactcattggtatttgtcaaatgaatgaactgacttcaaagggaacagtctttttttctgtcacccatttcaacttttaattagggttagtaggaggttggagcccctgtgaggttgcatggaacatttttgagataatagtgactttaatagccttaaagtatgacctgtaggaaaactcagctgaaggaggggagcagttattggctaatcagtgtcccttaacctagttctgtgtttccccctagtsgtgttcctgagagtgaagtttatatatgatgacttcatttgttctggcttttctcatgacaatcctaaggtcaagtctattttaagtctgagaaatatgtcctggaagttagtttcagagtccctatttcctttttctctcctttgtattgaaatcttggctgtcctccccattccctccttccaaactgttcttagaaacgactttgcaagtatcataaatatcctctatgttgatttttctctgaactttagctgttctttttcagttagatatggggaagtggcacgttctcactcaccattctaacctgacagaattaagccaaaagcaatgttcagattggcccagtaggaagacgaattgaagatgagacatttacattacactttatttgctggatgatttttgtagggtttttttcttcttgtgtaatgttgttagaagacaggtttggagccagagagtactggtccaaaactcaaccctgtctctccctgctttttgacctttggcaagtttcataacctttcrgggccctagctttttcttatttgtaaagtggtggtagttgtccagttttaattaaattttgaatgtaaaatggtctgtcaatgtgtaaaaaattataaaacactcaataaattgcagttgcctaaaagggaagcttcaactttattgttagaaaaataatggttttcctagaagaaracctaggcattaccattcaggacataggcatgggcaaggactttatgtctaaaacaccaaaagcaatggcaacaaaagccaaaattgacacatgggatctaattaaactaaagagcttctrcacagcaaaagaaactaccatcagagtgaacaggcaacctacaaaatgggagaaaattttcgcaacctgctcatctgacaaagggctaatatccagaatctacaatgaactcaaacaaatttacaagaaaaaaaacaaacaaccccatcaaaaagtgggcgaaggacatgaacagacacttctcaaattaagacatttatgcagccaaaaaacacatgaaaaaatgctcaccatcactggccatcagagaaatgcaaatcaaaaccacaatgagataccatctcacaccagttagaaaggcaatcattaaaaagtcaggaaacagcaggtgctggagaggatgtggagaaataggaacacttttacactgttggtgggactgtaaactagttcaaccattgtggaagtcagtgtggtgattcctcagggatctagaactagaaataccatttgacccagccatctcattactgggtgtatacccaaaggactataaatcatgctgctataaagacacatgcacacrtatgtttattgcagcactattcacaatagcaaagacttggagccaacccaaatatccaacaatgatagactggattaagaaaatgtggcacatatacaccatggaatactatgcagccataaaaaatgatgagttcatgtcctttgtagggacctggatgaaattggaaatcatcattctcagtaaactatcacaaggacaaaaaaccaaacaccgcatgttctcactcataggtgggaattgaacaatgagaacacatggacacaggaaggggaacatcacactctgggggctgttgtgggttggggggaggggggagggatggcattaggagatatacctaatgctaaatgacgagttaatgggtgcagcacaccagcatggcacatgtatacatatgtaactaacctgcacattgtgcacatgtaccctaaaacttaaagtataataataatagaataaaaaaaaaagargaaaataatggttttaacatacagtattgttagactccgaaaagtagattagggctttctttttaagaatttatttggaaattaattttgatgatttataaatgattatataatacccagttatacaatttacccttgggaacaaagaaggaaatataatattatattggcttgtataatcaccctcttactttggaaacaaaagagtgggagtgggagaattttggagaacctgatccactgttaactctaataatcgtttcctgaagaacagccccatccacagttaaacagaaatctggggatattaaatggagctttgtactcttgtcacttttttctttcttcatcaatttctagttgcttrgaattaagggctacactaaatgaccctgcatttgttggtgagaacaggggaagcagagagatgttttgtaagggatggaaggtagtatttacatacaaaattcacagatttggaccttagcaactttgatcctgatgggcttgatagagaaattacaaggttaaaagggctttgagatgtggtggaaagaacagagacttcctataccctgcctctaccactgtgcacttttaacaagttattawcttctctgagcatcacttttcttatctgcaaaatgggaataatgaattctatcttttagagtttttgagattaactgagataatgtgataaatgatacttttcttaaggcagtgaggtagaaaagcaacaaatttttattagctctttcttcctctccttcaatttaatctattatatgtgtttgccagaataaaggaattgtgtttaaaggattgtctgtaattactcaacttagtattttgaaatattttattgtggagaatttataacatgtacaaaagtagaattatgttgtatttgttgcataacaaattaccscaaagtttactggcttaaaacagtaataagcatttatttctcactgtttctttggttcaggaatttgagagaagcggggctcaatagttctggctcatagtctctcttgaggttgcagtcaggtgttggctgggtctttggtcatccaaaacctttagtgggccagcggattcacttccaaggtgcttcactcatatgattggccaagttagtgcaggatgttttggggtttgaggaaaggcccaattcctctccatgtgtgtcagcttcacagggctgctcaggtacccgctggcttcccgcagagaagtgatccaggaagtcaaagcagaagctacaatgccctgtttgacctagcctagactacatattgtcagttccactgtattttatgcattacatataccagccttgattcagggtggagatgatacacgatcttgtgatgataatcacatctttctttcttcctttctttttctttttctttttctttttttttaaagtcagggtcttgctctgtcccccaggctaccaggctggagtgcagtggcatgataatagcttaatgcagcctcgaactcctgggctaaagctattctcctgcttcagcctcccgaggagttggaagtacaggtgcgggccactagtcctggccacagtcatcacatatttcattcattagtggtgatatggcggcaaatggtgatattctaattctctcattactttttcatttaatactgaatacctctataaagagaagctcctctcattaactrtgtgataaagtttgaatagcataggcaggataaatgcttgtttcttgttctccatttattataccagttttcagaataatggtttgacttcctaatatcctccaaaggggacctgttaaatgttatttgtattactatgaagttaagtattttaatgtatttgatatgtttcagtcaattgctcttattacctatattgatgttcatatatttataccccttttagagaaatggtggcatactgtacatagtactcttgatttgcttttctcgcttcacagcatatccttgggatcactccatagttgtctatggaggaattgttcattcttaaaaaaattgaaatataattcatatactcgcccttataaagtagacaattcattggttttttagtataatcaaagttgtgcaaccattaccactaatcctagaatgttttcatcaaagaaaccctgtacctaataacagtcyctccccattgcctcctgcccctttacccgctacacccccagcctctggcaaccactaatctattttctgtctctctgaatttaccaatgaacgtttgatttaagtaaaatcatataatttctggcctttgtgtctggtttctttcagttagcataatgttttcaaggttcatccatgttttattaatagtttgaatcagttcctccttccttttttagcagcacagtgctccaccrgcttgatctgtctataccttagctaaccagctcatgttggtgaacatttgaacatttgagttgtttccctacattattatatgaccttstgcataagtcttttttttttttggacagggttgcccaggctagagagcagtggtgcaatcacagctcaccggagcctcgacctcccgggctcaggtgatcctcctgcctcagcctcctgagtagctgggaccacatcacgcctggctaatttttgtaaagatggagtctcactatggtgcccaggcaggtctcaaaactactgggctcaagcaacccacctgcctcagcctcccaaagtgctgagagtcatcttttttgttttttaatgtgaattttgctaggtgttgttcaatttccctctatargggttgtaccattctgaatttttaccagcagtgtatcagaaagtattatttctctactgccttgccatagaatattttgtgatatctcactatggtttttagttatcattttacttctcatatcgtgattgagattgagcatcttttcacatgtttaaactctgcattcctttttttgttaactatctgtccatrtcactctagactctctccaaagggtcgtttgtattttccttccatttttggcatctctttctatattgcaaatattctttccatttctttatttctccttttgttttaagatgacttgtcggctgggcgtggcggctcacacttgtaatcccagcactttgggagggtgaggtgggcaatcactcgaggccaggaattggagaccagcctggccaacatggcaaaacctcgtctctattaaaaatacaaaaatgtgctgagtgtgttggtgcacatccgtaatcccagctacttgggaggctgaggcataacaatcacttgaacccgggaagtggaggttgcagtgagctgaggtcgcgccactcactgtacttcagcctgggtgaccaagcaagacttggtctcaaaataaataaataaataaaatttaaaaaatgacttgtcattgcaaatttaaatttttatgtaattaattctaacaatatttcccctaatatcttctggagtttgagtcataatgggaaagctttccatactccatgttataaaatatttacccatgtactcaatggttttatttttcacatttaaatcttcaatccatttggaatttatcttggtgtatgatatgaggaataaattcagtttaattytttttttccatatggctatggaattattcccagcaccacttattttgttcattcccccacactaatttgagataaattccattcataattgagttcatttctggattctctgtactgttccattagtctctctttaattatgtgccactaccacactgttttaattatagagctgtataagaattatcttgcaaggctattcctctctcttttctttcccttttcagggtcttctggctgttcttgcttgtttgtttttacagatgaactttataatcagcttstctagctgtgggaagaaaactcaaaggttttttctttttattgaggttgtattatatttacaaattagtatagggagaactgacatcattgtgatgttgtatcttcttatacaagaacatggtatgtctttttacttgtttaaatctcttgtggttttttgggagtgtttttatgactctcctcatagagttccttattgagtttatgccagatgttctattattttttgctttcataagtaggattttctcttccattatgtttctaactgaatttcccttttttttttttttaataaatgaagcctgggccgggcgcggtggctcaygcctgtaatcccagcactttgggaggccgaggcgggtggatcatgaggtcaggagatcgagaccatcctggctaacaaggtgaaaccccgtctctactaaaaatacaaaaaattagccgggcgcggtggcgggcgcctgtagtcccagctactcgggaggctgaggcaggagaatggcgtgaacccgggaagcagagcttgcagtgagccgagattgcgccactgcagtccgcagtccggcctgggcgacagagcgagactccaaaaaaaaaaaaataaataaatgaagcctgttgattttgatatgtttcttatatagcctgctaagttctctgatttgtaatacatagcacataaattctttggggttttccagacatatcattatattatttgtaaatagagttttacctcttttccaatttttagaccactaattgcagtctcttattgcattggataatctttaatacagtgttaaaataataaagaagataatgttttatacaaaatagtgtgtcttgtttctaactttgtcaggaaagttctagtttttccccattaatatttagcagacttttacacttttattaaaggaataagaccggacacggtggctcacgcctgtaatcccaacactttgggaggctgaggcgggtggattacttgaggtcaggagttcaagaccagcctggccaacatggtgaaaccctgtctctactaaaaatataaatattagccgggtgtggtggtgggcacctgtaatcccagctactagggaggctgaggcaggggaattatttgaacctgggagacagaggttgcagtgagccgagatcgcgccattgcactccagcctgagcaacaggagcgaaactccgtctcaaaaaaaaaaaaaaaaaaaaaaaaaaagcaatagtgggaggaaattatgtggagaaagtttttgtgttttttgcttcttttcaaagtatggatgagatatgcccaggatggtggtggtagatattgtgattatttctactctcaattctgtagttataatatccagaataagtatggtttgatgagcgtttcaaaacaaccactttggctatcaagtgaaaagtagattgtagagcaacagaagtggcagtaggctaactacaggacttttgcagctcttcagagaagtagtttggatttcatggtagcagtagatgtagagggatataggcaaacttgggatatattttggaagtagagtctgtagtggtactaattaaaatagtcatgtagataaactgtttcttactgtttcaggacaagatgagtctatgccagatgtaagtcaccacactcatttactgatttcttccttgaggattttttgttgttaaaaaatttttgtggttgatctgcattctgtcttaaactctttatttcattgtggattattaacagttggtccacgggccacactttaagcaacgtcaatctctagtatccatcttagrggcaaaccatgatctatttaaccagtctcttactattgggtagatggttaaccctcacatcatcttttttttagtattaggaataagtaayattgccatgaaatgcttgtttctataattatgtgtatatatcttatgctttctttaggataattcctggaaatagagtaaggattttggaacataatgacaaattgttctccattttacacacttgcagagccacatttttaccagtrtgaattcttttttcaaaaaaatctttgctaatttggatgacaaatagcaagttgttatatgaatatgtacttatttgattactagtaagaatattttaaatgtattttttggaattgatacatccacctttgccatttttaatgctcttggatcatttttactttggggtgtaagtaccatttacattaaggttatttactctttgtayaatgaaaatatttttcctctgttttaaaaatggattttggtatttttgcatcatgtagaaattgtccttttttatagactctcctagcagtatagttacttgggaggtgtagttggtcaagccttgctgcctccctgcttccatctctaaagaggttgccctttggtggtaagggcagttcactattgtgaacttgctggggtaaaaggttttggtgtgaggaacttaggagttaaaaactcttctgtaagggaaatgtatatgagtgatggatgatattaagaggttatttttaaattttgttaggtgtgaaaatggaattgtggttgagtagaaaaatctgcatacacacatagatgtatttaggggtgaaaaatgtgagggattttcttgaaaatactayagtcaaaaagatagacatagcaaatgtatcaacatttaaaaaatttttgatttgagtgatgggtttatgagtgttcttaacacttttaaaattttattttaaagaaatggggtctcgctgtgttgcccaggctggactagaactcctgggctcaaacgatccacgtatgtcagcccctaccgaatagctggcattacaggagcactgtgcttggcttcttaatactattcattatttttgtggggttttttttgttttgttttggagtcagagtttcgctcttgtcacccaggctggtgtgcaatggcatgatcttggctctgcaacctctacctcccaggttcaagtgatcctcctgcctcagcctcccaagtagctgggactacaggcacccaccaccacacctggctaatttttgtatttttagtagagacgaggtttcactatgttggccaggctggtctcaaactcctgacctcaagtgatctgcccaccttggcctcacaaagtgctggaattacaggcatatgagccmctatgcgtggccagtgtgtatgtttcgaaaaggctcttgggtctytggagaactttgggggagtttttttttggtttttttttttttttttttttttttggcttcctgtgactaggattctcttcttagtctctcttctggcactttgcaggccgggtggttggtgatctacattacaaatggagccaccagtaaagtcagaaatgagtcaaagaaggaggtttatggttgcccctttatttaaatgatcatggtcattggcaaataataggtattctytcttaggcacaagattactaatcttctcaattctctgtctgtgtttattttttatgtgatctgtctgccaaagaaggagagtagtgttttgaagtccttcartcacagttgtggttttggcgagtttttcctcatacttctcacagctctgggcattaagaaaacaacaagggcccggcgcagtggctcatgcctgtaatcccagcactttgggaagccaaggcgggtggattacctgaggtcaggagtttgagaccagcctggccaacacggcgaaaccctgtctctactaaaaatacaaaagttagccgggcatggtggcgcgtgcctgtaatcccagctacttggcaggctgaggcacgggaagtgcttgaacacgggaggyggaggttgcagtgagccaaaattgtaccactgcactctagcctgagcgagactgtgtctcaaaacaaacaaacaaaacaacaacaaaaagtttttttaattttgaaataattttagacttagagaaaatttaccaaaaaaagtacaaagaattcctgcgtagtctctacccagattgcccaaatgttaytaatattttaccatgggcttctatttattgcctgtatgtatccatattattattattttcttaatcatttaaagtaagttgcatacccgatgcccctttacatcccttcagtgtgttaattcctaaaaataaggacattctctattatcaatactgttaccaagatcatcaaattaacattgttacagtattgttagtaccacagaccttattcatgttgtcccactaatttcctttgtagctgctatggtctcaatgttcgtattctcccaaaattcttgttgaaacctaatcactaatgcaatggtattaagaggtggggcctttgggagatgattaggtcatgggggcagagaccttgtaaatgggattagttcccttaaaaaagaagattgagggagcttgttctcctgtccgccttgtaagaacacatagcaggtgccatctatgaagagtaggccctcaccagacactgatcttggacctcccaccctccagaactgtgagaaataaatttctgtttataaattgtccaagcctggtgtggtggctcacacctgtagtctcagcaatttgggaagctgaggtgggaggattgcttgaagccaggagttcaagaccagcctaggtgacataatgtgaccccrtctctaaagacaaattaaaaatttagctgggcatggtggcctttgcccgtagtcctagctactggggttgggggtggtggtagtgcagaggtgggaggattgcttgtgcccaggaattcaaggatgcagtgagctatgatcgtgccactgcactccagcctrggcaactgagcagtaccctggctcttaaaaaaaaaaagttacctagtctaaggtattttgttatagcagctcaaactgactaagacaacagcagaagaaaaaaaaatactgttactttctgatctcatatccaatccaggatcacacattraattatcatgtctctctagtcttcagcctgaggcaattcttaagtacctgtccattgagatctagatgtttttgaagagtacggaacagttattttgtaggattttccttatgtttgctttgtctcctgttttcttgtgatagattcaggctgtgcacgtttggcgggaataccacaaaagggaggttgcgtgtcctccttactgcatcatatcagaaggcacattccatctgtttgttccattactggtgattttcactgtgatcacttaaggtggtgcctgccaggtttccttagtattttctgctttgaaatgaataaatatcttatggggaagtattttaagactatatacaaattctcttaatcattaagctttcaccaactagttttaacattcattggtcatttttgtctgaaatagctaataccacggatagttgccaaatggtgaattttaactcatgggtagcatgttttgacagcttgttattcagccatttggggtttgtcttagttcttttcagctgagatgtacagcagctttgtagaaaagggcagctagatctcagcattggtccaaagacatgggtgcttcacattttgttatatctgtttggacaggacctggatgggtcgagttctcacccatgctggacggggcaccctgcctctgcctgtctgctcttctctagctctagcaccagtccacccaggcagctttgtctgggtattggaagtgtttttttttttttttgtaatgtctgacatagatcatattaactagaataaaccaggcaaggcggcatttttcagaaggggctatggcatggtagtgtcatatatatgcaaaattttttttttttttgagatggagtcttgttctgtcacccctgtcgcccaggctggggtgcagtggcgtgatctcagctcactgcaacctctgcctcccgggttgaagcaattctcctgccccagcctcyggagtagctgggattacaggtgcatgccaccacacctggctattttttttttgtatttttggtagagacagggtttcaccatgttggccaggctagtttcgaactcctgacctctgatgatctgcccaccttggcctccctaagtgctgggattacaggcgtgagccaccggacctagccagatttatatctaatgggatcaagagaatatttattttgttgaatggaagatgaagatatatgaacatgtttacatgctaaagggacagagtcagtaggagagattaacgatcaagacagaggggactgttaagggagtttccctgaaaaggtagacctaggtaatggggttagctcttggcaagagaayggacactcaggaggaagttggaaggaatgaagggaagggaacaktactgtttttcaggttatgagtaggcaaacatttgaaggagttgttccctaattgcctcattttgctttgtgaaataggagtgagattatgtcctaagagttagcaggtacacgtcttgaggacgtcgctgaatagggaaagtgttgtggggaataagagcattgtctggggttcaccaaaggatttctaggcttctggtggtagagaccatgaattcttggtggcctcagtctgcaaggctctgttatttttctcccgcagtggttatcagctcaggtggagaagcataggaaataattgggttggttggggatggggctttgccacatattgtggtgggaaggccagggaggtaggagaacagagagtgggacaagagggttggactttgtttggagacgtggtttatgactccatggtggtctatacagaaytggggaggtgggattggagagagggtaaaagagtgaatgtcttgagaaggtcagagaattattggaggaggaattaggttcaagattgctgcagcataggaatattagagagtagaatattggagtttagcattttcatcatgggacagttctggctgatgaggggctggagtggagcagggtaaggtgaagatcactgggttgtgagaaaacttgaaattggtggatgggttatttatgtggacattgacaccaccaggttgatgggaggacattggtggaggggggatgacagtgttccaagtgttcagggaaggagggagagttgagcaggaatgaagtattgaggccagatggcatgaacacacttaaaagatggcattttggttgccaagggatcagggatggtttggacctggaggtttggtggaactggctgtccacagcctccaaagatgtcttgatgctacgaagagtggaatttgctcagatttccaaaaaaaaaaagttggtcattgggcctttgcttgtatttcttcttcctgtagctcccttgcctaccttctctacctggctaactcctgctggccctttaagactgagctctgagatcacctcttccgggaaatctttcttgaaccctctgatccgtctatctgtccctatgttccttatgcttatctctaacttagcaggtatcataccatatcatcgtctgctgtccttccctcccctagaccataacttccttgatgaaagcagggactgtatctttgcatccctggcacagtacctggcatatatttggttgaactatatgaaattgccatttaagaagtgaatttggtctagtttgtaatttctctccttaataggtgactttcttttgtcagctcatcttgaatctttttctgaagttacaagcccctttcttagtttggccttagccaagttccatgcaggttgtttctcttttagtgaccaactaatttctatgtgggccagtcagtctttcatcttgcttaggctttttttttttcttttcaccctctattactcctactgcgtaggctttttgttacattaacttcccttttgcttttctctaccctcagcagagggggtcaaaagaaacttctttgttcttagtcttccttagctgcccaaaatttcccagtagtttgcccatgcatttcattcccctattgactcttactgagtgacctatgtgccaggcaaaaattcggacttgttcattctagtttctctgcttctagtgtgtctcatgctggtgtttgttggctcagatgtgttaatggggctgccgctgctgttgtggttgttagtcattcttttgaacagcggctttagcttaccaatgctccagatacagtttttcagaaactcaatgatctgtgtgcattacacattaaaaagtgcattgaacaacagcatatccagattaaaaacaaacaaattagatttatctggtgtttttccattatgggttggagcaaacatgctgtgtataaatcagataaaccttttctttcactgtttcagactgagaattgtttgttcttgcttttgtggtcaccaagaatgtaatataactatgctcttcacatcctaaggccaccataagtcctggatcagacctgtttttttgaagtcacctgaattytgacttgaggctcccccaacccttactcccactacccctttgaactggatcactttgcttttaaggggcactcccttgaagccagttccctgaagtgacckactttcttgaggtgcttgaagagcttccctttcatttgggaggyttcctcagtgcccccattcccaggcgttttttcctgggagtcctgtcctattcatgaatttcctgttttttccaggggggtgggtagggggtgtgggggcaggcagtactatgttattatcgtaaytagtgacatttaaagaaagaaacccaaagcccagttaaccaattacacttaaattctctgggcccaggcctgctggatgctctccatctaccagaaatgcttcttatcatcccccctcttttttagactgctaatccttaacagattaatctgagtttatatttagatgaaagttattcattaatagaaaaacctgaaactgtagtgagggctgacagtgttkaagtggatagaggtacataggccacctttagaccaaaaagtctttgtaaggcactggagtctttaagtgtctgctttggcacaaggacatcaggttatccttaggaagccaggaacaccttgagactcgggccagaacaatgtggcccacctttgagcttcaggtttggtcccagtgagtctcacgcctttttgatgctgaccatatatatggggcaaaacactctgtaatctgctttaccccactacacccatcccatccatccctagttgcaaaaatttcaacttgtatgaatatgcacagattcartagtggaaactcagcactgttgagtgccaggcttcaaatatggaattagtgacctctgaacccgtgtttgtcaaactgcctgctaatgggtcatgacatcagtttagcagattatgcctagcactattgttccagttaaattgctgtgaaacaaaccaccccaaacttagtgacattaaacagtaaccgtttattatgctcatggattctgtggctcaggaattggacagggtacaatgggaggtggcttgtctttgttccatgatggctgggggttgggatcatttggrggctcytttactccacatctgatgtctgggctggggtgccttgaaggctagtggaatcagctgggaccaatgaccagaacacctacatgtagactctccatgtggtctgggcttctcacagtgtggtggctgggttccaagagagaggttccccagaggaagcatttagagagccagtgttccaaaagaacaaggacatttgataaccttgcctctgaagttacatggcatcacttctgttccggatttgtggatgctatctcaagcctgcacagattcaagggaggtggagatagagagatggagatctatatccccatctctcaatgggtagagagtcaaaagatttgtggctgtttttaaaactactacaagttcattttaaaacaagatagatgcttgagcccaaaagtttgaggctgcagtgaactrtgatcataccactgcattccagcctggccctgtctcaaaacaaaaaacaaaacaaaacaaaaaaactaaatttaaaaaataaaacaagttagaatatagaacaacagagtgcctcatgtagtcaaaaaaggcattgtgaaacttgtgtttcagttatgtgtgtctgtgtgttctggtttatgaggtaacgtttttctttctgtggtctacaaaaacattttttaaaacactgcttaactgtagtaacatctaatttggtttatgaacaccaaattttatctcttaatacctcagttaataggttactattgtgtggttctttgttataaagatgagaacctaaggaattgattgtcctttgcctgtaagaacaaaaagtcctttgggacctgttttctttgccctccaggactccctgaaggccttgttggactgtggaccagacttggagagtcagtgtgctgcagaatgggctgtggtctgggccaggagtcaaaacttccttaaagttttagtccaatctttgccagtcagtttcctagagtagcaaacaaatgtgaaatgaagaggacatacttctttttagagacagtcagaaaatatttagccatctggaagcccaagaactattcataataataaagagacagctacctcgcctgagcaaggtggtgtctgtggtaaagcaatctcaggaaaggctttctaccttcagtgttgaaatcaaaaggaaatactgagattggggtctgcaagaaaagacatgctatgtgtgttgccaaaacaatctgccttcctccccttgctgtgacttactgcgtttagttattcctaccctttcaaggaaatgtgcaaagatgactgagcaatggcatttactgtcatcttataaaacactgcattgcaaaacaatttttgggaatagtgcgattaaatggtaaattttgctcacgtatgttaggaaatttacacaattctgtgcttttatttcttcttattaaaatgagacatgtttattctagaaaactagaaaatacagataactgttattttaccacgtagaggagggtattatttaccactgatttttttttggttgcatatccttcctgtcatttttctgatatgtatacattttaaaaaacaaatgggctgttgcagtacactgttctgaaatctactttttaaacttagatgaacacattccatgtcaattaatgtacttctattataaaaacttcatagtgttacattgtatagagatagtatttgaacgcttaacgttgctggcaacatttaactgtggtaaacgatgctgtggtgaacatctattaatatataactaaatcttttttgtaatcatgattcctaaaattttttaaaaatcttttttgaatatatatgtacatggtacacaatgttatgattttccttaggagatacctatgtaatttgatctgctaaatcacagagcatgaacctattttatttattattttattagagacagagtcttgctcttatcactcaggctggagtgtagtggtgtgattatagctcactgcagcctggaactcctgggctcaaatgatcctccctcctaagcctcacaagtagctgggactacaggtgtgtgccggcacaactggctaattattttattttttgtrgagacaagatcttgctttgttgcccaggctggtcttgagctcctggcctcaagtgatcctccttcctcagcctcgccaagtgctgggattacaggtgtgagccaccacgcccgcccagcatggacattttgaaaacaaaaaatttttgtgctgctaaattgtccttcccaaatgtaccagtttatactcctacaaaagtgttatctattccttgtatttcgcaatttgatagagaaaaaagtcacttgctttcttagttgggtgatttatttgcattttaacttctttagcattttacctctgaaaatcttgcctgttttttaatcctcatctcaaatacctcccacccgacccctccckagcacctcccagcacaatgaagacttcccatctgctctgtcttgtggatttttcttgtcctttccaatcacctgtggtttacttgagagcattaagcactgtgtctaactcactttttaatcttcttttgcatgcagcatatttcattgcatatgtttaagactcagtaaatattgagttaaattgcagtccaacaaaaaggattgatggcagcacaaagtaatctgtcragagagagaaatgtaaagaaaagaaatgttcgtcaagctgaagaccatgtgaagctactttggagagggcatttagtatttcatttaggaattcttatttgcctgtagtaaraaaagaaaggcctctccttttttttgaaccatttttatttatagctaatacttccattaggcagcccagccctgaaattcttgtttaataatagccgatgttttgtcaatattcttatgttaaccgtaggtagtaggatcctctgaagccaggactatttttttaatgacccaacttattgttaaaatatattttctcaataagttagtgttggctaccgtcggaaacttacatctctttcctgttttcaatgcctttcccttctgccattgtatttggttcagaccccttcagatctgttttgtcctcacgggtctttttttttttttttaatgactttatttaaacttggagcatcagtcacaaatwtgcagagacaatgctattttctactgaaggcttttgtctgagcttattacctctcttatgtttgccttatatccatcttcttcccaaatatacattttacttctatttatttcttttctrcatgaatttgtatatatgtggcgctgagtgaaattacaagaaaatgcaatggtaacacacagtttataaaaccctggagatagaaacattttctggtgcctgacactgctggactggacccttttctgaagctgcacattctgccattattcatctctgagtgttagatggtatcagttaggacccttcagctgcaactaacagcattcagaactaaaaagcaacttacttttctcacataagaagtctagagtctggaagtcaagtgtcactcatatgacaatgtctaaggcaggtgggaagggggacactcttttaactgggagaaagaagtctccacctctccccagcgggctkcccctcaggtcccactgaccaggggttctgtgtgcgtctgctctgttctaaagagggttgcagaaggaacatctagtggcttccactgctgtcaagggaaaaatgatgttgagaatgtgaccaacaggtgctgttagaggcataattctcacttgcattgagctccaacctccctttggttacttccataggtcagctctagctgtactctaaattagagtcccacaaccattttatttctctttctttttgtaaattcctagaagtgttgaaaacagagggtatgattctgcctgagttttgtctcctgcttgtggaataycttcagttcctggaacctgaggttgtgtcttgcccccgtagcctccattgaatctggcccagtttggtatgatctcctagccacagcctctttgtctcccagccacagtcactagtttccttttcctgtgagaagtgagaattagtcactcacttccagtgctaagcataatcagagtgaggaatgtaggagcagctctaaaaacctgagagctattggtgtctggaattagttttattgtttttacctggtatttgttcctgggcacttaagtgcttgcctggctgcagcactgttaattgatgagacccaactaggccctctgtcatctgaccctgacccctctgcagcctcatctactgtggaatcctccatttcaaccatacttagtcatttactattccttaacatgcttggtggcttcacacttccatgcctttgcacataatattttctctttctagaatgttcatgtccctcttcttatctggcagagccctacttttccttcaagwtttaacctcagcaggcatcactccactcctttggaaaacttttgtgatttttcccttggacagagttaatcagttacttttcagtcacactctctacaagttcytgttgttaarcattcacaaagtgttgtaattatctgtttatatttttatatccttctatatttagcttctggaagatgggatttatgtttttatttctataacatcagtactcagtatacgtttagcgcataaaaggtgctttgtaaatgttgaaatgaataaatgacaattttacatctaaacctgctgattaataccaacttcatatccttcttgtaagaaatctgtatatattagaagattataaattataaaatacacaagctactatgttatctaaaactgaatctgatagcccrtcacatttcttatttggcagactagactgaggcctggagtggataagtgactagcctaggccacataatgatgagaggcagagataagactagacttctatgtctttgtctctcacatagcttgtcttgtagtttctataacaccatcttaccagataggtgagggagatttgggattagcatcatctgtgtgccgtcaaaaaccctgccattgctctcctcgcctgtatgcttttgttcacgtggacctttggctctctgcttgcctgagtcctgccctgttgctccagacctaccctgattcttgccttttctgaccatctcagtcagaatcacttaaaccatcttctgagtttccatagctgtttatagcacacgyagcaataccatgcagtgactgagtacagccctcagtccacacccctgcttcctagctgtgtgactgacaagtagattaacctctctgtttccaaatctataattaggaataataataacagttcctactttatagagttgatgtgtgaggattaagatgttctgtggtacatagtaaacatccaaatgttacatgctgttattggtggtgacggcctgattactattcataaatcgctagaggctrattactggctgcctctagtttcagctcttcctgtgtctgactgcttattgctgaatccagggttgcccagttttgtaaggggtatatcctaacctgcaggttaccctcagacacttgttggaatatttttgcgaataacattcacttaggagttttgttccctggcacacaccagtgctttgtcatgtagaggttcgctcatttgtataggtgatgttactttgaaaaagttgtctctaaggtctgctcagtgaaagaacaggatgttttctctctttacttcacagccatagccagctttgaggttcagtgtttgtatagctctaagkctctgttaattaaggaaatggactagaaaagacagtttaatgaaaactcacagacagtagacaatttgcacacattccattgtttgacaccatagtagaagctcacctctagatgtaaaggagcagtctgtaattctcttgacccttttcctgattaataacctgtagatattgtccatccatggtataagagttggatagttttgtttggattttctctatcttgtaaatgagaaaccagggaaagaaaatacagtgtatttattatactgggaacaaaggtcatggaaacagtaacttttaaaaagaacccttggttacctagtttttaaagacctagacttccttgttctatttctaaaagtctgtggaataaacccctcattttctctgatttacaaggaaactaaaatgtggaaaatttgatctttaaggggcatgacttctggtttatgggatkgtttattttaaagtttaaacatttcagtgtcttatgatactcttagttaaaaggaagttctcttgagtatcatataactattaaaattataatttagatctgtattttcaagaaaatactcagttttaagtggaaaaatgcatgggaaaaggtcaatttaaatgcattttaaaaaatcaaagaatatgtgcttatgttaataaggattactttagggtaatgagatttcrggtaatcactttttacttttttcctctgcagcctttctatattgtctggattttggagtgaccatgtgttactccatattcaaaaaaattttttaagccattttgtttatggaggaaaaaagtgcaacttaagatttgaacatggtaaagtcagcctttttctatcttccccagggaagttatccccagcagctaggagagaaagaaacagaaatgaaaactccatctttgaagaaattgggagatatctgaaaccccaaaccagaaaatgagtagaataagttcttcaaagattgaaccagggtatgagaggaagtagactgaaggcacttgggactacagatctcaggaaaagagagagacattttccaacgtaagggacacaccctgggattcaaaaccaaatgcttcatttgaaatagtggaaatgagcacacaagctgatggcaggagcttccctgcagttagtttgattccaggatgcagaagaggctggattgaatgaggacttagacaagtagtacttgtagggagaggtctgaccttgtagcaggaaggagagactacactgtgaacagctccacagctgccttttgcttttggttgatgggggagagaggctcaagaataccttccccaaccctgtgtgcatatatacacacaggcttgcaagtaaaagaaagaagacttctactctcctgaatatggccctggctcctctcccaaatgaatcttcaaatagctggtccaagccaggcgtggtggctcacacttgtaatcccagcactttgggagactgagatgggcagatcacttgaggtcaggagctcgagactagcctggccaatatggtgaaaccccgtctctactaaaaatacaaaaattagctgggcgtggtggcgggcgcctgtaatcccagctgttcgggaggctgaggcaggagaatcgcttgaacctgggaggcagaggttgcagtgagccaagattgtgccgctgcactccagcctgggcgatagagcaagacgtggtctcaaaaaaagaaaaacaaaaacacaaaaattccctaaagaaggaaacaaatagtggasaaaacaaaagttttgtagtacaaatcaagaagtttccagaaataagagaaagcttgaatctacagtttgaaaagacacactgtgttctggaaaaattaacatagagtggccagccttgcaacatctcccagtagggttattagattttaaatgtaaagaatcattcaggcagccaggccaaaagatcaagtcacttagtaaaggagaaattttgactcctccgtattattaacgatcatgggaggacactggagcaacagtgagaaactccgtaaggaaagtcagtgtgactcaaggattttatattcaatgaaattgttttttaaatataaaaacaacaaatgcatttttctatgttagaaatcaagaaagaatattctcgtgaacgcttcttggaatctagtcgaagataaacttcagtccaccaagagataactggaaaaactacagcaaagtagatggcaatgagtgttgaccctctaactgtaggttaaaacaaatgtggagattgatacagtagaacagaatgtaaaggttatatgacctgacggtgtgtggtcatataactaaccacctgtgggaggagaggggaaagaagattgtaggtaaagtaagagtgctgttccctcatcgttaatagctaaggttcaaagggtaccatgtaaagctgacaatgaactaatagaggtatagggtctatttacagctacaaagctaaacagtaagagttaatataactgactaaaataggttagcaaaagaatggtgcaggagaagaaaatattttatttatttagttttactaattttagagacagggtctcactatgttgcctaggctggtcttgaactcctcctgggttcaagtgaacctctcaccttggcttcccaaagtgttgggattacaggcatgagccatgaaacctggcccagaaatattttaatttcatcattttcatgggggttaaatagatactatctaaataaataaaggttgatagatatttataaataagtgaccattagacaaaatatcagttatcttaaatatcaaaatacatgcacaaaggaaagtagcctctacaaggggtaacagaaacaatggacagatacctgacataccaataaatataaatgggagttggggttacaacagtcttggtcatcaagaagtcggaccttatattccactaatatgtttctctgagcaactcaaaacctggtatttcagaagctttggggtcagcaggagcaggacctcacctctgggtatttcctttttttttttttttttttttttttttgagacagtgtttccctcttgtcacccaggctggagtgcartggcrcaatctcagctcactgcaacctccgcctaccaggttcaaccgattctcctgcctcagcctcccaagtagcttggattacaggcgcccgccaccacgcccagctaattttttgtatttttagtagagatggggtttcaacatgttagccaggctggtctcaagctcctgacctcaggtgatccgcccacctcrgcctccctaagtgctgggattacaggcgtgagccaccgcgccgggccctgagtattaactttaaagtgattttctttttccactcagccaactatagtgaaggtacttagtgttttgtttaaggtgattagtttcactcctctgaaaaaattaaaaattcaaaactaataaataaatgaatgaaactaaaaaaggaaagaccaaattattatttattttgaatagttatgttggagtttttgatgaagttcttttctcaagagctattctcaaggaccaggaaaatatattttgtttttggaagttcttggaatataaacagaccaactttctgaagtgtcataatatgtggtcccctaatatgtgtatttaatgttctcctttgtttcaccctcagaaccaaagctgccttmattccttggtttcatggaaatagtgtgcatatgtaacagacaataatagcacacatggagattctagtttaaatgacatctagcagttgctaatgccacctttccaaattttcagcagatctgaggttgaaactgacamcaccaaaaaacagtcctagtggggcacatatttagaagttatggaactggattgaaaaacatattttaaaacaggaatatcacccttggcaatttgatagaaaatgggaagacttaactgccttcctcatggtccactcctcattaaccctggcagccatccaaattcctctgtttatgtggatgctacttttaacagcagtcaggtactgcattccctgtcttcttcctgcttcctcttggtactactctattctacatcaattcaaagaccctggctgccagcatatatctgagcagtgaatgtgatgctgtctcagaggctcccatgattaaaatgggggcataaacaggaaacaccccagtagttgaccrtgttagagacattgaaggacagagtacatacgccaggaagcagagccactttattcctaaagcctagtggacttgaacctgtatacatcaacccttccctcccaccaaacaaaacattagtgctcagagagtaaagctrtgagcmcacatacactttggctatgggcagatgcaggatccaggtagaatgttgacctggggtcattcttaaggagttcctgcccaagatgttagctcatcaggctgagaggactccagcagtaaaggttgtgggatctatactttggtagaaaaggagaaaggaccaagaaaagccagctgaggcactgcctcagctgcccatctaaaggaagttgcagcaggagggacacagtagaagaatctctagagacatcacaaaaatgcttttttagagaaagagctttaaacatccatcaggccccaagaatgagaagtcgtcttctaacagcactggtcagggacttctctgaccctttcctgtcctccctgcctcagaaacagcagctrgcagattggggaggaagtgagggagatagaacagtccccacccccagcttcttccccagtggcaggctgcccctgcaactggtcctgctattagagagaggtcttttcttcaaatgaaggttgcagtgctcttaagatactggactaattttttttttttttttggagacggagtttctctcttgtcgcccaggctggagtgcaatggcgcaatcttggctcactgcaacctctccctcccgggttcaagggattcccttgcctcagcctcccaagtagctgggattacaggtgcccacgaccaygcccagctaattttgtatttttagtagagacagggtttctctatgttggtcacactggtctcaaactcccaacctcaggtgatctgcccgcctytgcctcccgaagtgctgggattacaggcgtgagccacagcacccagcctgatcactttctttttgcaaatgtaaccatccagattaaaaaagagcattccaggaccccatgagatgcccttgtattcccttttgattacctctcaccccacaaaatatactatagattagttttgcctgatttgaactttatttaaattgatcatttttaattactgaactgagccttaattataatgtgaaatgagcagaaagatatttcaaaatgtttcatgatggttctttatggccagtatttttgtatatcctgtagaaatatgtcattccctttattttcaaacctcatttgtgagattttagggatacgaatgcctttttgggactggtgtggctgtgttcttcttattaattattactgaagtaaagaggaaatgatatcagcagatgtgcagagcttttatttgcactgaatacactattcatttagacaaaaagatcatttctcaattcaaatcagaatattctaatttaaggctgaaatcagttgtgtcataatctctatggaaacaaagctttctactgtgtagtagttgcataagtaactcatttccccttgtagatatacaaattgtagatgcaaacacttctttttccattttctcccaacaatactcttgaaatagaagatactttagtcatatttgttacgttttacaaaatttaaaatatctgttcaaatttcctgctgacatacattttaataaaattgttaaaacttaaaaattgttgatgagctcactttcttttgctagttgaattcagaaaaagaagattgagttatcyttcttagctcttgcgtattagtgtcatctaactctgcaaggctctctccaattggggtgtgtgtgtgtgtgtgtgtgtgtgttttactaatctgcaggcattcttcgtatattgtgggtatgagctctttgtcagttttacgttttgcagatactttctccaacttcgtggcttactttttcattcctttacatgggtcttttgatgacccaaagttcttaattttgaaatctaacttatcagtcttttcctttatgattagtgcttttcgtatctggttaagaaatctttgcctcaatgaaagcaaaaatagaaaaatgaaattgcatcaaactaaaaagcttctgtactcggcaaaggaaacaattagcagcatggagagacaagctgcagactgggagaaaagatttgcaaatcacacatcagataaggggccaatatccaaaatatataagaaccgcaaactactaataacaagaaaacacgtaacttaaaaaatggccaaaggacctgaatagacatttctcagaagatatacagatggctaacagataaatggaaaaaaatgctcaacacctctaatcatcagagaaatgcaaattaaaccataatgaaatatatcacctcatacctttggattggctgttatcaaaaaggtgaaagataaggctgaggccggtggctcacacctgtaatcccagcactttgggagactgaggcaggcagatcacctgaggttaggagtttgagaccagcctgaccaacatggagaaaccccgtctctactaaagatacaaaattagccaggcgtggtggttcatgcctgtaatcctagctacttgggaggctgaggcrggagaattgcttgaactcgggaggcagaggttgcagtgagccgagattgtgccattgcactccagccttagtaacaagagcgaaactccatctcaagaaaaaaaaaaaaagaaaagagtgggtacagtggctcatgcctataagcccatcactttgggaggctgagacgggaggatcgcttgagctcaggagttccagaccagcctgagcaacctagtaagacctcatttctatagaacacaaagtaaaaattagctaggaatagtggcacatgcctgtagtcccagctacttgggaatctgaggtgggaggattgcttgagcccgggaggttgagactgcagtgagctgtgatcgcaccactgtctcccagcctgggtgacagagtgagatcttgtctaaaaaaaaaaaaagatggaaaataaacgttggtgaggatgtggaggagagaagggaacttcacacgctgttagtagtattgtaaatatatacagtcactttggaaaacagtatggaggttcctaaaaaaaaaactaaaaatagacttagcatgccatctagcaatcccacttctgagtgtatatccaaaggaattgaagtcagtgtgttgaagagatgtctgtctgtactcctgtgttcgttgcagttttattcacaacagccaagatgtagaaacaatcgatgtgctgatccacagacaaatggattaaaaaatgcaatatatacatgcagtggaatactattcagcctgtcatttgtgacaacatggataaacttagaggactttctgctaagtcaaataagccaggcacagagagacaaataccctrtgatttcacttatgtggaatatacaaaagttgaacttagaagtaaagagtagaatgataattaccagaggctggagggtaggggagtggtagatgggaaaagaggatacactggtcagagggcacaaagtttcatttagataggaggaataagttctggtggttcattgtatagcaaggagattgcagttaataataatgtatatttcaaaatagctaagagatagcattttaaatgttctcaccataaagaaatgataaatatttggggtgatggatatgttaaagaaaaaaaagaaaaagaagctgagtgtgatggtgtgcgcctatagtcctagctacttgggaggctgaggcaggaggatcacttgagcccaggagttccaggccagcctgggcaatatagcaagacctcttctcaactcctgacctcaggtgatctgcccaccttggcctcccaaagtgctgggattacggcgtgagccaccatgcccagccaagacctcttctctaaaaaaaaaaaaaaaaaaaagaaaagaaaagaaaaaacatttttgccttaagtctcctctttttgttttatttctgattatgtacacccttttcctttctgtcttctctaggcacctgttctagtgtgtttaatgtatgtagttttgtttttctgtgttcatttaaagtatatattgttatgtgcttatgtatttttttttttttttttgagacggagtctgggtctgtcgtccaggcaggagtgcagtggtgcaatcttggctcactgcaagctctgcctcccgggttcacgccattctcctgactcagcctcctgagtagttgggactacaggcgcccaccatcatacccggctaatgtttctatttttagtagagacagggtttcaccgtgttagccaggatggtctcgatctcctgaccttgtgatccgcctgccttggcctcccaaaatgctgggattacaggcgtgaaccaccacacccggccttgcttatgtatttttaatttatgtaaatggtattgtattgtagatctcattgtctttatttttttaatttggcatgtttttaagattcatcatattattatcccctagttagatatactgagaatgctcgtaaccccctgccaccacacataaccctagacagacatcttttcatatgtccccttacagatctttgtgaataggcccaggctcatcacttctgggttgtagggtaatgcaagtgcaggcattttaggccaaacctcagtaattggttcctgaacatcagatgctatacatgaaaatgtcaaccagaagcaatttcttgttacttttaatgggaaaaaatacgattcattacaagtcaactcaaccccaaacctatttcctacagcatgactgaaacttagtaaagtagtagtctagtctggtaggatgtaaaatgcttaaaacatcattttctgttatcagacattgcttattagcaagtgtttgctttgaacgcaccaacaagaaccgtttgcctgctctctcgtgacctgccataggaaggccaagagcagccccacagaggatggtgctggatgtcctctgcaccagcagctgtggagatgcacatcctctttgacagtctgtgcttttcaaaatgtttatgcacttatgactactacgatgttctaacaagtgtatttggattataatttgagactttccgcccaccattttgttaaaaatgtattcattttggggcacataaatacacatttttttcttatataaacaccagacaacttctggtcaagattttgcctttaaacccttaggaagatgcacccctaggaagagacggtctcccttacaagaggtttaggtttcctaaaccttcagcctgggctgttgctgctatttgcaatgaaggggcaggcgatgattgtccaaggctggggcctcacctccatccccatcctaatgtcccccatccttgatctgaaggccttcatctgccccaggagttctcacattctttgttgatgttgttagttcctttactatatacttacctctckttccagtagtttctcctctgaaaccccaagttccgttttcttttgaacgtaagcaaatgacttccttgatttttctgagatgattatttgaaatttagaattagacataattagtagtaaaattccaaaaagaaactttaaagaaaccaatttttttttttwaataaaaaatagtataggccagttgctagttgctgagatacttgtatagccctcttaaaagaagactcagaggtttgttttttgtttttttgttttttgttttgaggggacagggtcttgttctgtcacccaggctggagtgcagtggtgcaataatagctcactgcagcctcaaactccttggctcaattgatcctctcacttcagcctctctggtcttagactacaggtatgtaccaccgtgcccagctaattttttgtagagacagcatctcgctatggctggtcttgaactcctgggctcaagtgatgctcctgcctcagcctctcaaagtgttgagattacaagcatgagccaccatgcccagccaagagatggttttaacagtacagcctcaggttgaggacagcattcagaaggtccgatggtttaatacaagaaggaggctggggttaacaatttactctttgttgcagatttttttcagatagctttcagtctcaaaactcactttctacccaaagctatgacagagatagcatgtttagcttccctacctggtcaaggatgccttctttgttctagaaccaaagtaggggctttatgaatggttgtgcatccacttccagtagtaatggctatacattatggagcacttaactgtgtggcgggtactgcacagagtgcttcatatctgttactcatttaatcttcacaatcactattttccaagtgaagcttagcaaagtgaagaaactcacagtttttcagaaagggtcacagttcaaaccccatatctgtctaacctccagaatacgggttatgggaactgtgggtgattctagataattcgattgtgtggattgtcattctcattgtaatctccttaaatctcattaaagctcattagccaacccaataaaacctaggctggcctttgcagtcaggatgctagtagtgatcaggtatgcaggcaaacagctgtagaacctccagacaaggctctctgctgtctgaatatacagtgtgttacagaaacatgattgacaaatgtaaatattcctgaaatagattcatctgagagagaggcatgctgctaatttgttaatcaattgatttggtatccatatcacccatgcctgctgaattcagtttttctttagaagggagttaaataaatagcactgagttctcaacctttggctccctgctccctggggcagcctgtagaccccccttttcattctgacagatgaataggcaagtgatcagttttgtcttttgggagggtggagggaagaggtagattctagtctggcctccatgattttatacctcagattgccacattggatttgaggatcctcagatctcagtgacatgtttraagaagatctcggattgggttatctctcctatagttgactattctcatttttctatgggttaattcttactagttttactttcaaaggtaattttaacatttcgggaaaacttacrtttgtcccctgtatttaatacgttaatacgatatttaagaactagatcctactttgtacagtatttcaaggtatcatgaaattaatggttttttgtttgtttgtttgtttgtttgtttgtttttttgaggcagggtcttactctgtcgcccaggctggagtgcagtcgtgtgatcttggcacactgcaacctctgcctcccgggttcaggtgattctcctgcctcagcctcctgagtagctgggactacaggtgcccaccaccacgccaagctaatttttggtatttttagtagagacagggtttcaccatattggccaggctggtctcgaactcctgaccttgtgatccacccaccttggcctcccaaagtgctgggattacaggcgtgaggcaccacacccagccagtgtgttctgaaagaaatagtgctttggaaaaatacagtttaaaaaaatgccttgtaatatgtatgtgcattatagaattataatttcatagcaaaagcttcttggaaaatatttgctgtagatatttagaatttattgggcatttactcattgtcaggcattgtggtaactacttgaaatagcttatttaatctggatatcattttttgcccaacactacgggtttgggaaaaaaggatgtgcatgatttcaccccagtatataactagaatttgcaatcagtcagggtaacatacacaaggttcacagtaaatatttactgtttaaatcgactgatgggaaaatcaggaacaggtagggggaggaaaaagagactatgacagtgggggacagataaagagtctgggagaagaaccagggaaagcagctgagaactttgcctcaagagtagaccttggtgccatcttgtgggtggatctggaaaggaccaagcagatgcacatcagttgctactaagatgccttgcagagccccaaatttccatgccacaatgatagaaaactgcaaatcagataatcagaactctggtctaggaatcagtggatcttagtgatggaatcagtgtcctgtccatcagcaagtcctgatcactctctccaaaacacatcctaaatctgtttatctctgtggccggccccaggccaagccaccatcttctcttgtttggactactgcagaagcttccttattggccttgcctctactctcatcctcccgtagttcattctccattggcagccaaagacatcttttttagaaagaagaatcagattatgtcacttctttgtataaaacctttaagcggcttttcatgaaatttagaataaaattcaaatgtcttgtcctgccttagaaaactctgcatcrtatgacccctgcttagctgtaacttcatctcatgaccttctttgtatggcccctgcttagctgtaacctcatctcttgaccttcttcctctttgtttcctccagtgtcccaccttatttccactgtaggtcctgtgcactagctgttcctctgcctggtactccttcctccacctcttgcatggttggctacttcctgtcattcagatctcacctcctgcattgctgcctcagaggggccttccttgactctgattcagttactctccatcacatctttccctgttgttaatcagagatattgtctgtcttgctgtctattgaatcctcaatgcctaggagaccatttggcacatagtggatgttcagtaaagatctgtcagaaggataaatgctgttttccagtttcttgatctttttccagctagatacagattacggccaggttattttagacttttcctaatagagcatgaaaagatcacaggaattaaattcagacagaactggrtcccattcctgcaactactgcttaccaactatttgaccatacttctctgagtgtcagcttcttcatcaataaaatggagttaatgagcttaccttgctcataaggtaagaactaaattggacttaaatatgattggatccaaagtatttacgtgttagatacttttttctattaaaactgactggaccatgttgttatttgcattttcctctcctgctacccaagggacaggattaggttctttgtactcctagtatctagcactgcacttgtcttacagtaataggtggtccacaagtgtctggatttagactcttccacacctaagaactgstatctcctgactctttccaggctgtgtccctttgatcacattatttctctttgtccagagagagaaacagatggtcactggttgtacatggaaagcctgaagggatagtatggttcagaccaaaattggatttatgtctttactgcagttcctgggttttgtatacaattaatgtaaattgaccccaggataactttctgtttctaataaaaggatgaaggaaaaaaagagatcgatcatatgattgttttgtagttcctaggacttaggctcttcgtaagattcttctttctgtttctttttttttttttttttttaagacagagtctcgccctgtcacycaggctggagtacagtggctctgtctcagctcagtgcaatctctgcctcccaggttcaatccctcctgagtagctgggattacaggcacccaccacacctggctaatttttgtatttttagtagagacagggttttactatgttggctaggctggtcttgagctcctgacctcaggtgatctgcccgcctcggcctcccaaagtgctgggattacaggcgtgaggcaccacgcccagccattctttctgtttcttaatggaataaagtacctatgaaattactctgaaaactacaagtcctgtattacatacatatatttatgtaataagctggtatgagtataatttctagataaatgattggtttaaaaagattagctgttgactgcacattaattccaaaatattttttgaataccatgtactagacactgttttgggtgttgggaatatagtaatgaataaagcaggtaaatccctgttgttatagaactctgtattccagtgggagaaacagacaaaaaagaagatagataataaaatatgtagtataccaaatggtgattgggagctaagaaataaaaacaaagcaggcaagggatagggagggtagaggggagtagaaattttacagaggttggaattatatatctattttctttctcacccacccctaatcaagatttgtaacataataactttgccttctaataccacatctaaatgatgttagatcagttaggcaaacgaaatcaaaacttctaataatttgtttcatatatctgtaaaccatatttacaaaaagttttacttttcaatattaaaatgcaaatcaacaccatcatrttgtctgatatcctaatattataacctttttaaataatcttaatacattcacaaatatttaaaagtataaaagattaagaacgtgtataattactgatatcagctattgaacatacttttgtttctatattgcttaaaaatgtcagttgcttttaaagctgaaagataaaatcaaagctatgctatttaaatttatttgaaatgattattcccttgtaaatattaatgtgaaaaataaattattattaagagggctgtgacctgaaaccttaggtcagtttgattatgatttccatacataaagaaaggatggayacaagaattccagaagttccagtcctcttttctagagcagtcaggaagttgtttactctttgagggcccactgctgacgtctgctcactgagtaatgtcatcagatttcctggtggtggttattttggggggagcagtggyaagtagttgtccggctgttaggagactctgctccatagaggtcctgagagccggatataccccgtagacaggatgtaaggttaaatgcaatctagttaagtaaataaagtaagcgttcagtggtaaaaaggaattgctgaaacatgaatgttttaaaatgatattgctaaaatttttacgtggcaaaattcatagtcttaaatcttttaaaagtgaacccatagctgcctttatttcttaaaataaatccaaaggtgagttacttttataagttcacatcataaatttatgctgtcctttgtctgtacaaatcaagttatttcaccagcttttggtgtagaccacatattcaggattgtttacctaggagggatgagccttttgccctgagctatccagacttttatcttttccctcagcttgtgaccaacactatgtaawtatgtatatacatactttttactcatgctggtcattaatatttaaacaattcattattgtctttatatttattttccttaccggtttccttaagtttgtactgttgattttctcaaacttaatgatttgaaagcttagtgtacttattttgtgacaaaaaggttttagactatagattttgcctctcattataatttagcagtagtatcctgtaagtcttactacataatattcacttttattttccaagttaactgtaggcatagtttgcatatctctctttgattcattacttttgtgagttaatatttttaagttttctaaggaggcaggattttttgttgtcgcttaaacttaagtttttaattcctagtttgcttcgttgaaggataaaaactgtacagtttttactttaggaatatattttaagggtttttttctggtaacctagtatatcatgtttttctaatatttataaatattttctttctttccattcagactttattttttatctatttgatccttcttagtaaatttcatgagtattctgtcagagactgagacaycaattcatataaaggacccaggtggctctctgascctgctttattgtggcagtagcagcatccctccagtttatgctttttctgctttctcttaygaaactgtgccccatactgtaggacataagcaaaatgattttctttctcttcttcctgtcattttcttcctttcttcttcctgagcagttccactgcattctccaagcaataggtcagtctcattcatttgctcattgctttaaacttgttcattaagtgctggtgccacaaacaaaaaactcatcgttcaaactggtctctcagagcctcttgctttccttcttcctgtaccgtgagagtatgatgattatacagaccatttcaagcacttgaaagttgattttaaaaaataacaaaacaaagccgggcgcggtggctcacgcctataattccagtactttgggaggccaaggcagacagatcacttgaggtcaggagttcgagaccaccctggccaatatggcaaaacccygtctctactaaaaataacaaaaattagccaggcgtggtggctcgtgcctgtagtcctggctactcgggaggctgaggcaggagaattgcttgaatctgggaagtggaggttgcagtgagctgagatcgcgccactgcactctagcctgggcgacagagtgagactccatctcaaaaaataaaaaataaaataaaaaagaaaatgattatacagaccagatgtctccttttttcctgattttaaaaaatatggtaaaatacacataacgtaaaatataccatcttaaccagttttaagtgtacggttgaatggtattaaatacattcataatgttgtgcarctgtgatcaccatctatctccagaactcttttcattttgtaaaactaaaacaatatatcaattaaacaagagcttccccattcttcccttccccttgtccctagcaaacacattctgctttctctctatatattttgactactccaagtacctcatgtaagtggaatcatatagaatttgtctttttgtgaytggcttatttcacttagcataatgttcttacagttcatctgttccatagcatatatgtcagaatttcctttttatggctgaataatattccattttatgcatataccacattttaaaatacatttattctttattttttaaaggaagaaataggatctcactgtgttgagctcactcccaggcccgagtgattctcctgccttagcctcccaagtacctgggactgcaggcacacgccaccactcctggctttgtttatttgttcatctgtcattagacacttgggctgttttcatgttttagaaattatgaataatgctgttatgaacatgtgcatacagatatctgtctgaatcactgctttttattcttttgaatatatacccaaaaggggattgttggatcatatgttaattctatttttttaattttttgaggaattgccattctgttttctgcagcagctataccatttaatatttccatcaacagggcacagaggttccagtttttccatgttctcatcagcacttgttattttctggtagtagtgtgaggtggtgtctcattgtggttttgattttcatttccctactggttattgatattgagcatcttttcatgtgcttattggccctttcttttattaatatatcttctttggagaagaatgtgtatgttcaagtcctttgcccatttttgaattgggttgttgttggattataggggttctctatatattgtagatattactctcttatcagatatatgattggcaattactttttccagttctgtggattgcatttttactctgttgatgttgtctttttatgcacaaaattttaaaattttgatgaagtttaatttgtctcttttttcttttgctgcctgtgccattgatatcatacccaaaaaaatcattgccaagtctagtgttgtgaagattttgccctatattctcttttaggaattctgtgtattaggtcttacatttaggtcttcaatccmttttgaataaatttttttatatggtgttagataagggtccaacttcattctttggatgtggttatccagttttcccagcaccatttgttgaaaacactctcctttcaccattgaatgttcttggctcccttgttaaaaattatttgaccctatacacaagggtttatttctgggccctttattctagttcgttggtctgtatgtctgtctttatgctagtaccacattattttgatcactgtagctttgtagtaagtcacaaaatcaggaagtgtgagttcttcagttatgttcttttcaggattgttttggctattcgagatcccttgagattccatatgaattttagaatgggtttttctgtttcttcaaaaaacatatttgggattttggtaaggattgcattgaatctatagattgctctgagtagtattgacatcttaacaatattaagtattgtaatttgtgaatgtgggatatgtttccatttattaaatctttttaatttttcagcaatattttgtagtttcacttgtacaaatctttcacctccttggttaaatcaattcttaagtgccttattctttttgatgctattgtaattggaattgttttttgtaatttccttttcagattggtcattgttagtgtatagaaatgcagcttgtttggtgtgttgcctttgtgtcctgatactttgctgactttattagttctaacaggcttttgtgtatgtgtgtgtggaatctttagggttttcttacctataagatcatacaaatgaataaagataattttacttcttattttctatttcgactgtcttttctttttcttacctaattgctccggctaggactttctatgttgaatagaagaagtaggcatccttgctttgttcctgatcttagaggaaaagtcctttaccattcattatgatgtttgctgtgggttttgttcatacatggctttttaaaaaatttgtttaaaaaaattttttttcttcaatttttaagtcccggggtacttagggatgtgcaggtttgttacataggtaaatgtgtgccatggtgttttgctgcacagatcaacccatcacccaggtattaagcccagcacctattagctattcttcctgatgctgtccctccctccgcctgccacaggcctcagtgtgtgttgttccccccacatgtccatgtgttctcatcattcagctcctgcttagagaacacacagtgtttggttttctgtgcctgttagtttgctgaggataatgcttccagctccatccgtgtttgtgcaaaggacgtgatckttttcctttttatggctgcacatacatggctttttaaaattattattatactttaagttctagggtacatgtgcacaatgtgcaggtttgttacatatgtatacatgtgccgtgctggtgtgctgcacccgttaactcatcatttwcattagrtatatctcctaatgctatcccctcccccctccmcacaccccacagcaggccccggtgtgtgatgttcctcaccctgtgtccaagtgttctcattgttcaattcccacctatgagtgagaacatgcagtgtttggttttctgtccttgcaatagtttgctcagaatgatggtttccagcttcatccatgtccctacaaaggacatgaactcatccttttttatggctgcatggcattccatggtgtatatgtaccacatttgcttaatccagtctatcattgatgggcatttgcgttggttccaagtctttgctattgtgaatagcgccgcaataaacatatgtgtgcatgtgtctttatagcagcatgatttataatcctttgggtatatacccagtaatgggagggctgggtcaaatggtatttctagttctagatccttgaggaattggcacactgtcttccacagtggttgaactagtttacagtcccaccaacagtgtaaaagtgttcctatttctccacatcctctccagcgcctgttgtttcctgactttttaatgatcgccattgtaactggtgtgagatggtatctcattgtggttttgatttgcatttctctgacggccagtgatgatgagcattttttcatgtgtctgttggctgcataaatgtcttcttttgagaagtgtctgttcatatcctttgcccacttgttgatagggttgtttgattttttcttgtaaatttgtttaagttctttgtagattctggatattagccctttgtcagatgggtagattgtaaaaattttctcccattytgtaggttgcctgttcactctgatggtagtttcttttgctgtgcagaagctctttagtttaattagatcccatttgtcaattttggcttttgttgccattgcttttggtattttagtcatgaagtccttgcccatgcctatgtcccgaatgatattgcctaggttttcttcctggggtttttatggttttaggtctaacatttaagtctttaatccatcttgaatttttgcgtaaggtgtaaggaagtgatccagtttcagctttctacatatggctagccagttttcccagcactatttattaaatagggaatcctttccccattkcttgtttttgtcaggtttgtcaaagatcagatggttgtagatgtatggtattatttctgagggctctgttctgttccattggtctatatctctgttttggtaccagtaccatgctgttttggttactgtagccttgcagtatagtttgaagtcaggtagcgtgatgcctccaactttgttcttttggcttaggattgtcttggcaatgcaggctcttttatggttccatatgaactttaaagtagtcttttccaattctgtgaagaaagtcattggtagcttgatggagatggcatttaatctataagttgccttgggcagtgtggccattttcacgatattgattcttcctatctgtgagcatggaatgttcttccatttgtttgtgtcctcttttattttgttgagcagtggtttgtagttctccttgaagaggtccttcacatcccttgtaagttggattcctaggtattctattctcttggaagcaattgtgaatgggagttcactcatgatttggctgtctgtctgttattggtgtataggaatgcttgtgatttttgcacattgattttgtatcctgagactttgctgaagttgcttatcagcttaaggagattttgggctgagacaatggggttttctaaatatacaatcatgtcatctgcaaacagggacaatttgacttcctcttttcctaattgaataccctctatttctttctcttgcctgattgccctggccagaacttccaacactatgttgaataggagtggtgagagagggcatccctgtcttgtgccagttttcaaagggaatgcttccagtttttgcccattcagtatgatattggctgtgggtttgtcataaatagcccttattattttgagatatgtcccatcaatacctagtttatcgagagtttttagcatgaagggctgttgaattttgtcaaaggccttttctgcatctattgagataatcatgtggtttttgtctttggttctgtttatatgctggattacgtttattggtttttgtatgttgaaccagtcttgcatcccagagatgaagccaacttgatcatggtagataagctttttgatgtgctgctggattcagtttgccagtattttattcaggatttttgcatcgatgttcatcagggatattggtctaaaattctcttttttttgttgtgtctctgccaggctttggtatcaggatgatgctggcctcataaaatgagttatggaggattccctctttytctattgatcggaatagtttcagaaggaatggtaccagctcctctttgtacgtctggtagaattcagctgtgaatccatcaggtacgggactttttttggttggtaggctattattgcctcaacttcagagcctgttattggtctattcagggattcagcttcttcctggtttarcctttggagggtgtatgtgtccaggaattcatccatttcttctagattttctagtttatttgtgtagaggtgtttatagtattctctgacggtagtttgtatttctgtgggatcggtggttatattcccttcatcattttctattgtgtctatttgattcttctctcttctttgttagtcttgctagcggtctgtcgattttgttgatcttttcaaacaaccagctcctggattcattgattttttgaagagttttttgtgtcgctatctccttcagttctgctctgatcttagttatttcttgccttctgctagcttttgaatgtgtttgctcttgcttctctaattcttctatttgtgatgttagggtgtcagttttagatcttttcctgctttctcttgtgggcatttactgctataaatttccctctacacactgctttaaatgtgtcccagagattctggtatgttgtgtctttgttctcgttggtttcaaagaacctctttatttctgccttcatttcgttatgtatccagtagtcattcgggagcaggttgtttagtttccatgtagttgggtggttttgagtgagtttcttaatcctgagttctagtttgactgcactgtggtctgagagacagtttgttataatttctgttcttttacatttgctgaggagtgctttacttccaactgtggtcaattttggaataagtgtgatgtggtggtgagaagaatgtatattttgttgatttggggtggagagttctgtagatgtctattaggtctgcttggtgcagagctgagttcaattcctggatatccttgttaactttctgtcttgttgatctgtctaatgttgacagtgggatgttaaagtctcccattattattgtgtgggagtctaagtctctttgtaggtctctaaggacttgccttatgaatctgggtgctcctgtattgggtgcatatatatttaggatagttagctcttcttgttgamttgatccctttaccattatgtaatggctttcttggtctcttttgatctttgttggtttaaagtctgttttatcagagactaggattgcaacccctactattttttgttttccatttgcttggtagatcttcctccatccctttattttgagcctgtgtgtgtctctgcatgtgagttgggtctcctgaatacagcacactgatgggtcttgactctatccaatttgccagtctgtgtcttttaattggagcatttagcccatttacatttaaggttaatattgttatgtgtgaatttgatcctgtcactatgatgttagctggttattttgctcgttagttgatgcagtttcttcctagccttgatggtctttacaatttggcatgtttttgcagtggctggtactggttgttcctttccatgtttagtgcttttttcaggagctcttgtaaggcaggcctggtggtgacaaaatctctcagcatttgcttgtctgtaaaggattttatttctccttcacttatgaagcttagtttggctggatatgaaattctgggttgaaaattcttttctttaagaatgttgaatattggcccccaccctcttctggcttgtagagtttctgctgagatatcagctgttagtctgatgggcttccctttgtgggtaacccgacctttctctctggctgcccttaacattttttccttcatttcaactttggtgaatctgacaattacgtgtcttggagttgctcttctcgaggagtatctttgtggcgttctctgtatttcctgaatttgaatgttggcctgccttggtaggttggagaagttttcctggataatatcctgcagagtgttttccaacttggttccattctccccgtcaatttcaggtacaccaatcagacgtagatttgatctttttacatagtcccacatttcttggaggctttgttcgtttctttttactcatttttctctaaacttctcttctcacttcatttcattcatttgatcttcagtcactgataccccttcttccacttgatcaaattggctactgaagcttgtgcatgtgtcacatagttctcatgtcatggttttcagctccatcaggtcatttaaggtattctctatgctgtttattctagttagccattcgtctaatattttttcaaggtttttagcttctttgcagtgggttcagacatcctcctttagctcggagaagttcgttattaccgattgtctgaagccttcttctctcaactcgtcaaagtcattctccgtccagctttgttccattgctggcgaggagctgcgttcctttggaggagaagaggcactccgatttttagaatgttcagcttttctgctctggtttctccccatctttgtggttttatctacctttggtctttgatgctggtgacctacagatggggttttggtgtggatgtcctttctgtttgttagttttccttctaacagtcaggaccctcaactgcaggcctgttggagtttgctggaggtccactccagaccctgtttgcctgggtatcaccagcggagaaccacaaatactgcagaacggcaaatgttgctgcctgatcatcccctggaagcttcgtctcagaggtgcacccagccgtatgaggtgtcagttggcccctactggaagatgtcttccagttaggctacttgggggtcagggatccgcttgaggaggcagactgtctgttctcagatctcgaactccgtgctgggaggaccactactctcttcaaagctgtcagacagggacgtttaagtctgcagaagtttctgctgccttttgttcagctatgccctgcccccagaggtggagtctatagaggcaggcaggcctccttgagctgtggtgggctccacccaggaattccctgaccccttgtgcttcccgggtgaggcgatgcccctccctgctctggctcatgctccatgggctgcacttactgtccgacaagccccagtgagatgaagccggtacctcagttggaaatgcagaaatcacccgtcttccrtgtcgcgcacgctgggagctgtagactggagctgttcctattcggccatcttggaacctcctgtgctcgtacatggctttttaaatgttgaggtagttcccttctatttctattttgttgagtgtttttatcatgaaaggatattgaattttgttaaatgccttttctgcattatttgaggtataatgaatgaggcttttgtcctttattctgtacaataatgtattacactgatcaattttcatatgtcaatacatccttgcatttcaggaatacatcccacttagtcatggtgtataatccttttattatgctgctgaattcagttttctagtattttgttgaggatttttgcatcagtgtttataagggatattggcctgtaattttcttttagtgtcttttgttgttgtcgttgttttgtttttgagatagagtctcactttgttacctaggctggaatgcagtggcatgattgttttgttttaagggatagggtcttgctstgttgcccaagttggaatgtagtggcacagtcttgtctcactgcagcctcgacttcctgggctcaaatgatcctcttcccttagcctcctgagtagctacgattataggtgcataccaccatgaccagctttttcttcttcttctcttttttatagagttagggtctcgttattttgcstaggcttgtcttgactcctggcctcaaacagtcctcccaccttagcctctcaaaagcgctgggattacaggtgtgagctaccacatctggccctaactttggtatcaaggtaatactggcgtcatagaatgagttaggaagtgtttctttctcttcaattttttgtaaaagtttgagaaggattgtattagttctttaaatgcttggtagaattcacctgtgaagctattgggtccaggggttttctttgttgggggatttttgattactgattcagtctccttactagtaatagatctattcaggttttctgtttctttatgatttggtcttcgtactttttgcrcttctaggaatttgtccattttatccagattatccaatttgttggtgtataagtgttaatagtactctcttagaatcctttttattgctgtagaattggtagcaatgtccctactttcatttctaattttggtaatttgagtcatttttatttttttctccatcttgctaaaggtttgtcaattttgttgatcatttcaaagaaccagcttttggtttccttgatttttctgtattatctattctctattgtattaatctttgctctaatygttatttccatctgctagctttgggtttagttttctctttttctagttccctaaattataaagttatgttgttgatttgagatcttattttctagtgtatttatagctattaatgttccccttagcctgtttttgctgctacatcccataagttttagtatgttgcgtttttgttttcattcatctccaagtattttctaatttatcttgtgtattcttctttgatctgttagttaagattgtgttgtttaatttccacaattttgtgaattttccagttttacttttgttattgatttctcactttatccttaagatactttgtgttacatctatcttttaaaatctattgagttttgatttgtggcctaatatgtagtctgtccttgagaatgtcccatgtgcacttgaggaaaatatatatgttgttattgggtagcacattctgtatatgtctattagatcttgttggtttattgtgttgcttaagtctagccattattgagaggggggtgttgaagtcttcaactataattttagaactgtctcttccttcaattctgtcagtttttactttatrtattttaatggtctgtcattgggtagataattgcttataattgttacatcttgttactctgttgaatgtttaacatatagtgtcctcctttgtctcttatagccttttttggtttaaagtctattttgtctgctgttagtataacttcccctgctcttttttgattactattagagtatctttttccatcctttcactttctatttttgtctttggatctaaagtgaatgtcttatagaccacatatagatgggttcattctgccaatctctgtcttttgattggagagtttaatccatttatatttaaagtaattactgagcttgcacaacaaagcaaggctgtgtctctacaaaacatttaaaaattaaccagatgaggtggcatatacctgtagtctcagctactcgggagactgaagtgggacgatctcttgagcccaggagttcaaggctacagtgagctatgatcatgccattgcactccagcctgggtgatagagcaggaccctgtccctaaaaataaataaataattactgataaaggtggacttaacttctgtcattttgctatttgtttttctgtatgtcacatagcttttytgtcttccatttctttaattactgtcttcttttgtgttcagttgattttttgtaatgcaatatttaaattcctttctcatttccctttgtgtatattctgtagctactttctttatggttagcatggggattatagttaacatcctaatgttatataaatatttaatttgaattatgccagcttaacttcaataacatacaaaaattctactcctatactgctttattcccacccttttcagttattgatgtcacaaaattaaagctttatgtagttggtcctccatattggtgggttccacgtccatggattcagccaactgaagattgaaaatatttaggaaaataaaaataaaacatgtaaaataatacagcattaagaactgtttacatagcattacattgtattaggtattataagtaagtagagacaatttaaagcgtagaggagaatgggaatatgttatataaggtacttgagcatccatagattttcatatatatgggtgttcctggaaccaattccctgcagataacaagggacaactgtacattgtgtgcccaaaagcgtacactaatactttcaaatgtctcttatttaggaaataaaatgcaaaatgtagttacccacaaaagttacaataatacttccttttagaccaatgattttttttttccaccaaactgtattcatctcttaaatcatgtaggaaacaaacaaaaggagttataagccatttatacaatagcaatagcttttataattatccatggtttcacttttattgagatctttatttcttcagacagctttgagttactgtctagtgtccttttattttaccctgcaggactcccttgaacatttcttgcagggcatatctagtggtaatgaactcccttagtttttttggtttgttttattttgtttttgtttttgtttttgtttttcattctggagatgtcttaattcctccctcacttttgaatgaagttttgccraatataggatctttgattgacgattagctgacctccaaagtttctgatgagagatctattgataatcttattgaggatttcttgtgtgtgaccagttgcttctttcttgctgctttcttttttatttttcttcttttttatttatttattttttttgagatggcatcttgctctgttgtccaggctggagtgcaatggtgcagtctcggctcactgcaacttctgcctcccaggttcaagcaattctcctgcctcagcctcctgagtagctgggattacaggcacccgccaccacacccagctaatttttttttttgtatttttagtagagacggggtttcaccatgttggccaggctggtttcgaattcctggcctcaggtgatctgtctgtctcagcctcccaaagtgctgggattacaggcgtgagccaccacgcccagttcttgctgctttcaagattctctttttgtctttgagcagtttcattataatgtgtcttgatatgggtctctttgagttcatcttacttattgtttgttgagcttctttatgtcctacatcaagtttgggatattttcttcatacattttttctttccctttctcttcagcatctgggactcccgtgatgcatatattagcttgtttcatggtgtccttcaggcactgtaagctctgttcactatttttttaaaggttttttctctttcccagactcgataatttcaattgtcccctctctaagtgtgctcattctttcttttgcctgcccaaatttgcctttgaatctctttagtgaatttttcattccagttattgtacttttcagctccagaaattatttttggtttctttttagtttttttcatctctttacttagattttcatgttgttcgtacatcattttcttgactttctccacatctttctttagttcttttagcatcttgaagttgttgtaaagtctttgtctagtagatctgccattaggtatctttcagggatggttgctgttgatttagtttttttcatttgaattggctgtactttcctgtttgtgtgctttgtgaatttgtgttgaaaactggacatttgaatgtaataatgtggtaactctggaaatcattctccgtcttccccaggatttgctgttattgttttgttttgttttgtttttaattgtggtaggccatctctgtgccaaggatcagtctaatgtgtaaactcaaggtcttctcaggcattttctaagcctttccctaggcttgcataatcactttctagttttccctgtatatgccattgcttttcaatgccttagtccctaatgtctgactctcaaaggggataaaagagaaaaatgaaaggagaggaagggcactagccctttaaatctcctagaagtctcttcaactggagggggaatggcttgcaacaatgggagaaagtgcaacaatgcaccccttctttgtctgcacctctgtatcagtgatcagagcacagatccctgatatttggaggacatggttgtttttgccttccctgggtcctgcaagttgtgttcaggttgctttaggaacacatgcacagctgcccaccatgggcctgggtacctgctatgtgctaagagctaaaattaactgcggtttaccatccaagccttcccctggaagttgcacgtcttcaattgttcctaaaatagttgcatcagacatattctgccagtgcaatattgtctaggtggggaaacagattcctggtgcttcttactctactgtcttctctaaatccatcttttaagactctcctgtggacctcttggaccatcttccctcataaaaattctggctttggcatccagttacaccagtatgagactggcccrtagttacacaactcaagagaataggtaataaccatgcactgtctgttctgactctttcaccctactgaagaatcttcctcctcagtctttggtctagaatattagggaccctcattctttttatgccttctgagagataaaattattgcagagcaatgcagaaactgagccagtggcccataattactagacatcagcttctcatggttaaaaatatatgtggatttttctsccatcactaagcaaacttcgtaatgtgtttacyagaataggtcactgtttgaggggagagattggaggagggcagtcagttgggaaacattttgtaggaagtcttatggatctagttcttctgttgctgtgacgaatcataccatcacacagaggcccagattgggatctcatcaacacctacagagtcactgggcaaattacaaaatgtgtctcttcccctgggtagcagcccagtgccagaattcatcacctggagctggttttcagtcccaccttctcccttccttgggcccctttgtgttgtatacaggctattcaaatcttctagtggtcctgagtttacagcacagtgtatggagctaaacaaacctgggtggaatcccagcactaccacttgctgtgtggtcttaatgcagggtacttagaacttcagttttctagctataaactctcaccacattactatcagattcagtgaaataacatgtgcagcccttagcacagtaaccagaacacactaagtcttccattggtgctgtgattgttattactcactggggtttggttatgatattacatttatctttgatttagcattacattctcaaatggataagtacttacagtaagtgctattatgctcctctgtaaaatagaaagtgtcaaccatttttcaatgacattccatggttctgactgctggattgcattattcatgtgccatttgggtgtaagatttcattgtccatcaggaaaaaaatggaaataggcacagagggaatcagcgtttatttagtatctattattggggggctctctatattgtcatctcatttggcctttaacaaatgagaagttgargctgaggaagattaattcacttaaagtcacatgtagctagtaaaaggcaaagccagaatcacattcattttatttgttcattttatttctcctttcctgctccccacttttcctgggggctataaggagatccttaggattcctcataatcatttcatttatctactatttactttatttgcctctagaatagaaattttgctttcatttttggcactgtttagagagagaaaaagttaagcttctctttctccrttgtcttttcatttttaagccaatctctttcttacaggtagcagtagctgatgtgcwgtttggccccatgagatttcatcaagatcaacttcaggtaataatgaackatgctgtatttttcacatgctgattttctttaaaaagggtggaggtggagctaaatttacacatttaaaatagtctttcatttagataatagtgtttggaccaatgttaaattccctgaactctgtaacagtattatagttatataagagaatatcctgttcttagaaatacacattgtggtgtttagagatgaagaagtgtttgtagcctactttcattggttcagcaataggtcaggcacggtggctcatgcctataatcccagcactttgggaggctgaggcagtaggatctcttgagcttgaggagtccttgaggagtttgaaaccagcctgggcaacatagggagacccagtttctgcaacaacagcaacaayaaattagatggacatgggggtgtgtgtgcctgtggtcccagctacttggaaggctgagatkggagaatcacctgagcccgggargtcaaggctgcagtgagtcatgatcacaccattgcactgcagcctgggcaacagagtgagaccctgtctcaaacaaacaaaagaaaaaaaattggttcagcaataaataaaaaatgtgtataattgtatgtatgtacatgtatgtgtttagagagagagagaaagcaaagcaaaggtggcaaaatgttaattgatgaatgtagagaaagggcatgtttagtgttcattttcattcacgtttctgtagatttgaaattttccaatataaaaagtaaaaagattgtcttttcaatgttgctgaatcagctctgtcagagagaagatatctgtaatttatctaattcaaaatatgagacagaaaacaaccaattgatgaacaatgagatcacatggacacaggaaggggaatatcacactctggggactgtggtggggaggggggaggggggagggatagcattgggagatatacctaatgctagatgacgagttagtgggtgcagcgcaccagcatggcacatgtatacatatgtaactaacctgcacaatgtgcacatgtaccctaaaacttaaagtataattaaaaaaaaaaaaaagaaaacaaccaattgaaattcagcgaagttatccatgctccccgcacatgaacatgtttcattcactattacatttaaaaatatatgagaagtgctgacagaaatgtgtgctcttagttctttgcatgtatggtctttgtgtagttgagtaaactcggaagaaataagccttaggagggtttctgatagctttgcagtctgtttcacaggctgcccatctcctccttaccactgttgccccattttcagtctgcttctgaagggatggagcacgggtgctcctgaaccagattgggagtgggaatagcagggagagagagggaaggaggctggctggataaggaagacgctatggatacaggcctcgcttgctccaggccaggactgacgtgattggggcagccagccactgtcctgggcagaggcacagatgctacctcttgcacctggtgactgtgtcacttaactgataggctttgaagtgtcacattttggtctactttaaatctttcttcttttaatcaaagcaattttttttttaacttggaggaattacataaaatcttgagtcaaacatttcaatacattatttataggattaagtattctaataatttcaccaagatattagcattcaccatctgagaacttacccagttaactttctttyagctaaaataaatattaatgtgttttaattcttttagtttcaagataaaatgcttaactaaatctttgttgagttctgccagtgggtttcttagcaaaaaagtaggcatatggccaggtgcagtggctcacacctgcaatcccagcactttgggaggccacagcaggtggatcacttgagtccaggagttctagactagcctgggcaacatggagggaccccatctctactgaaaatacaaaaattagccgggcatgtggtggcgcacacctgtaatctcccagccactgggggctctgaggtacaagaacactggaaccctggaggtggaggttgcagtgagctgacatcacacccctgtacaccggcccatgcaacagaggaagaccctgttgcccacccaccatccccccaaaacacacacacacacacacacacacacacacacacacacacacacacacacacacacacagaaatgacgattctgaccaggcgcggtggctcacgcctgtaatcccaacactttgggaggctgaggtgggaggattacttgaagccaggagttcgaaatcagcctggccaacatggcaaaaccccgtctctactaaaaatacaaaaattagctgggcatggtggcatgtgcctgtggcccaactactcggcagggctgaggtgggagaatcacttgaacctgggaggcagaggttgcagtgagccaagatcatgccattacactccagcctgagcaacagagcaagactctgtctcaagaaaaaaaaagtgtaagaaatgacaattctaacatctttttttaaaaaaagtgtttgtgctcttttgattcaggtacttttagtgtttaccaaagaagataaccaatgtaatggattctgcagggcatgtgaaaaagcagggtttaagtgtacagttaccaaggaggctcaggctgtycttgcctgtttcctggacaaacatcatgacattatcatcatagaccacagaaatcctcgacagctggatgcagaggcactgtgcaggtaagcccaagactcgggcctaaatagtcccattggcctttctgacaatacatgcagcctagaaatagattaaattagactcactctcttttaagttgctttccatgcatgtgaaataaacaaaatattagaacctcactatttataggactgatgcatatctcttttgttttgtcttgcttcactttacttgaaacagtaagaaaatgtgaataataagaattattaagggtcaaagtgaaacccaaaatgtaattaaccrcaagtatcacttgtatattagtgcagtaagaattataatttttcagattgttttcaaagttttaaaaattttgaaaattgtcttttaatgttcgatgaatgggctttatttattatacttgcaccttgtcaatattatgagagaattctctgtagtgacctaaacctaaaaaatgccttttaaagaaagttatttgttgctgatggaagcaaggcaaatataaaattttatgacatattaaytttaaggacatttaaaatcttgacttttaagagagagaaaagatataagctaagtagattaaaaacccatgggttaaaaaccgaggtgacaagcaaatgacaacatattaaaagattatttatggggtatgtggtgacgtcaacatgggtttgtttccttggtgttgagaactctacactcctggtagtcagactaggtagcgtttacccttccatgacttgcctccagtagtttctcctgtggccttgatctagtgcctgaaatgtgcctgtgttcctcatctgtttcaatctgcatgacttcacaataagccatcatcattgtagcccagatttctttttttttttcttgtgacggagtctcactctgtaacccagtctggagtgcaaggctcgatctcagctcactgcaacctccacctccagggttcaagggattctcctgcctcagcctcccaagtagctgggattacaggcgcacaccaccatgcctggctaattttgtattkttaatagagacggtgtttgaccatattgrccaggctggtcttgaactcctgaccccaagtgatccatctgcctcagcctcccaaagtgctgggattacaggtgtgagccaccgcactgtgcccgccctaccccagatttcttgacatgtcatttggccagtcacccagcacattcatgggggattgcagcccaaaagaaatggagagagctccggccaggaaaaagggaggwccaggtccttktttggctcttcctggatagcygcttgtctctgggtaactctgccttctctggggatgttttagctcagctgtaaatttggaacacttggtttccagtatcccttttatccctaacattgaatagataccactcagaggaagggaagatgatatctaaattacatggtgcttggtagtcatggtggaatgttgcaaggcagtagaggtgtctaaggtgggccaaatggctgccgagatagaagagggaggacagggtgaggggctggagaaaatttggcctctttcctagtcttgtccaggcccaagcctagccacaggtatgtgctaggcaatgaaagttcatacttttaaaggtgactactagagcatcttgtattgtaaaagaaaatttaaattgtgttggttacgctccactgttaaaaattgtggtaaaagaaacataacattaactttatgttccactttttaagggaagaaaatgtactattgctgtacattttaggaatattctaaacaaatagggttaattcattcagcagatttttattgagctatgtacaagagaatgttttagactgaaagttataaaatgaagttcttgtcttctatgagcttatagactagaggagctgaaatatttcaatgaaaaaaagtaatgttacgtgctcagttaaaaactcacacaaataccaaattccataagcactatagttaatcagagttctttcgtcatgtaaataacaattttatatagttttaaagtaaagaatgggaactggattgctttaatatatggttttagagaagcagagaatgtcagatgtgcctctcctctatgaagtgcctagcactctccatccagcctctcctcaggacctggggctcactaagtgaaaccctgagatttagaagctttgctttatattgaacccaactttgtccacagttggcgcacaggattgctagaacagagctattattcctcttccccagaatggacttccaacactggaggacaggaattgtgtccccccaccccagacatctttccttttctgaactgagcacacccttactgctatgagtggctcctaacagatcctggtttcatattcccaccacatcaagggtgcttcccctgagtacccttttctgattgatagaccttgtaagcatggctccagaaccgaaaagctcacactaggtttaggggaaccagtgacaagtaagcagaacagtcccctccactgtgctagccagagagagcaggcctttacaaatgtaatccccgatcacatttatttcctgatggccacatcacagccttggtcaagaatctcargtgtttctcacaagctgttttctaccacgtcatctccatcttgttgggtgaggatttggggtagggatgggtccttgtgctaatcgtagtgagttttctagaggcaagagcagaccctgatttattttcctaatcagttttgtcttcattctggcccttacctggcttatctcccttaagatcatccctttaaggatgcccgcccactttggactgttcaagaaatctttccaggctccccacccccgaaccagcttgccctgtctctgagctgacttacatggctcttgagaccttagccctgcagaattctgtccttcccttcatcttcccttttgggatacctaatcaacactgcctatggagagcttttcatcggttgttgacctgtctaaatgactagcattcacctgtatctctctgttgggggcatttggaactccttacactccttatgagatgccttgctaacagcaaatattctatgtctattatatttccaaatctaccagtttaggaaccctacgttgtaagtctcctcaggtctgggcactgcatttggtactagagctacatagatgagtaagatgtgcttcttgtctctgaggagctaatactttagttagcagggaaagtgagtgatttcggtataggcttgtaagtgcccgcagaagaggtttacgcagagtgttgtgggtgcctgtgtcaaagagggcttcgcaagaggatacttgagttgcatcttaaaggatgagcaggagttttgaaaggaaaaaaggtggagaaaatgttccaggtagagggagcggcatgtgtagaaacaggcaggacatccgggcacctctgctcagtgctagatggctgctggtcaggcagatgtggagtaggtgtcaggggaggttggaacagcagacgtgaaccaaatgatgaaggccttgtgtgctaagccaaaggctgtggactctaccccgtaggtagttgaaacactgatagattctgcgcaggaaagtgttgagcaggatagaaaaataacttggctgccaagtggagaatggagtagaaaactggaggagatgaggcaaatcaatcagttgtgaggctgctagaggccatccagtagttcctaacagagtatagcttcatattcccactgtagcacttgatatcaatgtctcctcccaacttcctatcaaaaaacccatgaagagggaaaaagagacaaaaattgaccatagcaataataaataaaaacccacaaagataagatgataggtcagaagctgagagaacagaaaaggataggaatctctactgtatctgtcgtaccgtggagactaataaagaagcctgtttctgaactgtgcctcaagcacttcagtctttgaagctgaaataccagtggccataaaggaaggcagtggaaacaggctttgctttactcccactgtgttctgccaagcctgggatgctggagttgctctaaccagagaaacagatgactgagccccagcagagcagcaaggctttatgagctgggcagaggcctgcactcttgcccctgccatccctgctgcccctgattctttactttctgcatctactcagaaacccaaggtaaggaagagagggatatggacagagacatggtttttcctactatgttttaagaagggacagaggtataaggaacctgaagacagttctccacatactgcagtttcaaaacaacaaattgcatcagttctcaggttcagtttgagaatcagagagaacaggccaggagccccgctctgcagcagacctgtgcatgcctgctggcagtgttctccaagcccgaactgtgcttgttgatgtgatctaccgcccagacctaagaggaggacagctgctgacaccaagggttcagtgaagaggtgctaaggaaactcttgtgaccctctttgttggcaaactcttagcctgcatagatgcgaattgcattcaggggtgtgtaaacaggatgagaaggggggcctgtgaaaagtgccaccacataatgaggggggaaagaacagccctgaagactaagaaaattattttttataagacactgtagaaccttttgaagacatatgcttagtggactcagaagaggtgcagcagtatttcttggtgcaacaggagtaggtctctgtaataaaagggaagatctcataaagggatatagaggaaataaaaaaagtactacttgaaaacccaaaacgcattaacagaattaaaatctatgttgaatgcagaagcaagattgaactcagagcaccagatgcttttatacaatttcttgattcaccttggtgtgcagatcctttataccattataaatcccattctttttcatctgaaactcattccacatggcagagaaaaatagcaaagcacaagtaatggagttgtgcttttgtgaaacttaactcattaaagggctgggctatgttcttatagtgagcctccattatgtggccttttttccagtgttgtgttgagaccattatcagaattatttgtagttgcctagagtagcttgagtctggtagttgcccccagtatccatttctattcttttcctaataacagaatctctgatgtgtagctgggcatatggctacctagaaaatagattgcattccctagtttttcttacagctggccaatggacctatcatgtgtatcttctggaaagtatacttagggaaggagcattccctttttcctgctatctggaatgtggacattatggctagtgttcagtatctgtcttggaccatgaggaagaaacctcatgtacagacaatagtagagaaacactggtaggagctaggttcctgatcctgcagagtccatggcagccctggactgtctcctctgcacatttttgatgtgtgagacagatactgtttaaaccactcttctctggtgttttctatcttgtgtggccaaaaggattcctaatggtaaaccaagtagcatgcttttaagactttcccagtgaggccgggcttggtggctcacacctctaatcccagcactttgggaggccaaggcaggcrgattgcttgagcccaggagttcgagaccagcttgagccacatggtgaaaccctatctttacaaaacatcaaaaaataaaccaagcatggttggcacttgcctgtagtcccagctacttgagaggccgatgtgagaggatcacttgagcccaggaggtcaaagctgcagtgtgccatgatcacaccactacacttgagcctggccgacagagcaagaccttgtctcaaaaaaaaagtggggtgggtggggacttccctgagtacttaacactgctttcagaatctcattctacaggatcgcactccatctttttcgtgaccttcttgaattctgacttcctgaacattcaggtatacatttcaataatgccaagtaatttctttcctagttttcatgaattccartgcaaggatgttatttttcaactcagtttcctgacatttctgttttctagcccgttcttccttcatatgcaccagaaaaggtcccagtatgtctctacctttttatacagttttagagctgtttttaagggcttatctccaggtaaacaaggtcctcccttccactttatccttaatccagtgcttctcattcttgtgtctccagataggagtagttcattcaaagctccttagtgagatcacctacctacttgcctacttgccattacatcactcccatcttgatttttcttctaaaaagctgaaagctggtttgaaatggctacatacttaaatttgccctttctccttccaaatctctgtgatatgatggaaatgtaaacacaggacagatacagtgtcactagaagtgatgaaaataccatttgtgagtcacgccttattccctgtttgagatcagtgttaggatgagtattagtcagcaggtgtgatgagtgcactagctgtgtctgtgagtgtctgttgtgccagtgacccctccaggcctaagcagcctttcccatagctcttccccaggaagctgagcctgcctgctctccccagtcagggggaccagggttgaactggggattgacacctggccagtaagccctgaggtggcgtgtctgcaaggggtcttccagcagagccatgcagcacccttaggttggctccctctggagaggataggcaggtggatgctagaggagtacagagtgaacacagaaaagcagggatgttgagggggtggggaagaagtgaacatgagagagactggctggtcgctagagctgcttttccattcctgagcaacttccctacccctggcctattctgcatgtgttgttagattcagcctttctcaacctggattccataagaaaatgaagcccgaatccctacaggcaagaatgggcaaaggagaacacagtcttgcccattcatttgtgtattatgtgtgactgcctttgtgctacagtggtagagttgagtagttgtgacaagagtccatatggcctgcaaagcctaaaatatttattccctgaccctttacagaaaagtttgctaagactggggcgggggcatttggctgagtgtgctggctcacgcctgtaatcccagcactttgggaggccaaggcaggagactgcttgaatgcaggagtttgagaccagcctgggcaatgtagtgagacctcgtctctacaaaaaataaaaaaattagccagtggcatgtgccagctggtcgcagctactcatagctggagcccaggaggtcaagactgcagtgagctgtgattgcaccactgtactccagcctggtgacaaataggaacctgtctcaaaaagatgggggcatccatcgtgcatgatgaatctcttacgcatctggaatggttatgttgtataccatctttgagagacttgagaactagtcactcaaattattttctggattttgtgattcagaagtggctctatwccttgaactaacagctgaagcaaatgcagtcagtcttgactggtttctgtgccatcctagacacattctccaggaggccagctcacctttgacttgactagggcagtctggttatgttcctctacattctcctccttttaragtccctctccaacataagtcgtcttcctctgggtctggggtgagttcctttcttctccagtggagttgttcttctctagagtctgctcgcttctcccagtgtaggatgagttcaaagctgttgcatatctccagtggagcacttcttttctttcttttactctatgtcacatttatttctgctctgatattttggctgtattttcattccccatggcctctaaagctgcttctgcaaaagggttgaatttactctgtatgggaagtcttgtactctttgggtaactttagtcgaacagtctcttgtacttttctagaccagtcctctgttcttaaccttttcatgaggtgttgatgctcttctttytgaccgattacaatatcttgcatttcctagttttggattatttttggttatttagcctccattttacctagtaactyttcatcctttgtgctccttagaatgcagtggagccagcccttgggctcctttatccccgttgtaagcatagccatcatyttgtggtaatagacataaacttgcattttcctttggaagaagagaccaacggcttctttcatgtaagcacaaagcagggaaaatactccgcctgaaacaatgcaggttaacaaagatcagaacaagtagaatrcatgtcatcttagttagctgttaattcatactccataatcrttacagttaacacagtccactgagtgggagtttgcccccaaaagagagaaagatcaagtagtcaagaaggtgagtgaattcagagagtgaggggatcatttactctcccttctacccctcttccaactttaattgttgtaattgtttaagtatatttggtttttaaggattatttttatatttattttaaagttttgtgttttttttaaggtctatcagatcatcaaaactctcagaaaacacagttattgttggtgtagtacgcaggtaaactttcatttttttaatgttgaaattgaggtaccagtgtaatacttgctcttaacagatggccaaataacagcttgcatgctgtgtcaggcatgyccctttgtagtgtggccttctcttctttattctttattttattttgctgcttcagttaacttcctggaaggactttgtgctctcatgctagatttttgtgatttttaaactgcctttcactttagaaacaggcgaactatgagagaattccattcctaaaagtatgaatgttttccaggggtatcttcctagggccttctaactccaaatatctctgaggggggaatcttaggttttgtctttaaattggaggtaaggaaagaagagaaatatattaggagaagggcaagtattcaaattaatgttatttagcttatatgtttttatacatagaagaaatgtttctatgtactttaaagttttttcctgagctgtaggggagaaaggaattaaaaaaaaaacctggaagtagaagaaaataggagtagtttaaattaaaaattttatatattaaaaagatatatgaacactcctgtattcctgctattaatgtagtttgtgtatttcaagtattataatatataattccaaaaagctaaatgtgaaattgaaacagaaaacagttttcaactttatcctttaaatttgtatattaatctgattcatctaaaagtactcattacataacgaagtattatttaaattagtagagtaaaagaggtgagatgtaattgataaaaactatgtctatgttctttactgtgttattttgaagggtggatagagaagagttgtccgtaatgcctttcatttctgctggatttacaagggtatgtactcacttatttgttatacaagtataattcaatttgagaaattattttatctcagttcagtacccagcaaaagctttgtattaatttgaagaaaaaaaattgtctggccaggcgtggtggctcatacctgtaatcccagcactttgggaggtcgaggtaggaggaccccttgggcccaggagttcaagaccagcctgggcaacataaggagaacctgcctcaatcgtacttaaaaaaaaaattactgtccttgttttacagtttggtttaactttataatctgctaatctaatctataatagttcatagtctctcaaaactatgcctgctaaggtcatctaaacataataaaatctcctttaatggcattttcactaaaaattataccacaggatgtattgttatgatgctgacatgtatacatgcaactttttaagctagttcaaggattctggaaataaggcagcccaaacacagctctctttctctccactcccagcttcaatctcttggtttccctaagccaaaaggttgcttggggctttggtcagctggctgcaaatgaggccttaggaatcatacagagagaacttaaataaggctgacccttgggcagatttgtagcccaggttagtataagaaaggtagtcaagaaatctcaagccatgaatttagtttcaagttttctggatgagtaggactcctaagtgcctggcagaagcaaatataaatcctccccagaggaagacagcttcatctttgcccgcagaggatctccataaataattgctcaagggcagccggcagcagtcagtcaaagctggagtcaatccaccaggtgacagggcatcccaaggaaaaactaggagggaaaaaagcctagtaacagaccctcacacccctcagagattagttatgagatatgaattataaagcaagtatgcttactataggtaaagaaataaaagataaaccaggaaatatctgcaaggaataggaaactattaaaagtggcatagcaaattttatgaggaacaaaactgaattgtaagaaatgaaaacacagtaattgaacaatttaaaacttagtaagtcacatgtagcacagaaatacaatgacaggaaataagttagacaggtgaagaaatgtggaggatagtgtgtgaagttttagttgtgtatatgtaactggagttccaggagaagaggaaggatagaacagaggaaatatttgaagagttactagctgaaaattttccagaactgatgaaaaactaattcatagattcatgaattctgacatatccaaagtagagtaaattttaaaagaggacacatcctagtgaaactgcaaaaaaaaaaaaaaagaaaaggacttaaaatcagccacaggtaaaagattaccttcaaaagactgacacacacactaacagctagcttctcagcagcaacaagtggaaaacagaagacagtggaataacattttcaatgcaataaaagaaaataacttccttgggaggccgaggtgggcagatcacgaggtcaggagattgagaccatcctggccaacatggtgaaaccctgtcttgactaaaaatacaaaaattagctgggcatggtggtgcacacctgtaatcccagctacttgggaggctgaggcaggagaatcgcctgaaccagggatttggaggtaggttgcagtgagccgagattgtgccactgcactccagcctggcaacagagcgatactccatctcaaaaaaaaaaaaaaaaaaaaaagaaagaaaagaaaagaacttcctagaattttatacctagcatacatatctttcaacaatgaaggtgaaataaagactttcagaaatgtggacattgagagaatttgtaactagcagatcctcacaaggaaatgctaaaggatatacttcaaccagaaggaatgtgaattccaggtggaaggtctgaaatgcaagagatgagtaaagaaaatggtctgtatagggtaaatataaatacatatttactgtatgaaacaataataatgtctagtttgatgagaggatacagggagaaagagactacaaactaatcatatatctagccaagttattgtttaacctttcttttggggatatacataaaattcagagatatagttccccaaggaaaataattcagaaaaggactctaaccatataagaaatgaactacaacagaaatttgaagaggagaggagggaaaagtagtgagctataaaccctgccatgtgcatactccttcatggtgcctcctgctttctctggctctctgtctttctttatagatgtacccacacttatgcatatatgtataagattagtcccaaacagataaacatagactagaatatataatattcttttaaaagaagggacatactcaaagaggaattttaataatagctcacttttaaattctagactatcttagtcaacgctaggtgtttgtaaggtttgtggggaggatgcaggcattcttacagacttatctaagaggtagagtgagaatgagcccaagaagtattcatctttgtgggaaatgttctatgtgggaaatactttattctgggggtaattggtatcttgttttcaaataatagtaaagaaatctatgtctgcttttgagatgatgaaaaggagggtaaccgctgatagaacaggaaacttaagtaaaacttccaaaataacaagaggaaatagggagtttacagcaacttgatcaaattgagaagctgaagaaagatgaaacaacagtgtaaaatcagtgagaaacacaaagtcagatagaaagaatakaagcaggctgggcacggtggctcacgcctgtaatcccaacactttgggaggctgaggcaggtggatcacctgaggtcaagagttccagaccagcctggccagcatggcgaaaccccgtctctactaaaaatccaaaaattacccgggcatggtggcgcacacctgtaatcccagctactcaggaggctgaagaaggagaatcccttgaacccaggaggtggaggttgcagtgagctgagattgcaccactgcactccagcctgcacagtgggagcaagactccatctcaaaaaaaaaaagaaagaataaaagcaaatgtatatgaatgggctgaattcttcctttaaaagataggctgttagattgggttgaaaaagtacaattctataacagttacaagacacttaacatgataaaaggagcttaagtaaaagaacatagaggtagcaagtaaatgcagacaaaaagaacacagatattgatattgatattaatatcagatgaggtggaatttaagattttagtttatatgtaaatacagttttatataaaaagcacacattaggttattgattatatagctgtggctttcttgtgtttccccctttttggacaacccccacaacatacatacacatcagcacctacctccattccctgacctctagtaattcctgttaaattgtatgagaacagtttacttagccagcagtaaggcgtcccaggttggaagtcagaagtcccctatggatctttatgtcatccctccctaagctgcttgcttttgcaactaaggccgcaaaactggctattccttttaacaagaaccttagaagcttccactttctagtgaaacttaggggatagattattccctctgccttgggttatttgcttacctacagccgcatgaggtcattaaggcttgtgtttgtttgaggtctctttgaaagtacatagatgcactgttggaaatttgtgcctggtgactgccgtgtttgaaattctgcccaagaagtctatcagcatagttctgtggaccagaaagagcatcctggtagaaggtcaagtaaatcatggtccttatattttcttagtattactgtgttatcatggagctaacttgaaaagtaactgacacacacactcttgctgcctcaagcctgcacaccttaatcaaaatcaaggaaccccctgaagacttcaatggaaccacttttaggtgcacgcccctgtgaggacacgtccatgcaaaaagcccaaaaagctttacagtagtcactttagaagcacctgacttaggaaatgtagaggtagtggcaggctctccattttgtaggtgaggaattcatgcggtcaaccagtcctcagagaccactaactaattagtgctaactaatctcatccagagtctcttacttttgtgtgacaaaaggatgctcaggttactgagaagaagagttagacctggaggaaggggattctcccagtcatggctgtaggcggtggtgccaaggcttgaatctgaaagctaacaccataatgatatctctggtacaggggatggggcataggaaaggccatgagctattttgtgttttagccatgtttcaggattgaaaagtaggtggaggacctgctagcttcctcaattggatttggccattgagtcggtagactcactgctgggtgcacattagaatcacctgaataacatccctagggagtctgtttcagttggtctggggaggggcctgyatgctggtgttttttcaaattgcagataattctaatatgcasctgagagttgagaaccactgggagaggcctagcaaagatgggctcaggtcctagccgtgggtgtgatatgctttggagaaagtgaggttaagttagcttagaagtctaggatttgtagtcccagcccctttcgtggaagaaggttaagggagaggagactaaccgctgtttaagcagagggaataagcttgctttctgaggatccctggacctgattcttcaccctccatgccctgtgggatccttgggacagaaacaaaagttggcaaggggcaggaaagatgagatgtttagataaagagaacagtgtttaaacacgcatagcaaaacaaaagttttgagggagggggcaaacaggagcaagatgctgtacatttggtcacatgctagttttttttaccttgatttctgcctttggggtaaaaaagtttggtggatacataacattcagaccaattaaaaagtctgattgcaygcatgggaatccatttgtggaaatggataaatacacattccctccacagccctcacatcccctccacagccctcacatcccagaatcttacctgcggaggaactgaggacccctgtctatctcaaggccccgattccatgtctcctggagtggcacaagcactatgtcaagaaatctcttttccctgtccctgcccaatcagaagtgggttcctgtccagtgtttttgggtgttcccatggggtcttggctgatggaggtgtggacagcaggtctagcatactcctcccttctcagtcggtgggagctggcaggcatgtcacctctgtcagacctctgggtaagaaaggggctctgttttggcctataggtataaggtttatcatgctcctggtcaacaggtcttgccttcccctgtgggggtgacagtagctgttctttacatttatgcagcagtttgtacttaaaatgctttctcccatcatgtctttttattctcggtgaccttcattgggtaggaacagtattatttttcttgctttacagttgaggaaacaggctcaggaatgttaggtgcctcatatacaatcatacagcttttaaggcacgaaccaagggctagatttttaggttgcttgacacccagacaagaccctgatcacagttcagacgggtcatttgcgttcaccgtggtagtagaaggaactctttaaggggacccctgtcccagattggtctggctggggcttatagatagtgatatgcagaggctctgcctcttaggcatcagcttcctcttcagccaggtagagtattgtccacttattgtgcaggtaaaaagcaaggagctctttagaaatgggggagtaatgttcacaaatatttttacatttgaatagaactatatgacagaacacagtggctgctaagatgtctttatggagtatttaatttgatggtggaatgggtccatcttctcagaactatgtaattcactttgtcgtgagatatttccactatgtaaaggttatacaaaatacttaatgtccacggctataagagacactgggcaaatccatccatggcttctgccagtgcctctgctgtggaagataatcctctgtcggcttcactgagccactgttggaggttagttcaggaaaatgttgcccatgttggggttccccctgtgaaatacaggcgcaaatagaaatgcaagtatattttcgcttattgtmaacttacatgactttaaagmggaccaaatactgttgttgaatatactctgaaagcctaatataagtaggactttagttaatgaatttcytcctccacatgttctagccttgctttgtcagtgacatgaaaacaaccaaaatgctcttaacggaagatgctgaaagaaaagcctttttttttttwaaaaaaatgaaaggctactaaatgatagaaggaaaagcattcttaaaccctattttttaaaaagctaatctggtgcccataaagtttctctcttaccttctgttcatcattaatgataaagtattttttagatttcagttgccaagttgagaagtttgtttaaagagttatttttattggcacaaataaagaagcacttttgtttatccacaaaattcctctttctgtttgtagaggtatgtagaaaaccccaacatcatggcctgctacaatgaactgctccagctggagtttggagaggtgcgatcacaactgaaactcaggtaattctaccacttctggaaagccctccaggccatacagggcagcatggcaagtgagaactttggttgtggggaatacttttgaaatggcctcttgcagaaatgggattggagagaatggagtggcaactcccctcgtacagactttctggagtctgcctggatgtctaataaggggtcattttagtgattagagactcacatttaaagatggagcccccaaataatagtaagtttaaaaagcagaatacaaactgcatatgctggattatctgttttgttttctaaggggacaaaaacggttttaatatacacccccccaatctattaacattagttatctctggtaggtgacatttttttcttctctacaataagcattttatctgctcttgataaacagggttttttggtttttttttttaagtgacatgagtagaggcctcattctttgtagagtaagaaaagcagaaaaattaatataattttatcagcttgacaaaagaaaaataaagtcagcagcttcctatcattttaggtttcttccttgggtgttcaactattctttaacatttcctttactagggatcaaagagagaattggatcatttcatttgtatgtgcccaagacagtcaaaggggatcggaatgagagtaccaagattaataaggaccagtacagggttccacgtgtagggaagataggtactttatagacaaaatgaaatgaatgattagcgggcagagtgtgagttagcagagaagtgctgctgagcagaggtgtttgaaggctggtgtggtatacaaaagagatttttacgctgctagattttgcaaggaaacttaaggtagatggttgcccttgggcctgcttttttcccactcctgggtcatctcagcctggctgcagcactcccacagtgaattaggctactaccctctctcagaggagagtagaattttggagcagtaggtgatgttggagcttattttatccaatcaagaatcagaaactgagacccaaggaagttaactgacttacacccaagatcttgtaagcagcaaatggcaaaaatagtsctttaaactgaaatctgcattttcgaaactgcattcattctttcttccatctctaaatctgactgtaacctcaaaccttttcctcctgtgtaccttagctgtcatctaccttgtggtcctaaactaaaacccctgtctcttctacatacgtccctaaatccagtcactgaccaagtccaattgatcttactaatttttggaatctgtccacttaatcttcatctctactgctactcttagtctaggtccctctctttttacctggattattgaaaccaccagttagtctccctatgtctagtcttgactccttcttcattctccacacagacgtaacacaattccatttgtgttcctgttctatgacaccccagataggcacccactgcgttcaagatgaagtccaaactccaaaatgtagcctacaagggtctccatggtctgtacactgcttacctctctgtcctcatctcccatcatgccctgctttgttctctgtgctccagctggcagccaaattatgatgtccattatacagggagatataaaaatataaagggaaaggaaatgtgaggctagagaattgggagaaatagagtcttgttctktcagatactaaaatgcactaaaaagctgtaacaagcaggggtgttactgctagattggtaaactagaatataaaaaccagaaacaggccgggcacggtggctcatgcctgtaatcccaccactttgggagactgaggcgggcggatcacaaggtcaggagttcgagacaagcctggccaacatggcgaaaccctgtctctaytaaaaatactaaaattagccgggcatggtggtgagcacctgtaatcccagctactcaggaggctgagacaggagaggttgcagtgagctgagatcgtgccattgcactccagcctgggcaacaagagcaagactctgtctcaaaaaaaaaaaaaacagacttggatatatttaagaatttagtagatgatcggctgggcagggtggctcaygcctgtaatctctgcactttgggaggctgaggttggtggatcacctgaggtcaggagttcgagaccagcctggccaacatgatgaaaccccgtctctactaaaaaaaatacaaaaaattagctgggcktggtggcgcatgcctgtcatcccagctacttgggaggctgaggcaggakaatcactggaacccgggaggcgaaggttgcagtgagctgagatcgagccactgcactccagcctgggcaacaagagcaaaactccatctcaaaaagtaaaaaaaaaaaaaaaagaatttagcatatgattacatggcattttaaatcaacacgggaaaaagtggacttttcagtgactagagttgtgatagttggttgactagctggaaagaaagttaagctacgttccaatctcatgtcctacccgcaaaatgaactccaatgaattaaagacttaaatgtgaaaaagtagggctacgtaagtactaaaaaataaaagtggacatacataattggatgacgaagtcattataaactaacacttataaaagccacattttataaaggaagataatcagattagacaacataaaaatgttaagcttatctacagttaaaataaaccttaaataatgttcaaaatttagacaaatgactaactgggaaaaatatgtttgtaacatataggacagacattaggttaatatcctcataaatacatgaagagctttgattaatcaattgaaaaatgatcaattaaaaattagaaaaatattaaaagacatgttcaagtggttcacaagagatattaatggccaataaatgtgaaaagatgttcaacctcactaataaagacatgcaaatgatttaacatttttttatttaccgtatctgcgaaagttaaaaaaaagtatgataaaacccagtagggcttctcacagatccatctccgccaagcttgttatattggaggtgagaacttcttactgttttttgctttttttattttttatttttttattttttgagatagagtctcactccgttgcccaggctggagtgcagtggcatgatctctgctcactgcaaccttcacctcccaggttcaagcgattctcctgcctcagcctcccaagtagctggtattacagaggtatgtgccaccaggtctggctaattttttgttgttattgtattttttagtagatacggggtttcaccatkttggtcaggccggtctcaaactctgactagtgctaggattacaggtgtgagccaccatgcccagcatgttttttgcttttttttttttttttaataacaactttattgagctataaatttacatattatctcctggktttttttacatgctaaaaatgagctaatttttattggctaagctattgtctttagtgagacagtttagtaataccagcaataatgtaaaggcattgttttttttatttacttatttagagacagggtctcactctgttgcctgggctggagtgcagttgtgtgatcactgctcactgcatccttgacctcttgggctcaagcagtcctcccacctcagcttctcaagtagctaggactacagatgtataccaccaggccagctaattttttattttttgtagagacagggttttgccatgttgcccagctggtcttgaacacctggactcaagcgatctgcctacttctgcctcccagagtgctggcattacaggtgtgatccaccgtgcctggccagcattgttatttttagagtttacttagtagtatctctgcactttataagcaggcagttttcttttttttcatcttctgaggccagagaatcttaaaatcattctttgggagattacttatacaaggaaaaaacctggaagcaacctaaatgtctagtgataggggatttattgaataaatcataatataatcttagaatattatatagttatttaaagtgatgataaagaatgaaaattattgatatggaaagattaatgtatagtgtgccagtgagaaaagcagattataaaactgtagagtatgatcttgtttttgtatgcatattacatatgcatttgtacaagttaatgcctagaacatttttcaatgcttattgaaaataattagatttttttctataaaatagaatgttgagacgtctgggtattgggatttcaggttatttgatcttattatttttaaacagccttattaaggtatagtcaaaggattttagtatattcatagagttgtgcttcagtcatcacaattttagaacatttttattatccccagcccaggctggagtgcagtgatgcaatctcggctcactgcaacctctgcttcctgggttcaagagattctcctgcctcaggttcctgaagtagctgggattacaggcgcctgccaccatgccttgctaatcttttttttgtatttttagtagagacggggtttcaccacgttggccaggctggtcttgaactgctgacctcaggtgatccacccgcctcagcctcccaaagtgttgggattaggggcrtgagccactacccccagcccaatctactttctgtctctgcagatttgcgtattctggacatttcatacactgtgtgatccttgtgactggcttacggttttcaaggttcattcatgttagggcatatatcaagacttcgtgtccttttatgtctgcataatattccattgtatggatataccacattttgtttatccattcatcagttgatggacatttgggttttttccattttttggcttttctgagtaatactgctatgaacatttgtgtataagtttttgtgtggacataatggggctgtttcccaaaaaggggctgcacttttttacattcccaccagcagtgtaggagggttcctcactaatamatgttatcgactgtcttttttattattcaagtgggtgtgatatagtgttccacttatttttgttaatgtttattttctaatttttttcaataaacattgtcacttgtataattttaaaaatgttttcaaacacgaaggatgtgagaaaatgctcacagaagaaggctaagtgaagaaagcaggaagcaaagctagtctttccagatgccctcaattttgtgaaaataatttgtttaaaataataggtagaaatgattgccttctctttgccaggctctgtgcagtattcttgactctattctcttatttagtcttcatgaagactctaaggtggtgaaagggaaggcttgatggggttcagtcacttgcccagggtcccacagctgctgaagagctgtgatttgaccgtggtatgtggccaccctggctcactggcccaatgtgtctttccttcatattggaaggaaagataccrcagtgtgtacatagtggtgattccagtggaggggcttgcaggggggtgtttatttctttttatgttttaaaatattttctcccttccttataaatcggacaaaaaatacatttaaataatgtaataacccaagattttattttgtagtatttacattaatcattcctttttttgtttactcataaagggcttgtaactcagtattcactgcattagaaaacagtgaagatgcaattgaaattacaagcgaagaccgttttatacaggtttgttattttggaaatctgtctttctggatttyttgttttgctttttccaacttttaggattgaacctctccaatatgatttttttttttctttttgaagtttaggagaccagtttttccttcgaggattatcagaacaaaatcaaatatgtaatttaaaataagctctctatagattagaaaacatactaataattaaggtgctagaaaatgcctgtagaaatgccacatttgcattcattatttccactagtttgtttatttaacaaggagagactcactgaaaaggatgattgctgggggcttgggggtagtgctgttgtacgaaggggaatgccctgaccataggtctgcaagtacaagtctttcacctttctcactgtttttgaagataatttgcacttacagaaatatactagaaacaactaaaagtttcagaaataacatacctagtaagtgctgaataaattacacattattagcaaagtgggtttatatgagtgacttaaggcaacatagcttaatgttttcagataacagcaaaaaagggagttgcaccagaaaaagacattcattttgtctgagaattagctccactttggagctctccagtctttcttacttctgggctctccagtctttcactttaatatgacttgtgacttccttgttgaagaggtgatggtgttgactttgagttggtgccctgagaggcagcgtgggccagtgtttgagggcacaggctttggtgtcagacgggcctgggctccatcctgcttcagctgaacaactttgggcaagttgtttaatccagctgaatctgctttctcatctgtggaaatggaaataatattagtaagaacaacagcctgccttttgtaaggatgtcatgaggactaaatgaattaatgtatgtgaagtgtytactatagtgcccagtgaggaaaatggaccctgacagatagtatcaattattgttttatcatcatcatcattagcacgtgcacagttttcccatgtattttctgcttatcttacagtcatatctgaaacttaaccataaagccttacatttgtaattacttcttagttcatagcctgctttccatacacatcatttattcgaaccatatgaaagagacaagagaactgtttcattcccatatccggataagagtctcagagggattaagtgacttgctgaggtcaatgtgtggagggggaggacagcctgagtgttttgcactctacctggtgctttattccatcatccccccacccccacccccatctaaacagccctgttgtagcagctcctggtttggcgctgtgcacatcccttcctctgcccctgttgaagtgggagtgggcctgctgccctcctggagcctcaggagaacatagcagaaagcccagccgggtatcacccaagcagaagctcgtctgggctccagaattcttcgtgggttatgtgcttatggcttcacaactgccacggtgaggtccaggctcctgagctttttctggggaaaaacctgaagggcttaggtcgaagacctttgattgtcctctttttcaaaatgacttttaattcactttatgttttttcttttgtctcccttcagtatgcaaatcctgcatttgaaacaacaatgggctatcagtcaggtgaattaatagggaaggagttaggagaagtgcctataaatgaaaaaaaggctgacttgctcgatactataaattcatgcatcaggataggcaaggtaagtaagaggtcagtgccttttttaactttcacaacacagagagaaggaagacttagtgttcattgagtactaccaggtaatcttaatcttactcctcccagcagcccasggaagtatagggaatgttatccctgtyatatccattttgcaggtgaggaaactggggccaagaaaatatataatatgattagccaataagcaaagtaacttgaattgacacttaacaatcattgtttttatctttgtagtaagttaataacttgatatttctaataattggtcttcttagttgtagatgttggcaaatggttctgggtaaagaattgccagtaaggcaacacattctcagaaaacatctgagcccaagatttctccaagcctcgttaattcattgagcattttaaaaatgccttctgttagccagacactgtgctagattctggtatggaaagaagagcaaaacaaaaattcctgccttagagagctcatattcaggggttggaaacagacaaataaaagtaactattattcaataatgtaagaagtcacataatcatggtgctgaaggaacaggcagaagaaaggcaggctcagtctgaaaggttatttctgtgaaccacagcctctgatagtgcctcactgtgacagattttaaaatatgatgagaaggaaaaggctactgcttttcacaatcattcatggtcctttctgctggacttttttttttttttttttttgcttttggaagttgggtagagactattaatctgattatttcaaacatttgaaaaattggtgacttgtgcagcctgctctgtggaggcactgatggaagtgatactgtctcccctatggcatttggctagttcctatcttgtagcacaaaacagcagcttaccacaggggcagggtgctgtgcaaagcttatactccgctcatcttggaccccatgaagacaccatgaatgggcctgtttttcttgcctttcctatgcctctgagcacacaacattgccttgaagtgagaacaaggaaataataggccagctgcaggggcccagtgaagccctgccaggggaatgacaaaagtaggcactgctctattttgccttcaacttttctgtcaaggattttttttgttgttktttttttttgttttgtttcgtttttttactagagggagtggaaggtcctctagaaagagaggtatgaaggctgagatggatgaagagaccctcaggtgctcaggtgcaccatgtaggtgagggcaagtattcctttccatggttgagaagagcatactcagaaggaggccacagagcagcagtcatccgagaccacagcagccatggtgggggtgttaccatgaccacctcaatcctggcatttaggttccttgctgctactggatgagccagtggttttgttgtgaggttcaactgggtatgaaccaggatgggccttgtacaccttgaygtggcagaacttccactgaggcattccatgtccctctcactgaggaggcaagtagaggtaaggaagggatgtgctataagtgctgggctccatccagttctgtgtgaactgtgtctcacctttgctggggttgtgctcttgggcaccaggtaacaaaagccctcaaacttgaatagcaagagacctgctctctaaaattatacttattgtgagcaargaataggaaacatcatcaaattattgacccctatactgctttcctttttttttttttttcttgagacagggtctcattctgtcacccaagccggaatgcagaggtgcaacagccttgacctcctgggctcaggcagtcctcccacctcagcctcctgagttgctgggaccacgggcacatgccgtcatgcctaattttttaattatttgtagagacgggttctctgtatgttgtccaggttggtctcgaactcctgggctcaagcagtccgataatcggccacccaaagttttgggattacaggtgtgagccactgcagctggcctgtactgctttatttctaaaaagagcctgggtatttgtttcgtttttcacagtttttggggagcatggaaaagcaacctttgtcctttgtcaggaacctgctggtctatgggcaacatggcagcagggcaggccgctgagctggcctgtgttttgaggtgaaagaatccataattccatctccggggaacagggcttgttgaggggtcagcaggccttatggaacagtggcactgtgatcaggaaggggaattcaggcatctgctggagaccagcattgcagaatggagacttaggaaatggccagatggctaggagttgggaccttggagtgtcagatgctaggtgttggatattgaagtttgachttggggcagaagagaaattttgctgatgttcaagcagggaatattataaacattttccatctccacaaaccctgctgcccattgttgtcagtggctcctcttttgggtaaaaataacaggtatgttgatttccagcccccgcacttaggcttctttgcatcctatatgtatatccacctgactcttctcttttttcttcttccccaagacttgtctatcagggctttagaacccatagtctcccatcttctcagatacctaaactttatattgtcaattctcttttagagatcttttttttttttcttgagacatggacttgatctgtcacccaggctggagtgcggtggcacgatcttggctcactgcagccttgatctcccaggctcaagcgattttcccacttcagcctcccaagtagctgggaccacacgtgtctaccatcacacctggctaattttttaagcatattttttagaaatggggtctcactgtgttgcccaggctggtctcaaactcctaggctcaagcagtcctactccctcagcttcccaaagtactgggattacaggcgtgagccaccatgcttggcctcttttaaaaatcttgattttttttttccctccctcagaaactgtgtgttcttcttttgtcatttaatgggtaccaagtaaatggtggctacttagatgcctaagatgatgatgtgcagctgcagaaatcttcagcatttcaaaacttttaccttcattagctcctgtgcctttgctttcctctcactgtctccccttttcctactcttcttccatttcctcccagatttaccagaactctggcctttgccccctactgttgtccctcagaatgttcctttgttgttgaagtatcttttctgctctgtgtagaaatctcacacttctctggttttagtgtcagcctcttttccaaggtctggttcagcatcctactatcatcttaattgtctagyaatggttttctctcatctcccaaaaacccaatctctcttccaaatcctgctgtctctgctcatggacctacctcacagttgctttgacttagattcctgaaatggttttgatcccttcctccccgttggtcccctccatcaaatccacaagcattgatggctgttaaacccctgttttgagggtccattgcctgggcctgaccttgcycagggccttcttcccacactctggagttacagtgtgtaactctgtctccttgtccggaatcctccatctccactcggtccaccatacactactgcctgattagtcttactgagtcatcattttgtcatgttgcttcctcagcatagagctcatagtcctcagcttggctgccaggattctatagttgaacctcagcctacctttcccattcagtaacaaaagccccaagtgttctttgacagtttatcatgtgcacacactgtgcccaccctggggataggatggctggatgatgatgatttaattctcaagacagcgggtgccaagagggactgcatcaatagcttggtgcatagcttgtagcagacagaagggaggtaatagtcttactcctgttctgaggggagcttggcctggagaargaggcctatgcaaaccacctgcacccaaaccagctcatttactgaatgtttactgttatgtcaggactttgctaagagtttatgtgaattacccaacctaatcttcatggtagtactctaaggttgtactattattattctcaggaactaaatatatatatattttttttcctcaagacagagtctcactctgttgcccaggctggagtgcagtgggstgatatcggctcactgcaacctctgcctctcgggttgaagcaattctcctgccccagcctcctgagtagctgggattacaggcgcctaccascacgcctggctaatttttgtacttttagcagatacgaggtttcaccatgttggccaggctggtctctcaaactcctgacctcgtgatctgcctgcctcggcctccagaagtgctgggattacaggcgtgagccactgtgcccagctggaactaaatcttatatgatatttatgtaagtaaatattttttgtttccwctggtgactggaaaacttattgactctgttaccctagccaagccattgcctaaattgtcctgctcctttagatggactgtggaactttgcctggaatggcctgttagccttgacttgggatcgctcagtcacccaagtctattcagaaaggacaagaagatcctgaawatatatatatatattwtttttatatatatattttttgtttttgtttttgttttttgagayggagtctcgctctgtcaccaggctgctcactgcaacctctgcctcctaggttcaagcgattctcctgcctcagcctcccgagtagctgggactacaggcacatgccactacacccagctaattttttgtatttttagtagagacagggtttcaccacgttggccagggtggtctcaatctcttgacctcgtgatccactcgcctcagcctcccaaagtgctgggatcacaggcgtgagccactgtgcctggcctgaatatatttttttaaatgctgactgattgaattggtccctgtaatttttttytctctctttttttaatgtaacagttttattgagatgtaatttctatgccatacaagtcacccattgaaagtatactatttgatagctgggcatggtggtatgtgcctgtggtcccagctacttgggaggctgaggtaggaggatcacttgagcctgggaggttgaggctgcaacaagccatggttgtgccactgcactccagcctgggtgaatggcgagaacctgtctcaaaagataaagaaagtatactatttggtggttcttagtatattcacagttttgcaaatgtcacaattaatttcccatattccccttgatagtgagctttagaagtaacccttagacctgtctgctgaagccttccttctaaggtagacatgcwagttgtggacatggaggacaacccacttatttctgcctagggaaccctgtttagtccttggtggctttggactacaagcctcgtcctgtgggctgagctccccctcagaactgtaccaaggcccatacctcccttctactccagtgtgacctaaggactcagctgggctttctggctgttttttgatatagcccttttttggtgcccattgttttcagaattatatcagtaagcatcagtaatcatcctttgattctatcggagtattctggtttctttttgatctgctttcccagaggagtctgaagatgagctcttatcattggtatttggatgcaggttgccatgtaccaaacaagaatatttcagaattgacctggagtagggctctggatagcaaacctcagctaagccaacaaggctgccatggtgcttaacacccagcctgggtcaactctaggtcctgagggactctggaaggctaagaaaggttatggaataccctaggggttcagtgtcctgttgtgggttttagggatttccatagtttaagggccttggtgattttcttggaggaattcataacattttaggayggtgacaaaacccagctccatcctggctttccctaccaccccaagataaagggagtcaccacagcccggttctcttgctgtggtcttgttctgtgtagccctctttccccaggctgcacttcctgtctgaaagaatccccacgttctgtgtctgatcaggagagcacagctaatgtgatttcagccctgggttttgaggtctcgtcgtttgttttacttgagcttggtcctggctgttatctcatcctccacaccctatatacagggggtgaagccttcacacatcccagaagggcctcaagccatttagttcacctcagaagccggtagtggccacataatggtcccttctggcccccagtctggctattcttcccctcccaaacacaggggcagaggctaagccccctcttccacttcagcaggtgggagttatgagaggaggaagtaagggggagtgccctttatttgggrgtccaggacccctcttgtctgcagatggccactgaaaatatatgaccacttagactatggtgacctgacttytgtcagcaactcagaaggaggtggactttggaagttaagaaagaattgtcctattacctgaaatcagtttggggttgggatcattttttatcttaattgctttagcaatgtaagtgaatcagaactgaagtggaaaatgttcttgggtttatgttttcaacacaaagtatgacgatgcttacattccatttataggagtggcaaggaatttactatgccaaaaagaraaacggagataatatacaacaaaatgtgaagataatacctgtcattggacagggagggtaagtggaaaaaacaagtacatcaatcaacatacagtgttttgggttattgcagaatttgctttgaatatttaagttaaggactgctgacagaagtgtcaaggtcaggtgtcatcacagaatggccttccagcatagtgttttcttggtgacttcctcatggctacagtctgaccctctacttgcagcccagagccaacatactctgggcagtcttgtttaagctgcgtggatacacaagaaactgaagtatttgtttaagtcagaatgtcactttagtaagttgtgtgataatactgactggtagactccctatattgaaaagattttttatctaatttgataggctatgtattatttctgcagagacctatcaaattagataaaaatattttaaatactaacagttatggacattcctatataaaacagatgtgactgtagattggaaaccagtatatatcaggagcctaaaactttcagacagtttatctcagaaacctatcttaaagaaataatatggtaagatgaaaattatgaatatgaattatagaacacctaaaatattgcagccattagaaatgatgatcatattcacaggttctaagatgagggccaaaaaaagtagaaatgatgatcatagaaaattaaattacctcatgcctgtaatcccagcactttgggaggccaaggtgggaaaatcccttgagcccaggagtttgggatccgcctgagcaatatagtgagacccccatccctacaaaaaatgtaaaaattagctaggtgtggtgacacacacctatcagttacttcagggggccgatgtgggagaatcgcttgatcttgggaggtcgaggctgcagtgagctatgatcatgccactgtactccagcctgggcaacaaagtaagacactgtctcaaaaggaaaaaaaaaaawaaaatatgagaaaggttatgatacaatgttaaatgcaaaaagtaaaatgtaaaatgatasctagtgtttaatctcaatcatgtaaagaaaagaaggaaaaaagaacaggagaaagtatggcagtggccgttgtagtaaccgctgttgtttaattgagcccctcccttcctggccagttctcaatgtgtggtaaatgccacttcattccatcctaactgcagccctgtgaggttgggactgtgatcgtctccactttacagatgaggaaactgaggcttagagaggtcaggtttctagcccaggggtccagctgccagcgtgaggcgcagccaggctgcagacctcagcactgactgcacagctcacgtgctttgtcaccaggctttgctgccagttggtgatcgcctcagggagatggatctgtgtgggttctctgttctgattctttgcccttttatgtcctttccaatttttttgtggtaagtatatagggatttgattatcaaggggaaaaagtgaaaaaactgaaggaacaataaataaatgagaagagtcagcagcctctgagctaagccctcgttgctttgttttagacatctagctaaccacgttcagtgtgaacctcaactcccagtgtggcccgcggctgtggccaccagtgaccgtgagcagattgtttgttggaacttgaagaaaagcatcaatgtaaagggttgtgaaaataaaaacatgttaaggaactaaaggctctcagttggttaacatgcagttcattttaaaaaatatgtatatttgattgtctcatgattaattgggaagaattttgtcatttttactgaagtcacttgtacagagacgccaaaggatgtttgtgatctcttctttatttattggtggccttggtcacagtgagaagaaatgttctcagagcgttttgtgtattgcaaaagggaggtgccattttcgtaatgaaaaattaacgacatatccatcaaattagagactcagaagagaaataatgcattgttttttacttgcagaaaaattagacactatgtgtccattatcagagtgtgcaatggcaacaataaggtacgtaaggagagccccccggggccccaggaacaccccagcaagattttcagcaatcagaactaatggcttttaaaattcacttttaggctgagaaaatatccgaatgtgttcagtctgacactcatacaggtacggtgccccgtatttattcttagagttcattgagtttttggagaaaaaaaataaaaacagatctttaactagcttgcctggtgtaatggtgggattttcctcagactgtggcaacatttctctccttgactccccaggctggcttatgagtcacttgtacagaggacttgagcgcttgtgagcattctgatgggtgccctggggcgggtctctgagcctgcgagggaaagaaatggtcaactgaaatgcatgaactcatgtgaagtgtggttttataacctgatttatactttaagagggttgagtgtttatcccacagtcctttaacagggatgtcttcatctgtcctgacacttaccactgccagcctgcagggaggtagccaggcccctcgcacttgcctcacctctatgtttcttaaccatgccttggacaccatctgttcttccccatagctttcttactgcaaatgcatttccctggtttggagtcacctgtttccttcaaacgtgtcatgacttcagcaagccacttcctgttctggccctcacagatgaaggggctgggctgggatggtgaagggccactccagcttcaggcaggaggtgctccgtcaagtgtctgtgtagacacttggcgtgccaccctgccttgcctgagtagtgtgctctgcttgcccatgtggtctgtaagagcctctaaggagaagacttcccttcatgctgttggtgacatgctttctgccttaccagaacagttcattctttcattctagaaacayttactacatatttttgtgagcacttaatgtgtacaagatacctgtcctaagtgctttaggtacagcttattttaatgaagccttagaataactcaaggaggtaagcatttttaggtgaaattctctttacaggtaaggaaactgaaagtttaagtaatctgcccaaggatctccatttaggaagtggcagagctagcacctgaatccaggaggactgacactagggctctgaagcacagtttttakgggtgccccaggagcaatcagagatttagtctgaaaagagagacacattgacacaaaggaacacagcaagtgataagaagtgatccmcaggaatgagaaagggcagtgggtagtcttctagacagggagaggtggatttgaatagaaaagaaatgtgagcgggaaagcattccagcaataaaaacaggcatagaagggggaaagtacagggcatgttccagaaaaagcaagtactaaattttgacttgtataaaaggtcaatggggaaagaggtatttgggtcaataagaatccttaaatgctaggtgggaagtttccattttcatctgtggacagtgggagtctgaggatttgtgagtcagggagcagcgtgatgacatctgagctttgagaagctcttagagcatgtatgtaagattacatggaaggagacaccagagagaagaataccagcattgccatggtcgagaggaaagaaaacaatggccagggaataataaggtgatgacagtaggaagagagaagagagaccagatgtgatgatggtgtgggactagagagagaaaagcaagaaagtccttgaaaaggttgtttctgagcctggagattcaggsagtagcagtagggctggggaggatgaatgtggagagctctacctgtgaggtcctggtgggcagtcaggtgggtttgtttgttcacccctttgcccatttattctacagatttctgttgagtacctgctgagtgctggcttctgtgttctgcaaagaggttaggtctagagatgaaaatgtttctggccagccaagcattagcaagtagcacagatgtggaagtgatggaaaccagggatggtaaaggggaatggaaactttgagattacagtggaagagaacagcaagaaaaggagaggaggggtgaggtggattcctagagaccacccacctccagagaaggaggaaacagaagcaggaaaagaggggttagagggaggagggagtctggagagcgttgctgaagctgaaggcggggagaacgggaagcatcaagactggtcagggctgaagcacacatagggagggagggggatatggagccagagatggataaaaacttgtgctttgcattcaagagctcgtgtgtgacctgcagacatgcagtttcaggagaatggcgagggcagaagccagattgcaggggctggaggagtcagagtagaaagcagcatgtgtgggcctgttatggagagtcctacaccacaagttcacagggggcttttacttggttgtaagcatttttttttttttaactcttaagaagagtaccatagggctggacgcagtggctcacacctgtaatcccaccactttgggaggctgaggcaggcagatcacctgaggtcgggagttgagagcagcctgaccaacatggagaaacctcgtctctactaaaaatacaaaattagccaggcgtcgtggcgcatgcctgtcatcccagctactcaggaggctgaggcaggagaatcacttgaacccgggaggctgaggttgtggtgagccgagatcgcgccattgtactccagcctgggctacaagagtgaaactccatctcaaaaaaaaaaaaaaaagaataccactgtaaagtaggtatgactattatttatattcctttattacagaggaagaaactgaggctcagaaaagttcaatgagccaggtgtggtggctcacacctctaatcctagcactttgggaggccaaggcaggtggatcgcttgagcccaggagtttgagaccagcctaggcaacatggtgaaaacctgtctgtaccaaacatacaaaaaattagccgggtgtggtgacacgcgccagtagtcccagctacaggggaggctgaggcacgagaattgcttgaacctaggaggcagaggctgcagtgagctgagatcgcgccactgcactccagcctgggcgacagcaagactctgtctaaaaaaagaaaaaagttgaaagacagcctagagttgggcagccgggatatggcagagctgggactgagaggcagagtcagtgatgcagtcagaggaaatgttcggcagggggagcatctcccaaactgcatttgtaccagggcatttggtcgttttacttggtcaccgttgacttaggagttttacccatcccacccaggtgagccacttgcccatcctacctacccccttagcagcataaccacctttatgtccaaaggtctcaactggccatcttcacttgagaaggcagggtggagctgttataggccatgggccagccaaagtccttggttatacacaacagaaatcaattcttcagcagaaaaggagttttttctggaaggaaatagggttgcttatagattggacaacaaagctctagaactagttttggaaaaggaagcaagaacctggggaagctgagcaattgtccccactgccgtaggcatgccataggagcactgtgcttagggggccactgctgtcactactgagctttgagcaccactggccctgttgagatctggttatagggtgttgctgttctcaccacgggtagcatagcttcttcacacctcgcttccttacctcactcaaaagcagactcttggaaggaagcactcatttgtctgggcctgtgtcacctactctgtcactaactgggtatggagcagtggagtctctggccttctccctcccctactgagaggacttagtactcccagacatgggaaggaaggttcagggtctgggcatccaaaagagtaataaaatcccaatacatgctcccttttccctggcccatgtgttgttttcacgtgacactgtctcactgaggacaccaaattgtagtgacaactgtccagtctattgacttgttctaggtcaggccctgagcctgactgtaagcatacagaaatgaacatgagtttcgctgtctggtggcaggagaaaataatttgaatatgctgtggtttgtagtaccacactggagaaaagctggggaatgcttcccagcaatgatgatgatgatggttgacctggtgtctgaagagaagtaggggtcatgcagaggacaagatgggagaagcagcacccataaaggcatcgcgaagcgaggctggggcaggccagtttggattcatcctgtaggcagaggaagaccaagggaatctttataaataggtaaatgggaaagggtcaggtcttaggaagacagtcatggagaaaagagattgaagacaaagtaactcctgaatccagcctcaggagcccaatcagagactggattcaggagttacttaagtataatcagtaggatttgggaaccagcttactgtgtgggataaagagaagacttcagaatgacaccaagatatctagcttggccactggataacattagttaaaataacaagtgcaaataagatcgtaagaaagagcaggtttgtacagggagtggatagtaagtttagatttgaacttaccacatctgaagtgataagccaaaacttttggccctgggccaactattctgaagagagaaagtgaggcaggaagactgagtaccaagaaaggagtccagcaataatagacgtgaataatggccaggggagcactgaggagcaggatgaattcattcattcatcattcatccaaactcagtgcagttgtgtctctgcttgcaagatatgtttctatctgggggtgaggtaaacagtaagcaaataaacatacagtatatcagatggtgctaagttctgtggagaagaataaagccaggggattgggcatgcaggggatgaggaggtggtcaggacatgccttgccagtaatgtgacaggctctggttcttgttcaggtggtatggaatggaacccaggcctcatactttgcaggtgttctcatgggctaccagggttggggccattgttagaggcctcatagatsattgaaaagagttgggagatttggtctgtgcctggagaaagtgagctttcttgggaggaagaggtagttaccagaggcccatgtgcagagagtcctgtgggcttggcagtttggaggtggccctgttgcagagtaagtgctctgcaaatgcttgttgatagtgcctgaggagatgttccgacagtcagctgtggtcccggcagaatgacttttgggcaagtcacataaaatactggggtctggacttcctcatatccaaactggaactcatacttccaggctgcagggctaatgcgagttggaggaagctgctgtttytgaggggtactgattggttaycctctctcatcacccccactgtttttccagggtttcctggatttacccagcaggtcaaggaaatgctattaatttttctgtattgaaagggtgggcagagtttatggaccctattttacagaacaggaagccaagagcagagacatgaagttgcaggtgatcctgagcccaagccctggctatggaggcctagttagtgttctctccactggcaggccggatacctcaggatgagtatgtgttttctgagcacccagtaagcatgaggccctgggcgcagcacgccttcaggagctggtagtctcattgggatgtaagcctcacacttcatcttcaacctcttggtgttccctgaggagagcttctgagagctgggtgctggggtgacagggtggagacgtggtccatctctacccactgggcgaaaattgctagaatcatctataacgtgctacagggactaggggagcagtgagcttagcagggcttttgggaacaagaggatcttgtatttacataaagtaactttgaaacagtcaagtagaaattaaagcctggttagtctccctccasttttcacagtgcgtccttcatacaccctctgctgcttgctcctctccagccacactgctccatctgcacaagcagtttcctcctcctggaaatgctgtcgtcctcctcctcatcttggctgcagctacaagactccatccatctcctttctgcccccactcccttgagaatctgccacttccccctccaggctcctcctgaacttcagaattattactgtaactcctagtttacccacccttttccccactgaccatctcctttcgagttcatggactatacctcattcattttcacctccctaatgcctagcttagggcatcacacatggtgggtgaaggtttgttgagtggaataaaagagagaagaatgaaggaacaaataatcataagttctcagtccaggctcatcaggtggctatgtggacattactcatcatgaagctcagaggaaggagacacatttccagctccatgtggttgagaagaggggaaatttgaaggaatgaacacttggagagggtgcagtgttgtgtctcagacagaaggagccggtgtcaaggctgttccagagatggaaggcggagcagttgtgctgatgcagtacattcatgggaaacagtgagagatgaaaggcaggctgctgcaggccatccttacctgcccttgaatgccaggaagttctttatctctgagacgctgaaggattttgagcaggggagccacagaatcagagtggctgatttaacagaactttgatttgtgcacaggaaggtgcaggtttttggtgaagcagatgtgtatttattgagcttctatacacayatgcttcttccagcagatggtaggcacagagctggtcacctaggaaagacaggaaaaactgtccctgccctcaagtcattcatgttagcaaggaaggcaagaaggcaagacaataaagcaggctgttacccagcactgttggggtggtgtggagagactttaagggaaggtttcccaaaagttaggatacctgaactgcatcttcaaagaagatcagaggtaaccaggcgaagaaggtggcaggggagaggcacatttccaagtaggtggtttgtaccaaatcatagaggtttgggaggyaaattaacaaatcataaatagttcaaggtggatagagataggaggtgcagacctcataggactctgggtgccacactgaggagtttgaatcttatcctaaagacaaggatgagccattgaagtgttttgattgagagatctggttggatttttgttttacaacgatcgcttggctgcctgcagagaataagttgaaagggataaggttggtgttttagaaccaatctgggaggccattaatccagggaggatgacaaatgtctgagcttggacagggatagagcaggggatagactggaggtgtttaggaggtagaatccttagatttggctgacccagtggaaggagaggggagggggagaagtgatggatgacttctgtctaccttatggtacatgctgttcagtgatctgggttaaagagcagatttggagaaagataaggacttcatggtggataatgaattcatttgcagtgcctgaggagtgtctaagtgaggtggtaaatggtaagttaagatgtaagtctggagctcaggagagaggcctggggtaagatggcaacataggaattaattaaaactataggaagaatgagatctcccaaggaggttttgttgactgagaagggctaaggatagaaccttttgaaaaaccacctttggaaacaccaggggtactgaggaaggaggaaatcatgaaagaaactagaaaggagtagtaagaagtggaaggaaaaccaggagagtgtggactctgcaaacagaagtgtccagaaagggatcagttgtgtctagtaccacaatcaagtcaggtcaggtaaggattgagttgtagccttcagatttagcaaaaaggaggtcgttggtgaccttgacacattcactctttagtgcccacagagaagaggatttagtttaattgggcaaagaagcaaagagcaagtgaagagccttttcgatggtgcaaaggaagtgctaagggcctacattcggatcctgtacatgagcagggagagaagttccaagtgaggaagccaagacaaggcagagaagctactccatggctgtgggaagagctgagctcagcgcccaccctgctatgcactcatctgcaaagcagctcctagtttccttgtctgtgaaatggggatgcatggtacccagcaggtgcacagagaaggggtcaggaaggtaagtcagagttgccttgtcagtgattggtttgggggtcaggattagagaagagtcaaagacagtccccgtttgaagcctaggagagtagtgtgtccttcgtagagaagagggggtgaaagggaggcagatgagctatcatttgaaatatacctcaaacagtgttcaccatactaccctaggaaagagaagaatgttttccctgggatattgtagtccttattttgtagagaaaataaaagattttttttctttggggcaagatgagtggggatcaaaattttcccatcattttattcaattatatagaaatataataggagaaattctcctgaggtcatttctatcagttgtcactttatgtcttgggactctgtaattacataatctggaactgtaaagcccttgtttatctgtgcacctggtgggacattttgagaaactctacccccataaaactggtttctcatagtcttcatctctgtactgtgtttacttttgtggcatttaaaacatttaaagttgagagttttaaaaaaattttagattggtaaccttccttaatatgttgtttaaatatctttgaagaggtgatttatcatttgtttctacagataatcagacaggcaaacataaagacaggagaaaaggctcactagacgtcaaagctgttgcctcccgtgcaactgaaggtgagtgacaaagacaagagaaaaaaatgtgatcaaatcactgttgaacacatggagccctgccctgccttgcccaggctcatcctgtctacctccaattcttgggagaggagggaascctctgsaaactagtgttccctttctccctctctgtggactcctgccaatgggctccattctgagccttttaatggaatcagaaaataaagaaaaggaagaagatacatttcccatatattctatagttgcttttctaaactgtaacagcagaagatgtcagttcatctgctataattgtttgaatttgataattcttaaagatctatcccatcgtggtttgcagtttgccatggaaacttttagagagaggtgagctcgattttggaattgtgaaagacccttattcagcaaatatttaagttctaattgaaatatactttttaaaaagaatrtgtaagtgcatggtctgaatgacttagtttttgaaatgtagtcaacattgtttatacagagtgtggaggcaggtattgctgctagctgtatacattctttggcccaaaaatgaatacagaaggatacagagctggttgtactggttcaaaagacaaacttttccaaggtgatatcagctaagattatacagtagggatcaaatgctaccctctcatccctcacagatttgtggtaaggcccagatgacatgctgtgtactccttgcactggaaagaccatacagattacacccctgctttgagggcaggattggggtggtgccagtgaggaagcggtatggggttatgggaagactgtaagctttggtgtcagaatgacctcagtccaagtcccagcttcatctactctctgtgtagccttgagggtggacttctgtgtttccattgccttatctgtaaagtggggataatttgctgtctgcagaggattgtgtgaggattcaatgagtgtgtatggtgcctggtaagtaagggtagggactcagttagtgttagctgccatcgtcatcttcattgtagctgtcgtgattacagtcccagaccctctgcagtcctggagcagcacagagcagggctgaggtccctgcccagaacagtcttcactcaccacatgctaatgtttgttgatcctttggattccttggtatatttctgtgttttaataaacatctttttcttataactttttatgatttttgagttataatttatatacaatgaaattcacttaagtttcatttcagtgagttttgacaattctgtatgctcatgtagtcaccacccaaaatagatatagaaaatccacacacacaaacacattattaaccatgcagaagcaaccattgatggctagcaccgtaaattaattcggcctctccttgtgcctcatagaattggaatcgtacagtatggcttgtttgtgtctagcttcttgcactttcatgttttcgaggttcttccatgttgttaggtatgtcatagttccttccttattgctcagtagtattccgttacaggaatataccacaatttgtgtgcacatcttcttcttgtttccattttgaggctgctaagaataagaatgccatgaacatttttatgcaggtcattttttgtggatgtatatgctcatcttctccctagaagtgggattgctaggccttagagcagctgcaaatggtgctctccagttttattctccaataatagctccaacatatggcaccatgttactctcctcactcatctgtgagagttccagttgttccatgttttcccacacttggtaataccagaatttaaaatgttagccactccagtggttttaattttaattttccttatgactgaagttgagcacctttttattggtcatttggataatcctcttctgaagtgtcattcaggtcttttgcccatttttataattgggttgtatatcttgttggtttgtagggattctgtatattgtctagatatgggttatctgtgtatcacaaatatatttttttagtctgttgtttgccttctcccctctaaatcatatcttttgattcttaatcaaagagcagaggttcttaaggaaatttattttatcaggttttctattattacttgcgctttttatgtcctatttaagaaatcgttctttatcccaagatcgtgaaaatattctcccttgttttcttctaggagttttattgttttatcttttgttttaggtctttgatccatttaaaattatttatatctggtgagggtagagatcaaggatgactgcccctgaccctagggaaatccarctsgtctatcaccatattgaataaccatcttttgcagtagcaccattattataaatcagcttactacgaatatgtgatctgttcctggactctattctgttccactgttctgtttgtttacgcttgtaccaatatcacaatcagttacttatatagtaagtgttgatatctgatacctggtagtaggtagctgttcttcttcagtgccttggccgttctaggtcctttgcatttccatgtgacgcttagaatgagcttcttagtttatacacacatcctcctgggatttgttttcagagtgccttaaatctgtagatcacttcagggaaaattgaaatctcaataatggtgagtctttcaaatcatgaacatgctatgtctccatttatttaggctgtctttgttttctctcagcagtgttttacatttttgttgtagaaatcatacaaatctttaattagatttattcttaggtattgatggttttttatgctattgtagtggtgttacttgtttaaatttccaattgcttattgtatatagttatagaaatacaactgatttttgtatattgactttgtatatctaggagcttgggtaaacttactcactgtaaaagaagaggagtgcatttatagattcttctgggctttctgtatacacagtcatgacaatctttatactttttttcttaccttattgctctgtttgatttttttctaattcctttatttttaattgacaagaattatgtgtatttatcatgtatatgatgttttgacctatctgtacattgtgaaatgactaaatcaggctaattaacgtgtattacctcatacactttcatttttttgtggtgagaacacttaaaatctacctttagcaattttcaagaataccttgttattaattgtagttaccatgttgtacaatagatctctgttgtttgttacaagcatatatcaattatttttaaatgaaaacaagtccttttatgacagtgataaaataggagtttttatttttggtttaatgaccttgttgggtaaaatggaaagttggcaatcctataatcaccaaaattttaagaagtttagttgggcccccaaatttaaaacatttgagaccccctgaattggttaactttggacggtgtctctccttgggcctcagtttcttcattggtaaaatgaggttgacacatcagtctctgggacagcccctggtcctgtaacgtctttgggaagcagcatttagcctgataggattgttcgtggagatacccaggactggatgttaacgttttttctgcctatattgcctgggcttctcctcaccccaaaggaaccatatcttgacaggaacaacagaaattaacaaactttagagcctaagaattgctgcctgcctcattgaagatatttacctaatcagtccagattaaacataacagtgggaagcaccagagggtaccttgaaaaatttaaccagaaatttgtgtatttcagttattggtgagttgaatgtattgctcctgccatatatgaaacaaagagcattgtgtggcattgtcttccrgaacatttttactcctagagaatggcaagctaagtaattataaaggcttattgtcatagacacaaaaagaggctgtttgacttgggcttgctagattgtttcctctgttttctctctggcctgtgacatcagaagttcagtccatgggggcatatgtgcattctagtgcctagaactgaaggaaacagaattggttatgccagaaccccaggcttgttaggatgggaaggaagctcagcaaactcagttctatcctrccccttcatcatgcagccgagcacactgagccctctgctgtcaagacaggtgcccagrgttgtgcatgccctgatttgtgcatccctttctccacagtttccagccagagacgacactcttccatggcccggatacattccatgacaattgaggcgcccatcaccaaggtgaagcagtttgtggtctgtctccattgagcacacatactccttgttctccccaaggatcatttccaatgagaagaaacagggacccgcagtaatgagcatgctgtcatagttgtgtggtgctagtagcctcctctgaagagagaggatgtgtgacatgggcattttaactagtcttaagttagtattaagtactatggccagactgagtcctgttgggttttgttttgtttttgctgttatttgttttttagagatgtgctctctcatttctgttgcccaggctagtctcaaactcctgggctcaagtaattctcccacctcagcctcctgagtagctggaattacagacacgtactgccatgcctggctctcccactgtttttaaggttatgaaactcaagtattttctttccataatgtaggtaatcaatattatcaatgctgcccaggaaagtagtcccatgcctgtgacagaagccctagaccgtgtgctggaaattctaagaaccactgagttatattcaccacagtttggtgctaaagatgatgatccccatgccaatgaccttgttgggggcttaatgtctgtaagtatatttgactagactcttggctagagcctgtctgttcttggttgttttctcagaggttattcacttaaacagatattgaagaggcaggcagggctctgtagggttcagtcaagacctaaactctcctccattgcctgggttctgctattctctggccaagcacccacctgctgcctgcctcctagggagagcttagcttggagcagagcagggaggaatgtaatcctgacagtctgctgagcaccagttctccagtgttgcttagggcttctacagtagtttatctaaataaagcttgtttagttgtattaaagatcttcaaaactgggacagtgtagaacagaaagattgtctttctcccgccatatgtatttaaaatggtgccgggggtgcaacagtttggccttcaaagcatcccacacacatttagatgactgtaggaaagagggatttgggaatctttcactagaagggggctttgtgtcatagactcttgaggggtcctggatgcctccttcagcatgtctggtgtagagctctcacaagagagggacaactttgtgcagcacagattattccattgctctctgtcagcttttgtcttggtcagaagcaaaatccacctccctcccaattactgctttctgaagtcactggattttataaaaataaggttccaggcagaaatctagaaggtagagtgtttacaatgctgataatatctcactgtggtcttgcctatttgagacagggtctcctccagactgcaggtaagaggtgaaaatgatgagggatgggggtaggatagtgtcctggaggcgagcagatgagaatagccacaggactggagaaaaggggctgctgagagtacgggtttgggccaggtggtctggaagcagtggtgaggagcccaggagagtcaactgtggggaatgaggtcacttatgaggtgagagaggagctaatgtttccaggaaagcctcgtgtcctcagagtgaggagggttgcacgaaaatggaggagaaggactgagggcagagcacagttgtccctaagaaaccaaatggtcctggagtgcaagcaagaatgctgggcttaaagaccacccacccctcaaaagatgcaggctcacctcccgggtgttgaccttgctcctgagtttagcttccaacagggccaggaccatccttcccagcattagcctgttgtgctctccagtaagtgactgaggtcagtggtcaatcacaggggtggacctgctgggcccagggcagccttgagtgcattggtggagagggctgccctgagttgtcctgtgggaggaccacctggagtttccaggaaggaaagaatagttgtgacttttctttttcttgtttccttgatttttatcaggatggtttgcgaagactatcagggaatgaatatgttctttcaacaaaaagtaagtttttcctttttaatttcttagatcactgtctataatactgcagtctagcttaagtgatgaaaataatttttcacctcattaagaagtttcttggtatgtcataaagcctcagaaacaaagcagctgtccctgaggcggtactgtcctccctaagaaacagttaatcctggccgggagcggtggctcacaccgcygagatgggcagatcacaaggtcaggagttcaagaccagcctggccaacatggcaaaatcctgtctctactgaaaatacaaaaaattagccaggcatggtggcaggtgcytgtaatcccactactcaggaggctgaggcaggagaatcacttgaacccgggaggcggaggttgcagtgagctgagactgtaccacaacactccagcctgggcaacagagtgagattccgtctcaaaaaaaaaaaaaaaagttaatcctttaaagcctatttgttctccaaattacatcactttacagacactcaaatggtttcaagcaatataatcactcccatctcccttgatgatgtcccaccacggatagctcgggccatggaaaatgaggaatactgggactttgatatttttgaactggaggctgccacccacaataggtgagttcatgcagagctcagcagcgggagaactagattcccagggcctgtgtgaggaggctacctgaggagtatggattgtgcacaagcctggtacctggtcagggtggggccctaaggaaggagtarcagggcaccaggtggctctgagtcaccagggcctgggggagagtctgctggccacagtgatggcacattcatggaaagcatgcaactgagccagtgacttctccaagtagcacaggacttttttctgtgaaataaaggtatttctcctgtaggtggtaatatgttaagattgctgtaagagatctgctcagagcctagaaccaaaatttattagaaacacatacacatgtgataagagctgctcccagcttttggttgttctgttggtgataggcatagggacacccaaagccccagtcatcctcatctgggtgtgatcacagagagtgggagcaggaatggggttttgccttgagttttttcccttgcgggagaagagctgttaaccaaaggtggtagttggctgggcacacaagaaagggaggtccacagagctgattccagccaggactgcccactagggtgtctaggcagaggtgtgctcggttgggccatgggatggctcctcaggtctcatctcagtctgggtgacctgtccccaagataactccctgactttttcaggctccccttgagttaaccttctgatacgttctacttccctatctcccagcacagccaaggagagttgaaaagaatactccctgggcacatgagtctttgagcatctggtttacatgctagtgacattacatccatgtgaattgggctaaggcaggtcagtttaagtcctgtgatcacttctggatactgcctcaacacagccagtttcttggccttcacaggcaagggccagatgctgggtcaaggtgatttctcaagtaagaacctaacttggtggccagctggaaacctcaggggaaatcccctcatacttttaacgcccacctccagaaaggtgggtgttgagaaaattccattgcatacggcagtgtctggcttatatgacattttcaggaaatgttttcttataggcaggatgtctggccaatggcatgggtccagcaagtccaaaggagaggatagtgttcaaggtggtacaagcttagcctggagaaagggttattttgaggaacccactagtgcaagtaggaagctgaacctggaaggacagaatgagcaaactccccccaacaaatcgggagccccaacgaggctgaggtcagagctgctgtgggcagccagctctcacccgtgcatcatggtcccctgaggrcaagaagtggaaccagagttsgttggccccaccagagagaggccagcacagcccaagcaatctccactttgctgccctgcactctctgaaatttggcttggaacctattcaggccttaaacacttggcctgtttgtttgctttgttctaatattgtggggttttttctgtctataggcctttgatttatcttggtctcaaaatgtttgctcgctttggaatctgtgaattcttacactgctccgagtcaacgctaagatcatggttacaaattatcgaagccaattatcattcctccaatccctaccacaattctacacattctgctgatgtgcttcatgccactgcctattttctctccaaggagaggataaaggtgagctgttgtttacctgccacatttaatgggcaggagcagtggggagagtctagtgcttctgcctccactaagatacatagcatgactgctcacgtgtgcagcctggcacaggaagggcaaggtcatacgaggaatcaggcaggaggccacattagctttgggaaattgatgtgttaattcatgacataatcccagcyattccatgagggtacaagaggcagaatttggtcccggaggagaaacctaacaaggacaggatagggctattcttctgggggtctcactccaagcctgtacactagtagagccaagtaactgttggatatccccactttagggcctccatctgtacatgaaagtctgcagggctctaaggtcaggttcatcatctctgttcccagcactgctcccacccagggttatctacctaatscagggttccattatccaaccggatacccagattagaaaccgagagtcatccttggttctttccactcctcaaccccccacatctggttgatcatctgaccttgcctcctgtcacacctaaatgttctcagattcatctcctgctgctgtcccagtgaggccccccgcaatcctttcgcatctgggcagttccaaactagaattcttgcctgccctgcctcccatggaatgcccttaccctactgccaatgtgatctttctgaaacagcatacctgatattgtcattcccaggagcagcttcccacctccctcaggatttaaactttaaactctacagctctccacactcacctcaacaatgagctcctctcatcatttcttctcctttgtcccagtcacaggccacttttgggccatgccaaaccactttagtttctgaagcttctgcccttgacctgttgctcccttgactggggcctaagatgactgcagtcatgcagggccagggcaagtggctcctggctgcatttcctcctctgtatcacgggactagcatttggcagagagcaaagcagaagatgacatctggcacacacagggagtgaacaagtgttcattcctcaccttgaagggtaaaccttctcagaactttccgtgctccctctggktcttatttctgtttttgttttttgtttttttccagaaaaaatcaaatcagactgtaggtaaaatagggtgtccagagaaggggactgttttctaaattatgaaaacaagtaacaacagagggacatctgtgtcaatatggctcagcatataaagaacccaatttttgctgtattgcttttaaactactctatagacaacatacaaatatatatttagagagctaactgaaaacagtttattagagcatttattgaaatgtcatggtggctcacacctgtaatcccagtactttgggataccaaggcagatggatcaggaattcgagaccagcctagccaacatggtgaaacaccatctctactaaaaatagaaaaattagctgggcatggtggtgcaggcctataatccagctacttgagaggctgaggcaggagaatcacttgaacccaggaggtggaggttgcagtgagccaagatcatgctattgcattgcagcctgggtgacagagcaagactctcgtctcaaaaaaaaaaaaacatttattgaaatgtaattcacataccatactatttgcgcacttaaaatttaaattattgaattttaatttaaatcaatttaaataaatttgcaaggctgatttattagctatacatctcaagagtctgtagggtatttccaaaaatgatcttatactgggacataatgtgttgaacttctaaacttcataggctatattttctaaccacaacacaacaaaatagaataactaatggttaaatttaaaatatcagctacaacaaatgagaaaatattctgaataatttgggaatcaacaaagaaataaaaccaaaaatgacattagttagaaaataacaaaaatgagaagcttatctgtcaaaacctatagaatgaagccaattatatagttaaaggtttatgttttaaatgccttaattacttttaaaagggaagaaaaaaaacatgggaaaagcaaaatgataatccagtgtggctcttggaaataaccaagaaaataggtgaagttctagccaaactagttaagatataaagacacaaaaatatacaaatttacagcagaaaatagaagtactgcacacatatgtactaaatcaaaagctttaaaatagttttaatggaatgttttaaattaaattgatgtaagaagtaaaaaaacaaaaaaaaaaaacaaaagaggccaataacatggaagtaattttagtaatttttaaattattatttaatttcttcaaaagttggctcctgacccagatggacaggtgaattctttagccctttaaggaatttttccatgttacataaaacttttcagagtcttgaaaaagatggaaaacttccagatcattttgtcaaactcacaaaactctgacatcaacctgacaaagatagcactaaaagggggaagaaaactaaaycaattcccagttaatgtaagtggtgcctattttaaattttatttaaaattgtttctctcctttattaatattagtttatgctggtctaagtcaatatctcagactaaggacttttttggtgatgggtctagagaaagactggctgaggaggtgactcctatctgttgagaacacctgtattttggtaagtccttaacttgtgtgagactaacaaatatgcagaaatataactgtttcagggtggagataggaaaactagatttgctcacgtagtatgcttttcttagaaatctgaaatattcttacctgaaagtaataggggagaaagaaaactatacagaaggcttccttgccttcagtgtcataccccagtttttaaaagctctcttgttttcaggaaactttagatccaattgatgaggtcgctgcactcatcgcagccaccattcatgatgtggatcaccctgggagaaccaactccttcctgtgtaatgctggaagtgagctggccattttgtacaatgacactgctgtgctggagagccaccatgcggccttggccttccagctgaccactggagatgataaatgcaatatatttaaaaacatggagaggtaagaacaatgattgggaagtgtgttgatccctctctttcttttttaaacagctatattgagatataattcacatcttatacagttcacccatttaaagtgcacaaagtatacagtgggccggacatagtggctcatgcctataatcccagcactttgggaggctgagacaggagaaatcacttgagcccaggagtttgagaccagcctgggcaacgtagggagaccctgtctctacaaaaggaaaaaaaaaattagccaggctcggtggttgtgtctgtagtcccagctactcrggaggctaaggtgggaggattgcttgagcccaggaggctgaggctgcggctgcagtgaaccgtgatcacaccactgcactccagcttgagcaacagagccttccctgatctctcatgctaagttaaaccctctarttattcaatcccagatttcttcatagcacgtatcacatttcttatttaataattactttttaattatttgcgtaatgtctgattagattcttaagctctgtaaggtcacaagggtcatatgtcmctgtgccctcggtgccctcastgccacagtgcttggtacatactagagcgagaccctgtctcaaaataataataacatgtacagtggtttttagtatattcatagtggttttagtrtattcatagagttgtgcaactcatagtatattcarttttagaatattaccccttcgatagaacctcaaatttatgagcagttcctttccattccccctcaactcccctagtcctagacaactactgtgatctactttctgtctctatagatttgccatttctggacattttatgtaaatggaatcatacacaatatgtgatcttttgtaactagcttttttcacttagcacaatgtttttaagattcagccgctttgtgtctggatgtttcaaggtgaagtataatgctgatatcttgagctcttagagactcaaagaagcagtcatctayctctctccctgaagcactccactctgccctcctgtgctcagcatacatctccttggcattgtctctgtttacatgtcacttccttggggaagccttccctgatctctcatgctaagtttaaccctctaattattcaatcccagatttcttcgtagcacgtatcacatttcttatttaataattatttttaatgatttgtgtaatgtctgattagattcttaagctctgtaaggtcacaagggtcatatgtcactgtgtcctcagtgccacagtgcttggtrcatactaggaacttagtgaatatcagttgaagaaagaaaaaacattgtgtcatgaagaatacttattaatatggatttttaaagaagaggattyttgattttgtaaaactcctttctgccatgttctaggatttcagaggtggagttaaagtagtttctattcatatttgcttatagttacatcagttatcaatggaaaactacatgagaccctattaactttccagagaaagttttctactcaactgcagaaaagggattgaatagagactttgtttcatattcataccccttcaaattttgaattacatggattaccccttcaagaaatgaattttttaaagtactaaaataaaagcaagggttagaggtggaggtatcaagtactccctatgatttcgcagctttcagaagatcggtcctcacattctatgggcactaaaatggttgggcctcaagacacctccatgtggggtatattctttctaaccacagatttctatcttcattgacaagataaacactgcaactataagttttgcctatagcttttggttttaacttcttttgaggttctccttgctaacgatctaggcactaacccctaacttccatgtctttttaaaatgtgccttgtggctttcagtggcattagatttatagctgcagaggacacatacctggataacagattgttttcaggagtacctgtctggtctggatcagtaatttgtagcagcctctaatttgtcatcgaaaacaggaatgattatcggacactgcgccaggggattatcgacatggtcttagccacagaaatgacaaagcactttgagcatgtcaacaaatttgtcaacagcatcaacaaacccttggcaacactagaagaaaatggggtaagggaaacttattgcaaagagaacctgtgtttggggtccttgtactgttgtgttatggagacacatgggctatgatatcagccacagaagggttccctcagtgagtctattagactcttacagggacagaactaatgggatmcacacacacacacacacacacacacacacacacacacacacacacacaaaggggagtttattaagtaataacttacacgatcacaaggtcccacaataggctgtctgcaagctgaggagcaaggagagccagtctgagtcccaaaactggagaacttggagtctgatgttcaagggcagagagcatccagcatgggagaaatgtaggctgggaggctaggtccatctctccttttcatgtttttctgcctgctttatatttgatggcaattgatttgattgtgcccaccagattaagggtggatctgccttccccagcccactgactcaaatgttaatctcttttggcaacactctcacagaaacacccaggatcaatactttgtattcttcaatccaatcaagttgacactcagtattaaccatcacagtgggctcactgaatttagtttttattggttaaaaaattatttaaagtgcaaaaacttggcaggaaaaaaattagcacatccaactagatgggaaaactcgaaaggaaggtcagattttagataagctaactttagacagactattcctgcacccttcctcactaatatccccctcccttcttctccattctgtgatcagttggagcccttgatatatctttctagccactcccactgggcacatatcatggtagcagcagctatcctctcttggtcctcacttagaggagcatgtggattgagaaagacactgtatttgtgtcacaagggtgacattattgttgcccctgtttctacatttgaggcatggagtccacaacaactgctgggcaaggataacattaaccctctcaccaggcaggagtctccagctgaggaagcatacaggcccaagttcccatcatttgcttatctgtagaatggggataagaagtctcaaggcataggactgatgagcatggtacatggtaggcacttaagaactggtgcctattatactagattcattgtgtcatcagcaacttaaagaatatgttctttcatgaacctcttcctttgaggcccacatttactgaacatgttggcagcagctcacagtcttctctcccaccctcctccccagctcctatcaccatcctgagatatttgccacacacagggatgacttatcctcgcaggctaggatcataattccttgacttctaactccattttacttctgcaattcatttgtttggccatggcctttgtctgccccctggttttctagcatattaccccatgacacttactttggtttaacctgatgttgagaactgtttcttcaccctttcctgttctctcaatttgtcagcctgcccctgacttcactctctttccaaagacttttaacagaggtgcctgtaccagcctgttttattggctcctgccctgccattctggatagggctcattgtcacctggccaccactcctggctgacctcatgccacagaaggaaaccatacacccagcagacttggtttcctctgtctagtctggacagcccctagagctgagttctctgctccacttaacattatggttctcatctctgttgtcggtacatggggttacttctgagagactgaaaatcaatatccagtgggtcagagcaggagaaaggaagatgaaagagaatagtttccaggctggcagtatgaaactatagtcacactgcaggtattaacggatctgaagaaagaagggtcagcacagagctggtcacagtggaaacctggagtgaggagagctactgaagtgtcaccggtgtagtattcattttggcactctccaggaagtgtgggaagcctagagtcaggatgccacccgtccatcttgatggcagtctgttccctctgagctgggaccatcagggcttcttaggctactgctattgcatattgaaatatatgactaactcctttggaatgttgcttgatgggcacagaatcagactgaggagacctgcttgcctttagtctttttcattgctctctgccccaataccctctaacctgaattctcttcagagagcctacaaatagtggttctattacatcataaattgatccatatccagtggggatccttggatgcagacagcatgtggtactgtgagtggaaggcatgctgggactaaaggcagaactgaagttcttatcctggctcggctggttgctttggacaagtcacttcacctccctgagtctcagtgtcctcatttgtaaaatgtaataaataatacttttcatgcttaccattagatcttcttgtgagtgcagatcaacagagaatgactgttaagtcctttatccatcaaatatgttaggtgttatcttgggaatctgccctatcacaggactgggttgagaagtacggaggctgttgggctgcaagagcccatttgttgtgagggcagagaaatttatttttttcagctcatactcttttttaataaatataataaaagacaaaaccagtctttgagttcttaccaagggggagagagagagtggaacagaaaaaaaggcaactgtgagaaagatttagtgagaggaagagaagaaagaggcaaggaaaaggggaagggcagatataccaacccctagtgctaccctccacttctaggtcctgttgcaatctcactgagcctcggttttctcctgggtaaaatgagaggccaagctcaatgctcacagtatccttggcactgttttgtgagatccttatagatcctgactagtgctctttttatgcttacagtgggacagaccagtaagagagggcttggcaccaagggatccattttgattgctttgaattccactcatgtttcaggaaactgataaaaaccaggaagtgataaacactatgcttaggactccagagaaccggaccctaatcaaacgaatgctgattaaatgtgctgatgtgtccaatccctgccgacccctgcagtactgcatcgagtgggctgcacgcatttcggaagaatatttttctcaggtaagttgctgcctcttttaagtttctagagagagagagagttaaaacccataaaatcatacgagataatggacttaacactaggaaatagkgttctaaaaaaattctgtccttgttttgcaaggtaacaaatggtaactggtaacaaattttttttttcttaagaatattttattttccctttattcttgcaggatatttttgttagatatagcatcctgggttgatgatttttttcctgaaagtacttttaaggagtcatctggtcttcatattctttctgagtagaaaaaacctctcttggggcagaaaaaaatattaggaaatatactggctaagatttttccagatttggtggagggcatatgcacatgcatatgcatacagattcaagaagcccagtgaaccttagcccatgtcagatgtgtcatagtcaagcagctaacaggctaaagataaatcttgcaatcagccagaggaaaagcgacacattacttataagaaaacagtgattctcatgtcctctgacttcccatcaaaaactatgaaggccagaagacacgggaacatctttaaagtgctgttagctttgggaggatcacttgagcccaggagtcttaagagcagcctgggcaacatggtgagaccttgtctctacaaaaaaattaaaagttagccgggcatagtgatgcactcctgtagtcccaagctacttgggaggctgaggcaggaggatcgcttgaagcccaggaggttgaggctgcagtgagccatgatcatgtcactgcactccaacctgagcgacaaagtgagaccctgtctcaaagaaaacatacagctaacattatatttaatggcatgagatattgaatacattcttaagattggaaacaaggtaagggtgcccattcttacctcttctgttcaaccttgtattggtgttcctcatcattgcaatagacaaaggagagagaggtttaaagaacaaaaagtaagacatacatttgcttctgtttgcagatgacatgattttatgcagaaaattctaaggaatatacaaacaattattagcactaataagtggatttgatttaccaatgtcataggacacagctcaatatacaaaagtgagttgtattttatgtactagcaaccaacaattggaaaatgaaaccaaaagcccrgtcccatttacagtaggaaataaaatttaaaaattaaaattaggaaaaaatttaataagagatgaccagaactttacagtgaaaaccataaaacattgctgaaaattttaatgaacacttgaataaatggtgaggcatatcatgttcacatactggaaggctcagtgttaacattcacttctacccaaattggtgtttcaattcaaaaatttcagcaggttttttttctgtggaagtctacagactgtttytaaattatatatgaaaatgagaaggaccttgaataagcaaagcaaactttaaaaagttggaagatatgccctgtttggcttcaaaacttaaaataatcaagaaagtgtggtgctggcataaagataacaagtacaaccatgggacagaatagaaatccaagaaacagatcacatttatatgatcagtggctaatgtgaaatttttgcagtaagtggtgttaggataattggatattcctatgcaaaaaaaaaaaaaaaaaaaaagaaccacaactcctatctcataccatagagaaattcatagacctacatacaacagctaaaaccataaagcttttmgagagaaacataccagaatatcctcaatgacttgaaagtggacaaagatttcttagatgcagaaagcaacaaccagccaggtgcagtggcttatacatgtcatctcagcactttgggaggccaaggtgggaggattacttgagtccaggagttcaagaccagcctcagcaagataatgagaccgcatcactagaaaaaaaaatttttttaattagttgcctgtggtggtggcacgtgcctgtggtcccagttgcaggaggattgcttgagcctcagaggttgaggctgcagtgagccatgattgtacactgcactccaacctgggtgacagagcaagactgtgtcttaataaaaagaaaagagcaacaaccataaraagaaaatttgataaattagacttcttcaaaatttacaaagtttgctcattcaaaacacagctaagaaaatgagcaggcaagccatactggaggaaaatatttacaaattatatttgaaaggactgtatccatagatatataaagaactataactcagtagtaaaagataaaccacccaatttattataggcaagtatttgtccagacacttccccaaagaagctattatgaaaagccaataagcacatgaaaaaagtgctgaacatcattagtcatctgggaaattcaaattaaaaccacagtgaaataccactacacacccaatgggatggctaaaaatgggaaaggctgacaacaccaaatgttgaagatgtggagcaactagaatgcatgcatttgtgatagatgtgtagaatgctacagtcactttgggaagcagtttagcagtttcttttttcttccttttttatggtaaaatttaccattttagatctgggttttcttcccttcattctcttcatatggtatatcacactgatcttcatgtgcggaaccaatcttgcatttcagaaatagattccacatagtcattgtgtataatcctttaatatgctgctgagtttggattgctagtattttattaaggatttgtgcatcagtatttacaggggatattggcctgcaattttcttgtagtgtctttgtctggctttattaggataatgctggcctcatggaatgagttaggaagtacttccttccttttcagtttttctggaagagtttgagaaggattgatattaattcttctcaaaatgtttggtagaatttaaccagtgaaaccatcctttcttgggaggtttttgattactgattcaatctccttgctagtcattggtctattcagattctgtttytttatgattcagtcctggtaggttgcatgtttctaggagtttatccattgtgttggcattcagttgttcatggtactctcttataatcctttttatttctatgaaacctggagtaatgttcccactttcattctgattttggtaatttgggtcttgtctttttttcttagtccatctagccaaagatttgtcaatcttgttgatcttttcaaaaaattatcttttggttttgtttttttctgttctctatatacctctgttctttattatttccttccttttgctagcgttaggtttagtttattctttctgtagctccataacatgttaagttaggttgttgatttaaaatcttgtaggcatttacagctgttaatttcccccttatcactgtttttgctgcatctaataacttttggcatagtgtgcttcattttcatttgtctcaaagtattttctaatttcccttatgatttcttctttgaccccttggttgtttaagmgtatattagtccatttgcattgctataaaagaatacctgaggctgggtaatttataaagaaaagtttattttggctcatggttctgcaggctgtgcaagcatagaactaacatctgctcagcttccggtgagggctcaggaagcttatgatcagagcaaaggaagggggaagcagatgtatcacatggcaggagagcagggggaattgccacacttttaaccagattacctgtaaactcagagcaagatctctcattaccatggggaggccactaagccattcacgaaggatctgcccccatgacccaaacacatcccaccagaccccacctccagcactggggattatttttcaacatgtgatttggaggggacagacattcaaaccatatcaaagcatatgctatttaatttccagatacttgtgagtttcccggttttccttccattactgagttttggttcatttcactgttattagaaaaggtactttgtatgaccttaccttttaaaatatatrctgtttgttttgtggcctatcatatgttgtatcctggagaatgttccatttgcacttgagaaaaaaatgtatactctactgttgttgggtggatgttctatacattctgttaggtccagttggcctagagcattgttcaaactctattgtctcattgttctattcattataaaaatgtagtattgaagtctccagccattattttagaagtatctgtttcttccttcagttctataaatgtttgcttcatatattttggaactctggtatttgatgcttatatgcttataatcattatatcttcctgatgaattgacccttttattaatgtccttccaggctggagtgcagtggcacaatcttggctcactgcaacctctgcctcccaggttcaagcaattctcctgcctcagcctcctgagtagctgggattataggcacgtaccaccatgcctggctaatttttgtgtttttagtagagacggggtttcatgttggtcaggctggtctctaactcctgacctcaggtgatccgctcacctcaacctcccaaagtgctgagattacaggcctgagccaccgcgcctggcctgtaacagtttttgacataaagtttattttgtcttttaggatacccaccccagctctctcttggatattattttcatgagatatctttttccatcctttcattttcaacatatgtatgtcttgagagctaaagtgattttcttgtagatagaatgtagttggatcatgttttcttatccattctgacagtctgtggcttttgagttgaatctatttacacttaaaataattactgatagggaaagacttttgccactttgttagtttcctgtatgtcttacagcttttttgtccctcttcctccattactgcctcctgttgtgcttatttgatattttgtaatggcacattttgattccctttttctatagatagttgcattgtggataccatagagattgcataggacaacctaaagttacaacagttggttttgatgtcaacttaacattaattgcatacatgaactcttatatagctctaccaccccactccattttgtaaatgtcacaagtaatatctttatacattatatgtccattaacatttaaaattatttttatgcatttttaaaagtaaagttacaaaacaaaattgtaataatgctgctttttatattttcccatgtatttaccattatcagagatctttatatcaagttactgtctagcttccttttatttcaacctaaaggatttcctttagcattttttgtaggtcaggtctaatggtaatgaattcccttggcttatgtttatctaggaatgtcttaattcctcttttttgcaggacagtttgcctgaatcagaattttcagttgacagttttttatcttttagcacttcatatatataatttcactgccttctggccttcaaggtttctgctgagaaatgagcagatcatcttattatctcctatatgtgatgagtcttttcttttgctgctttcgagatcctctgtcttttgactgtttggttatagtgtgtctcagatagatctctttgggtttatcctacttggagtttatttagcttcttggatttgtagattcatatctttccccagattatggcattttttggccaagattttttcaaatatggggtctcactatgttgcccaagctggtcttgaactcctgggttcaagaaaccctcctgccttagcctctcaagtagctgaggttacaaatactgtgcctgttggctattatttcttcaaataatctctgtccttctcttctcctcttctttttgctgaactcataagatgtgtattggtccatttgatggtttcccataaattcattaggttctattcacttttcttcattcttttttctttcttctgtctgcccatatctgatactgaacccctctggtgaagtttaatttgttttttgtatttttcagccttcaaatttgagatggagtttttgctctgtcgcccaagctggagtgcaatggtgccatcttggctcactgcaacctctgcctcttgggtttaagtgattctcctgcctcagcctcccaagtagctgggattacaggtgcccgccaccatgcccagctaatttttgtatttttagtagagatgaggtttcgccaggctggtctcaaactcttgacctcaggtgatccacccacctcagcttcccaaaatgctaggattacaggtgtgaaccaccgcacctggcttgttaggttacttttcataatttctctctttgctgatattctcactgtggtgttcacctgtcatttcctatagttcctggtctgtgtgtgtgtgtgtgtgtgtgtttttaggtctttgagcatatttaagacagttgttttcaagtctttgtccagtgcctgtacatctttagggacagtttcttttcttcctttgagtgtaccatattttctagtttctttgtatgccttgtgatttttgttgaaaattaggcattttaaaaaacagccacctctcctagtctttgaaaactgtctctcagccttacaattaacccatcatgaaagtttaaagttttctcaaacattttctgagcatgtcttgtctgggtctgcatatacatactcttcttaattcccctatatacacagctgctttcagatgtcttaatttcctgaagtgtcttgtctgaggttatcctcagggccttagatgatctgttgttggtctccgctcataatctcttgtcttcaggcatccatattggtcatccccctgcagctttcctgagcagtagtcattgcttttctacctgggagctaagtgaaacagagaccaatccttcaggcagcccacagacttgtcagaatgttgcaaataaggtctgctctgctccctccggttcaagggacacagctggaaactgggccgctgcctcctccagaccaagattgtaccacactggggaagtgtggtgcaaggttgagtgaaaatacccttaagtttcctrctgttttgaatgtggcttttcttgagtgggcattcacttggttgctgtagacttttgactgttttccagagttcctgtaaggttattttagccagtctctcatttcatggagaaatgaggacttggagcttcctagtcccccatattactgatgttactccggtgctcaggctttgattttaaagtcattaagacattaagatacagttgcttcttgtattcagtggggttaggtttgcaagttcaccccttatagccaccctgtctcttgaatagcatggatactaagagtgccagggcctgaagcaaggtgaagaggcatctctggtttgtctctggctggggctgcttgacttcatggggagtggggcttgagtaccacttgcctggctctgtgccaggtgttgtacagtcttttattttcgcttggggcacagcggtgaaatgtgaaacttgtagaccctgccttgcaggtggggtcacagaaaggaagcatctacaggtgtggagttctcactggtgacttagatgagggcatgggccacagtttgctggtctccaggagggaacgggggcccctggacgttccatgcacttgtcacattgggccaaagagaagaaatctaagcacgagggtcttcactgaccttcagccagccagctgcttacatgtgaatagggagggcaggccctgagagcagaaagacagaacagcctctggatgactgagtggctgagctaacggagcctttgccatggctgcccagagagagctggcttagggtctagcgtgaccaagggagggcacatcaggagagcgccccgcccagggcactgctgtttgagctggacaggcccatggggtgtgaacccaaggccctccctgcgcccccaccccttcctctctataccatggcagagactcgtgtagggctgactgcttttcttagacagcagtggggctgccaacagcagggccttcaccacagccagcggatgctgggccagcgttccccactccycttaccaaagcacgtgaatcccatatgctgaaccaccagaacagcaggaactcttctgacttttgctcagtcccacagtctagcactgttcacctgactttcttggcacttgtccccagcaccgtcaacacttacctagcatacacgcacctctgggcactgtgctaggtatggtgccatcctaggaaaacctccagaggttcgcctgcttctctcaagtagagagcccatatggagagccggagtgagttgttgtgcacagggcaaggtgcagaaatacttggtagagccaggcctctgggtgtcactctgggagagcctgaggtgctgggccaggtgtagtaaggaagatgggagaagggtgactgagtgcacagaaaaaaggcaatggagtcagcgactttagggagctccacgcaagtgccggagctggtgccgtagagctgcggtggggggagagagatgctgggacgagagaactttctgacctggcatcccctggagggcctgtgagtgcaagcatgggaacgttctgggcgaggtgctgcagccatggtgaggccctgtggagcaagggctaaggggaggagctgcgagtgagttctgccagctaccagagcctggctgtgatggggtgagctctgctggccatttgggagctggaagttcggctgtgagtgtagaagacacgtcttgtgagtggccaacagtgggacgagacttcagtggttagcaagtggttagcctttcttctgtgcactcagctacccttctcccttaccacacctggcccaacacctcctcaggccctcccagagtgacccccagagggctggctctaccccctccagccctggcactggggagaaaggctagtgttcaatacaacagccaccatcccttcacccggccccacacatgtactagggtcccatctagaagagctgctccccccagcccactcctacctcactccatctgcgctcaccctgttctcatcctgccccactgtttgacttgactcccagcacaggcgccctggcacagcagggatcttgcagcgattccggttgcacatccacaggggcttctaaagaatgcactcaggacttctggcctcattcccaccccatggaccttacctcacccttttctccagcaccattgggccaaaatgagaccttatcaaagaaagaacaggacgcttgcctttttcctcaggttcttaattatgtttttagttttttgcgagtctctctgaaatcctgaagatgtggaagagtttgactaaagtacataaatactcagagctctttttttttttaaacatccaggatctcaagggtgttcagaaccttttcaaaaaaataatttagccatagatgagaagcagccactaggcccttccttgtaaagtggcccctgtgtggggatgcttcaagccaggtggaaggacggctggactgtgataggagtgagaaaagaacagatctttttctttgagggatgtgagcccccttagttgtcagacccagagaggcattgaaatgtgacagcagttacgtctcactccccaccctgacctaagtaatcgcctgctctgtggactctaggccagtagcctgtaaactctgtatattaattttgcctcagtttctttaggtcaatacgaacaacagagcggtggctgactacacataatgtttgggatcttacctgaagagcttctgcaaggaggcttccagatgtttaaagtttggcttgagttggggtgtcctcagaccccactgacatggagtagtcctcattctgagaacttggtatctgttatgagacatggtttggctgcgtgaggtggtgattggcttctcaccatgacaagccaccttaggctgccaggagaagctcttcctgggggaggggctgcccctaggtggagtggaaccagatgttggggtctcctgatcacattttctgctttacagactgatgaagagaagcagcagggcttacctgtggtgatgccagtgtttgacagaaatacctgcagcatccccaaatcccaaatctctttcattgattacttcatcacagacatgtttgatgcttgggatggtaagaaatcttccttaaaatagcatattttcctctaaataatggggaaccgcgtatgaaagagcagagtgcatttgactgtagaatatratttggggcctgggctttcaagaacaagagcgaagtraaccatcaccgagggcccctgagggctaggtgttctttcttaacactccccgcaggcataggtgtctttatgcctgttttatagatgacgggattgaacttggggccccacagcttgtagtagagcagctagggttcaaaaccaatcgtgctggctccaaaacccatggtgtttctacagcagccctttgccctccactgtcccctgcttctcccagcctcactctacacaagaccagaaggactggtctgtctctgactgatgcatgtcaccctcctttaacttcaggtggggcacaggagtctgtcaaataaaagaatatcggagaactgatattccacgtgcatcttcgtcctgagggctgcaccttgaaggaggggctacagggctgataaatgtccagatccagtcaggaaataaacccatgtctcaagaaggccgtagaacaggggtaggcggctggggagaaggactgaagcagtggagctagatagctgcagctttgggggamactgcatactctgcagctcactgcttctgggactgagaccagacgcgtgtgtccccaggctgcacgttcttcatgtggtgcaggtgaaaggagatgctggtgtatgtgaagcatgcgtgaagggacagtgagcacacaagggccaggccatcggttggggcsggggggcaggggcacactacatactgctttctgacaccccaggcccaaaggtgctgctggtttaatggtaattaagcagattagccaccttctgttttatttaccacagttaccagctcagcaggtggtcacagaggaggtgctggcattgaggacagggtttaacttcagtcagccacggctcgttgaagctgctgggtgtgtttgcccgggtctgtttagcctcacgcagatgcctgctcccatctgtcactctttaaaatgctcttagtgaaagcctaaaatgtaaacagaggctgtgaaagcatatcacattcctatctttctctccagcctttgtagacctgcctgatttaatgcagcatcttgacaacaactttaaatactggaaaggactggacgaaatgaagctgcggaacctccgaccacctcctgaatagtgggagacaccacccagagccctgaagctttgttccttcggtcatttggaattcctgagggcagccagagctccttggtcctttcagtactaggcagaacagcccccgatctgcatagcctgtgaaagcccacggggacatcagtaaccttctgcagccaccatccaatgccattactgtcaagtgagacttggccactgtagcctgggcctgctgcaggagctcttcagaaaggcacatgaggaccacggtttgcctcagtttctggtaaaacacaaggtctggagtgcccctgcaaagggtattgatggacttcctgccagtgacagagcatgtctattgcaaacaattctctcagttacgttcagcacttaagaacggctaatggcaataggatctttagcaactttttcacatcatagaaggtgcaatcgctcacttgggaacactactgagagtgacttctcttttaaaattgagtagcagatgaaaaattaaaatttgaacttgattattaatatcaattaaaatgttttatttattttattaaaagctcaatattttctatgaattcaaaaatacttcagagccaaagccaacttcaaataccgtgaccaaatttacatgattcatattcattatgcattacttggtatacagacttattttcataatgcaaattaataaaatgacacttttactgcactatagaaatattcatgtatgttaaacttttctgattgaggctaactggaaaaagctggggtcgtattctaagtgctaaagaaggctgcttctactgtatagaacccagggctctgaaacagctctagccgcctaatgcacttcacaggtaactccccaaggtaaaactagactctcttgttggttcgcaaagaaaagttaggacttaacacttttttctaaaattttataattcaatttccaaaagtctactctattttatactgtttctacaaaatattccttataaaaacaaagaacaaaaattgaatatttaatgaattgacattttataaccaacctgtttttatctacggtgggaatctttgatgccagaaatttataaagaggttctgtatcttcacaccttgaataagcataataccataaaaaatgacacttgacatgtcaatgtatttgtcatttcattttaaactcgtatttgtggtttttttcccagataaaaatgaaattaaaccatttctttttaagaaatcatgttttatcatctttttggagagttctttgtctcataatacttataatatttttttttttaaataaaggtcaggcacagtggcttatgaccgtaatctcagcacattgtgagcctaagagttcaagaccagcctgggcaacgtagcaagacctcatctctacaaaaaatttagcaygcacctgtgatctctgctgcttaggagctgaggtgggaggactgcctgagcccaggagttcagtgctgcagtgagctatgatcatgccactatactccagcctcggcagcaaagcaagaccctgtctctaaatcataaagaaaagaaagaatattccttactttacagaaaagactggtagttaaatgactttttcaaggtcacacagggccagatgagtatgttgagaagttctcagaattaaccttagttcactgcctggtacctctgaatgggaattgagagataagaggcacactggagaactgacaggggctctcagagatgggtcctgggcacgaggtgcccattcagagatgtcagggcactggagggctgacagggcaagccctttggagtttctgtttaaggaaacaaaggctttgtcctgtgttaagatatttggcctgagatggtaattgtggactgagcggggaagacagttctgtcccctccccaggtgcaaagaaaaaaggaaacaaaccacacgaagaactcgaccatcttgaggcagagatagcagtgtgtgcaatatatggaatttgcatcaccaagagctggtaataattatcaaataatctgaaagagactttaagatgagtaggcttaacatgcttaaacagataagcgaaaaagaaactaaaccaggccaggctcagtggctcatgcctgtaatcccagcactttgggaggccgaggtgggcggatcacgaggtcaggagattgagaccatcctggccaacacggtgaaaccccatctctactaaaaatagaaaaaattagccgggcgtgatggtgggttcctggagtccccagctactcgggaggctaaggcaggagaatggcatcaacccggaaggcagagcttgcagtgagccgagatggcgccactgcactccagcctgggcgacagagcaagactccgtctcaaaaaaaaaaaaaaaaaaaaaaaaaaacacacaaaaacctaaaccaagacagacagtttaaaaataaaataatagatttgacaaaaaaacatattaatagacattctagagatgatgactatagtcactgaaacagacaaaaaacttcaatgtctaggtgtcacagaagaccagacgtaactagagggaattagtaaattggaagacaatgaagggactcaattagaatacagcacagagagaaaaatggaaaagaaaatatgagagcagaaagaaacacttcaaaatatgtccaattaggagatccagaagggagagcaggaagaagcaccatctggaggagtgcagagtcctccaggatttgatagacgcaagtccgcagatttaaaggcacagcgaatcctaggcaatatgaataaatccatacaagtgaaactagaccagtgagcacaaagagaaatacaaagctgagaaaaaacagtccgggcacagtggctcacgcctgtaatcccagcactttgggaggctgaggtgggcagatcacgaggtcaggagttcgagaccagcctggccaatgtggtgaaacccccgtctctactaaaaatagaaaagttagccaggcgtggtcacgggtacctgtagtcccagctacgtaggaggctgaggcaggagaatcgcttgaacctgggaggcagaggttgtggtgagccaagatcgcaccattgctctccagcctgggcaacaagagtgaaactgtgtccaaaaaaaaaaaaaaaaatcacaggaaagcaaagaagaaataaagtgcaactaatgcaaccaataaaagacaaatggaaaaagaaaatgcatgagttagaaaagacagtggcagaaataagtataaactcatacacaaaatcaattgtaaagatctacatgtaaaaaaaagtagcatatggtgaaaccccatctctactaaaaatacaaaaattagctgggcttggtggcgtgtgcctatagtcccagttacttaggaggctgaggcaggagaatcgcttgaacccagaaggcggaggttgcagtgagctgagatcgtgccactgcaccccagcctgaatgacagagcaagattccatctcaaaaaagaaaacaaaacaaaagtaacatatgacaaaagatacaaatcaaactaggtagctcaaatcaatgtaaatttattgtcttatgtttcctgggactgtaaggctggaggtcaaggtgtccacagggttggttccttctgtaggcccagagagaaaaaccatgctgtgctgctgacatgttccttagctagcagatgcattgtcccaatctctgcctccatcttcacattgcctaatgtgggacttgtgtcctcccttctatttataaaaacactggtccatgctaaatccaggctggtttcacttcaaaatccttaactaattacatctggaaggaccctatttccacatgaagtcacattttgaggtttcagggggacactgttctacccatgacagatggtgataccacattcttgtttgcttactctgatgaagcaagctgccatattgtgagctgccttgtgagacacacatggcaaggaactaatgttagcctgcagctcacaaccagcaaggaactgaatcctcccagcaaccacgtgagtaaggtggaagtagatcctgccctagtcaagtctttagatgagaccactctcccaggagacaccttgattacagccttacaagagaatctgagccggagggcccagctaagctacacctggaatcctgactcacagaaactgagataacacatgttttaagccattacattttaatgcaatttgttacacagcaacaaataactaatgtgtaaactgtagagcactgaaaaagactgaagcagagctacagatgttgacggggaaaaattaataatattggatgaaaaggcaaaattgcactaagatgtagtttatgtaaattttttgaatacccaaaacaatacactaatgctcatgtaaaaataaatagtaggaacattaaaattcaaatattcaggaagtttacaaatactgtgaactggcttgtacaatactgcctagcttcctggtgaacacacaaagtagagagtgaaaagcctttcttccaaactcctttgcaccaaggtttttatatctaatttaggttcacttgtcagatggcatttgtccaagactctgatttagaactgagtcataaatggaaaaaagcaaaggtccgcattggggcatcaattttgaatgtcagaaatgccattctagacccagcagctataatgacagcttcctgattgtggtagaaacaaggctctggaggcacggcaataaccatggcagcccagcctgaggtgtgatcttaaggagactttccaggaaacacagtcaagggtcttatttcttcagctcttgcactgataaatcccttcagcttaaaccagctagaggagttctccagtctcaaaattaaggactctgatcaagaccagaagtatatactccaacttgacaatggcagttacctatggaggctggggaggggtctggtgctgggaaaacattcagagggaactatgtgtattttctatttttgaaataatacataaagcagaagcagggcatggtggctcatgcctgtaatcccactactttcggaggccgaggcaggcgggtcacctgaggtcaggagttcaagaccagcctggccaatatggtgaaatcccgtctctactaaaaatacaaaaaaaaagtagctgggcatagtggcgggcgcctgtgatcccacttacttgggagaccgaggtgggagaatcgcttgaacccgggaggcagaggttgcagtgagctgagatcgtaccactgcactccagcctggtgacagagcaagactccatctcaaaaaaaaaaaaaaaaaaaaaaaaggtagacacagaaaaatgttaatatttattaagtctagtggtgaagtacattgattttttaaaggcagctagggccaaggcagctaggatattttttcttcttttgagacaggtctctgttgcccaggctggagtgcagtggcgcaatcaggctcactgcagcctctacctcccaggctcaaacagttctcccacctcagcctccttgagtagctgggactataggcacatattttaagcagagaaagtagtacacaaaacagaagccatatgaaaacacaattaaaaaatcaacaataaaaatcaaaatattttatgtgacaaatgacaatatgtcaaaagcaaggaaatgtttataattcattttataaaagcttacttccataatactgatttttaaaatttttatatgagaaaatgaacagtacggtagaaaaaatttaaaaatgttatgaacagaaagtttgtagaaaaacaaaaggttcttaaagtttatactacactgatagtaatcaaatgcaaattagaaccaatttgagatatttttcacctttaagatgagtaaagaataaaaagtttgataatatagtatgttaataagaatgtgtgggccggttgcagtggctcacgcctgtaatcccagcactttaggaggccaaggcaggcagatcataaggtcaggagtttgagaccagcctgtccaacatagtgaaaccctgtctctactaaaaatataaaaattagccaggcgtggtggcgggcacctataatcacagctactccagagactgaggcagaagaattgcttaaacccagggggcagaggttgcagtgagccgagatggcgccactgcactccagcctgggtgacagagcaagactctctcggggagggggcgggggtgggtggtaaaaaaaagaagaatgagtggaaatgacatggcaggtgagtataattagtacaacctaattacaaatttgccaaatctatccaaattgcaaatgtacatgcagtgtgacctggcaattctacttccaggattttagcctaaagatatttacacgtgggaaataatagtctacaaaattatttattatttactacttatattagtaaaagactggaaacaaattgtctatcatttaagaagagtaagtaaacaagttacaggtatgaccatacaacagaatactatgcaactgtaaaaaagaatgaggagacttattttccagatccgcatgtaaggaacttgaaagtcgccacttcattctaacaagtaaaaagctaaacagcctgaaaaatcaacagctcttcctagatctgtaagaaaggtgaggatacaagtcaaactgctgcccctaagataggagagaccagcaggcaaatacaggaaattatatcttactggagcagagattcatgagtggaaaccaccatgggaaccagtgccagggtagaagaacctgtcagtaattgaagaattggtggaggctcaatgtggacagtctaagaattaaaactcctggggaacccagttataaggggtgccccccgcctgcactttcgtgaattttacctccaagagcttcacagttctcacagtaaatataacaggaaaattccctcatacttccagcaaagagaggaggaaagcactgttttgtttatagcaaaaacactgcgaatgaatgaaaagtgcttttgatgggctcattaataggctggacatgaattaggagtgaatctctcagcttgaagacatgtcaaatagaaacctacaaaactgaaaattaaagagaataggactgagcaaaatatccaaggactatggagctaaaaagttgtaatatacatgttataagaatagcagagggaaaatacagaaagaaa

SEQ ID NO: 94391 - DNA, 58912 bp, Homo sapiens
  misc_feature (1)...(58912): n = A,T,C or G
tgcgcgccaccatgcccagctaatttttgtattttagtacagacggggtttcaccatgttggnnnnnnnnnnnnnnnnnnnnnnnnnnnnnnnnnnnnnnnnnnnnnnnnnnnnnnnnnnnnnnnnnnnnnnnnnnnnnnnnnnnnnnnnnnnnnnnnnnnnnnnnnnnnnnnnnnnnnnnnnnnnnnnnnnnnnnnnnnnnnnnnnnnnnnnnnnnnnnnnnnnnnnnnnnnnnnnnnnnnnnnnnnnnnnnnnnnnnnnnnnnnnnnnnnnnnnnnnnnnnnnnnnncaacatggtgaaacccagtctttactaaaaatacaaaaattagctgggcgtggtggtacatgcctgtaatcccagctattctggtggtggaggcacaaggatcacttaaacctggtatgtagaggttgcagtgagccgagattgcgccactgcactccagcctgggtgacagagcaagactgtctcaaaaaaaaaataataataataataaagaagtttgtaatttagaggacaagatggacaatgaaccataatgccataaatagatatatatttacacattattagcagggttgatgaaagcatatataacaaggggatctattctaatgaaaggaccaagaaagacctctttcagtgatatttaaatgagctctaatggccgggtgcggtggctcatgcctgtaatatcagcactttgggaggctgaggcaggcggataacctgaggttgggagtttgagaccagcctgaccaacatggaaaaacctcatctctactaaaaacacaaaattagccgggcatggtggcagatgcctgtaatcctagctacttgggaggctgaggcaggagaattgctaaacccgggagacggaggtgagccgcgatcacggcattgtactccatcctgggcaacaagagcaaaaccctggctcaaaaaagaaaaaaaaaaaaaaaaaagagctctgatgaatgagcaggagttagccaggcaaagagaagaagggagggaggcattctagaaagataaaaacggcctgtgcaaaggccctgaagagcagagagcacattgtttgagagaaagtcacatggcgggagtacagaaagctaagcaaagagagatgacatgggcagggatcagattacgtagaaactttgggtgtttcttttttttttttttcccccaaatatgaggaaaggaccagctgcagtaaaatcccctgaagtggccaggagtggtggctcactcctgtaatcccagcattttgagaggctgagatgggcggatcacttgagcccaggagtataagactagcctaggccgggcacagtggctcatgcctgtaatcccagcactttgggaggccgaggcgggtggatcatgaggtcaagagatcgagaccatcctggccaacatggtgaaaccccgtctctaccaaagaaatacaaaaattagctgggtgtggtggcacgctcctgtagtcccagctactcgggaggctgaggcaggagaattgcttgaacccgggaggcagaggttgcaatgagccgagatcgcaccactgcactccagcctggggaatagagcgagacaaaaaaaaaaaaaaaaaggctgggtgcggtggctcacgcctgtaatcccagcactttgggaggctgaggtgggcagatcatggggtcaggagatcaagaccatcctggctaagatggtgaaaccccgtctctactaaaaatacaaaaaaaattagccgggtgtgggggcgggcgcctgtagtcccagctactcgggagactgaggcaggagaatggcatgaacccgggaggtggagcttgcagtgagctgcgattacaccactgcactccagcctaagcgacagagcaactctgtttcaaaaaaaaaaaaaaaaaaaaaaaaaaagactagccttagcggccgagcacagtggctcatgcctgtaatcccagcactttgggaggctgaggcaggtggatcacgaggtcaggagtttgagaccaaactgagcaacatggtgaaaccctgtctctactgaaaatacagaaattagccgggcgtgttggcctgcacctgtaatcccagctactctggaggctgaggcaggagaatcgcttgaaccctggaggcagaagttgcagtgagccgcggtcatgccactgcactccagcctgtgtgacagaatgagactgcgtctcaaaaaaaaaaaaaaaaaaaaaaaagactagcctgggcaacacagggaaaccccatctctacaaaaaatacaaaaattagctgagtgtggtgacatgcacctatggtcccagctacttggaggctgaggcaggacgatcgctggagcctgggaaatcgaggctgcagtgagctgtgatggcgccactgcactccagccttggtgacatggcgagaccctgcaaaaaaaaaaaaaaaattagctggatgtagtggcacgcacctgtagtgctagctacttggtaggctgagttgggaggatcacttgagcccaggagttcaaggttatagtgagctatgactgtgccactgcactgtagcctgggagatacaatgactctgtctcaaaataaataaataagtaagacaaagtaaagacaaacattctggtatttattcttctaggctttttttgtttcagttttctttttttttttttttagactgagtctctctctgtcaccaggctggagtgcagtggtgtgatctcagctcactgcaacctccacctcctgggttcaagcgattctcctgcctcagcctcccgagtagctgggactacaaggcatgtgccaccacgcccagctaattttttgtatttttagtacagatggggtttcaccctattagccagggtggtctcgatctcctgaccttgtgatccgcccgcctcggcctcccaaagtgttgggattacaggcatgagccaccgcgcccagtcctcctttttttttttttttttagagatggggtctccatatgtagcccaggctgggcttgaactcctgaggtcaatgaatcctcccttttcagcctcccaagtaggtaggactacaggtgtgtgccaccattccaccatgtctggttaggctttttttttttttgagacaggatctcactttgtcacccaggctgggtgcagtggtgtgttcttagttagctcacctctccggctcaagctatcctctcacctcagccccccagcgtgagcacaggtctggcccttggccaggctttttgatatacacatatactcaggcatatgaatctagtttgttgtttttataataatggaacaattcagtaatacttgtttgagtcctgattttcaagaaaacaatatatcacgggcatcttttcaggtcggtatagacctataaaattttttttcttcttttttattttttatttatttatttattttttgagacggagtctggctctgtcgcccaggctggagtgcagtggtgctatcgcagctcactgcaacctctgcctcccaggttcacgccattctcctgcctcagcctcccgagtagctgggactacaggggtccgccaccacgcccggctaattttttttgtatttttagtagagacggggtttcaccatgttagccaggatggtctcgatctcctgaccttgtgatccgcccacctcgacctcccaaagtgctgggattacaggcgtgagccaccgcgcccagcctatttttatttttttttttgagacggaatctcgctctgtcacccgcccaggctggagtgcaatagcccgatctcggctcgctgcaacctccgcctctcggtttcaagtgattgtttcgtctcagcctcctgagaagctgggattacagaagtgcaccaccacgcccgcctaatttttgaatttttagtaaagacggggtttcaccattttggtcaggctcgtctcgaactccagacctcgtgatccgcccgcctcggcctcccaaagtgctgggattacaggcatgagccactgcgcccggctatttttttattttttttgagacggagtctcacactgttgcccaggctggagtgcagtggcgtgatctcggctcactgcaacctctgcctccagggttcacgccattctcctgcctcagcctcccgagtagctgggactacaggcgcccgccactacacccggctaatttttttttgtatttttagtagagagggtttcgccgtgttagcctggatggtctcgatctcctgaccttgtgatcagcccgcctcgccctcccaaagtgctgggattacaggcgtgagccaccgcgcctggcctcttcttcttcttttgtttttgttttttgtttttttgagacggagtctcgctttgttccccaagctggagtgcagtggcgcgatctctgctcactgcaacctccgcctcccgggttcactccattctcctgcctcagcctcccaagtagctgggactacaggcgcccaccaccacgcccggctaattttttgtatttttagtagagacgggtttcactgtgttagccagggtggtctcgacatcctgacctcgtgatccaccagcctcgacctcccaaagtgctgggattacgggcgtgagccaccatgcccggcccacgcccggcctcttttttaaaatacagacagtgtctcgccatgttacccaggctggtcttgaactgggctcaagcaatcctcccgcctcggcctccaaagtgctaggattgatgacaggcaagagccaatgcacctggcccctttaaaacttttttttttgaggcagagtttcactcttgttgcccaggctggagtgcaatggcacgatcttggctcactgcaacctccgcctctcaggttcaagggattctactgcctcagcctcctgagtaggtgggattacaggcgcctgccaccacgcccggctaatttttttgtatttttagtagagacggggttttaccataatggccaggctggtctcaaactcttgacctcaggttatccgcctgcctccgcctcccaaagtgcggggattacaggcgtgagccaccatgcccggtcccctataaaacttttaatgtctggataatattttactgaatgaatgtctcctgctttgcttgccaattccctatcgatggatatttaggttgttttcaacttttcacatcattacaaacaatctcatgttcattttttaacataacaacgtttatttatttggaatacatttttgttagtggaattgctgggtcattgacaaattgtctaggtctaattaaacatgttcatactgtgtaccaagaggagatgtagcgtggatggcaccaaagtcagggaagtctttccggctcctggtctgctggtctgcccttttgaaggccttggagtgttacagccataccctggcctttcccaggcttttctttccctggcacggatgcagtgtgtgcggtcagagctggcgagttcgagacttgtccgaaccatccacccgcagccaggccccgctgcagaggctgcggtggccctcccagcccctgggaatctatccccaggtcccctccccgaccgcgggagggcgtgttaggggagcagcttaggcaagcgacgattgcaccatccacgttttgaaaagaaagtccggggagcgcaaggaggaaacttttacaatccaaaggttgagccccagcatccatactcggcccctgcagcgatccttccactcctgctcgctgggttccgatcccttcccttccaccccgtctcggccgaaccctgtgctgggcactggccctttaaggagctgtcacgatggcgtcgctggccccgcccggcggggagggccgagaggcaggggaggggttggtggtggctgcgggcaaggggaaggcggggggggctggggggggggtctgggtctatttttagctccgggtcgggtcacgtgacgggagtgacgtctccgaatgttgttgttggtggcggcggcgagcggagccggaggagccgccgcaaagatggaggagccgtcgaggaggtgctgccgccgctgccgccgccgctgctgccgccgccgcccgcgaagccggagctcgagccgcagcgggtgagcgcgccgccccggcccagatcccatcttccccggaccccgggacgcgaggcggcgccccctcctcctgctgtctctgtccgcgggctcccagcgcgcgcgccgcgctccgcgccccccttccttcctcccggccctgggagccagccggcgccccccgggagcatcggcagcccgtgagcgggacatcggggttgctgcgcgcgcccctccctgcccctcccagacaggggcgccttccctacaggtaagggaggggcccgccttctcgcgccctgcgcccccaaatggctcggagaccggccggggttgtctgatttgccccttccctggcggcgcatgttgcgttgcagagccatttgagccctgcacccggattctgtgcagacccctcttcgctggacacccctttcttggtactctgaggtgaggggtgctgcccacccagagcgcttctccccatagctacgaacgcatccttgattttatgtccttgacttccgtgcatgaggagggggactgcggagtccaccttacttctctctcccattattctcaccccgtctcctgtgaggcgttactgcgtttgttgccaccctcttctcctgtctgacaccttggagccaggatgcgagagctaggagatgaaatggagctcccccccaaccccttcttgtcttgggtggatgccccccatttttcatcctggatctgtatctcatggaagcgggggcactaccagtgccttattaacttggggggagtcagcttctccaccccacccttccctggggccctggggaagatgagaactggctgggtgtaagtaattaatctgggagcttggtgggggctgttgaagtggggaggttgggtgcttcctttgggagaggagatgaccacttgatacccctggctgataccccttctgaaatgaggtgtgtccctaaagaggaaaggtaacagctgcagttgcttttaggagggtgcaaaagggacccatcactcagtcagtgaccaccatgcttttgggatctgggattagatttggagcttggggaggtggtggtgattggttwcagtgtccaactgggaggggaggatggagccagattatgggaacaaaaggaggtgggggggagggtgagatccaggagtcttggtcagagggacccctagccagattgccttgcaggattgcagtctgggtctgggtcctgcctttggcttcctcttagtttcagaggatgtaggcaggcaggcatggtcttcagtctccccagtcctaggcaccctgagcctatgctggctgttgagatgctgggctgggctgggctgggmtaggctggctgggctggatggtggatgagccatgttgggggctgcctgcttcttcattccagtcttccctcyttcctctccctccmtaaacacaaagcttggggagatcttggtttgtctccttcctcttttcttgactcctctctttgccctctcttcacttgaacttggatctgggctttcttgacaaagcagtaggggtctctctgagttagagaaatgggcccccagtatctccactctgtcctgggaatgtgggcatgccagagaccagagagacagatctcaagtgtgggttacttgggggcaaggatggaggaaatgttagttctgtgccagcctccccttcttttccaatatatcctcctactttggctggatcatgtaatttggaggggggcagcagtttcacatgccccacccaccccaagtagctgcagagacaaaggtttgctttgccttccgtaggggtggcatcttaattgtgtgtttagaaatggggcctgggaatgttgggcgggggtcatttgtgttcccgcatagtgggggagggggcatcagctataggagctgggggtagtgcagtcggtgctgaagtaccagctgctctttaataattaattcttcctactcacatccctttgaggagggatgtctggaacacagcattaggctcagccagcctgctagaggacgcactcctgttggtggcagtaggggggggaagggggagacagcaagggggggtggttcttggcatttttggagcactgtagcttgctcatgaatgaaaacctgatgtagcccgtgagggggcctattgtagccgactttagctaattaaactttctctgcctttcttcttccctatcccacctcaccccaggcccagccgcagccctttcttgaatggggaccctgyctggtagtgctgggaagagggtatcattctgcctgaggttttagggcaaacagaccccgtcttctgccctctgcctccgcctcctcccttcctcccctctcaccacccccctctctttttttttttttttttttttctagaaatagcagcctcctccatctggcttgtgcagatgcctggagctgcgtctgagcagacaaacagaaatgggccgattgcaaaaatgaatttgtcagcctggtgccttttttccttccctgtcaccctccccctttccctggtttggggcctggacatccaagtcagccacccttcatggctctgatccttctgggcttctgttggcctagcttgggggaggcactaggcaacagaagctctcagaggctgaggaaagtggtaggctgtggccatggtcaggaggggtcaagataagttcctagtgcctttgacctttgggtgggatgtcttggcttgtaactttttttttttttttgagatggagattcactcttattgcccaggcgggagtgcgatgacacaatcttggctcaccgcacctctgtctccagggttcgagtgattctcctgcctcagcctcccgagtagctgtgattacaggcatgcgccaccacacctggccaattttgtatttttttagtagagaaagggtttctccatgttgatcaggctggtctggaactcctgacctcaggtgatccgcctgccttggcctcgcaaagtcctgggattacaggcgtgagccgccgcgcctggccggtttgtaatttttgatgaaactgtcggggtagagtgaaacaatctcagactcccaagacttgattcacactgcttgaccctgtcacctatgacctagggggtaccctggcctggggccagagcaggtgtgttgggagggggttgcatggtggtactggactccaggatccagagagggtcttcaagggacacctgactccccaggaattttgagggagttgtttgaggaacaagatctctacagggtaacattgtgaacctatggcctttggagcattgctttgtaccatgtgcccctcacttgtctgccctcctccacccaccctttgccagagtttggggtttccaccctacttccataggctcagccctgagcttgtagggtgagatgtagccygtttccttcatccttgtccggctgtcttggctggatgtgggaggtggttttggatcccggagtggggtakgggtctgtctggaaraaaragttggtgtgaggtagtggggtgggcaggggtctgtctgcttatgatgtcctggaagtygggccactccctggtttggcatccaagtgttaggtcatctgggacacagctcctggtgtccctgactkcccactgagacccaacasatttctctggcagatgtgggaacaaacagctcaggttttaaacatcaggctccccttctccccttcatgtcccaccccagacaggaatctgtgcttgtcccgatcagaccatgaacactgctttgtttctcagggaggctcagcctgtggctctggttcacttgggagacttgatgggggtgttggcagacactctttacaggtggacagggcccaggggcccagggatcctgctgaattttataggacggggaggagtagacgtagatgagtcccgagcccaccatgagttcaaggagctgctcccttcctcttctgcctcaggggtgaggatcagcatctttaagacccacagagagagtaggtgggttaggatgatgggggctaggggctaaccttaacctggtttstgtgccactggggctgtgccccttctgagcaccttgctgtggaggtgcctctcactgtggagatggactgggctactcaggctgctgggaatcgtgggcatttctgaacctgtgttccccagcccacgggaaagggtgtgagcaggactgggtgccagccttggtgtgggcacaggctgaactgcctgcccacgtgggccctgccagagcaccagcagccctacctgccacattcctgagcttggcctcagccctgcctgcgcagccttttttgtcttaatcccatacctgtgcccgtcaggagcaatttagccccttcaactctgccccccaatstgagtgcacctttctccagccatagagtccaagccctgtggtcccagcagcaagcctgggacctcagggtctcgtgtgtgcatgtgtgcgtgcatgcgcatgtgtgttcatgttcttgtgtttctgccatagctggcttctgggcttctgggctccaaatggaccccacccttgggaatctgatgagaatgtaaggcttactgagaattaatcctgccaggaggtggggctgtctaggggggcagagctgattgctggttcgaggcttggggagcagagttagggcttaaactcgcagcagctcacagcctcctctgatggcttcctgctaccttgctttcattgggtattggagggcctgccttcatttggaagcaaatgaatgagatcatgtctggggtggatcgtgggccgtttagggatgggccaggtgkctgtatgcatagtgtctgaggcttgaggactaactgtgggggagaactggaggagtgggcatgggttggcaaagccgtggtcctgtaatacctcctcctttactatactggcctcagcagggctactgctgggccttttgttgctttcgtacaaactgggaaaaaatcgtcccttgttttgggtggactcagcatgtcaggccatggcttggcaggcagggcacaggctggatttcgtatctccctgggccagacctccttacacagagcacaacctgtacaatatacacaaagtgctgggcttgggccctgcacctgccaggccaagggtactagatttgggatggagaggtctctgactttctcaattcctggaaagagaagctcttgtcctggtctgttgttgaactgtgggagaccaaaacagaagcacatccatatttccagagctgggtggcacaaggatcagaaagtcgggagaagacccctakaagtcccagcttakgctatggaggctgggataccagtttctcccttcacttctgccagggactctakatcagccctgcatctccccactgctatggatacagatcagaagcccccctgcactttctcctttggtgcacacctagtcccatggcaggcactgttgggagtctatagggtctccccagctggcagtagacactcacctgaaaaggggtctgttgggtttggccaccatagccatttcctatcccttgggctctgggagcctcatcagttagtaagataagaaaccagggtctatccagttctgcagatttctcctgtggctgtgggcaggtatccctccctctcatccctcatccccaggtacaaactgatgagctccaaggtctccttcgactctcagattcctgagttaggggcctctaaccctgctccatctctccccagggatgccgttctgagtgcctgactgcctcgccccgaaggatggcctcggatgggcattagaggcacggcggccccgggctcccgtcccgtccgtctgtctgttatcgtctgtctctcttgacatcaccgcagctccaccccctcccgtcccagcccccaacgccagcttcctgcaggcccagagccggcatgaactctcccaacgagtcgggtaagagctgggaggttggagaagagcaccctggggtagcttcggatgcaatgggctgtgtgggtttcccttccaggccagctgacctttactgtctgagctataagggaatgagggggtaaggagtggagaagtgttgcaagaaagggcccatgaggtagacctgggaatcgagggatcgatggtccggtctggtcctgggaaggcaatgggtcctactctgccccccatgcttgccctctcaacttaggggtgttcagctccagcttcgccttcccctgctagccaagacaggtgggcctgagggggcagtgtgtatcccttaatctctctgggcagtctgggatgatgttggaggaatttctttactatagcagaatgctcagcttccttttcgtgatggtggcttctttacttagtggaatgtttgtgttccatacttttttcttagtggaggtttacaagggcactgggccttaacctccgtgtgcaggtgcgtggcattgggtgggagtggggtgacgtgtgtagaggagtctcggctctcctctgagtccaggtagactgcctctcttcctcttgggcccttcatatggtagattgctaatctggggtcttttactctgagatttcctgttcctctttgttcctaggaccctgtccagtgctgccagaaatagtctatttgggggactctaggcagcttgatgtgcagctgggtctggatgtatgcctgtgaggctgtgttmtagtggcctgagctggaccctcagcagtttcccaggagggtcctgggrcagtgtggtcasagtagtggctgtcgtctcctcctcctcgggtgtctccttccacacagtgttaaaggtccatcttgctcaactttagctctccacggcccatcgtactcctcatcttttttatgtaggggtaggtggatatttctccttttagagatagggcaattggggcctaggatgaatacccatttgcaggattgtacagaagcagcatcagggaggaatccagaccaccccacattttcttccccatcatcctttctgtagggtttgctgttctccttcagatattcctccctctgcccttgccctcattcagcccctaggggctgggacaggtgggctgcccagctctgccctcttgcttgcccctctgaggctggatggcgaagggaaaggagaggcctgggtcctcatctgtccctcgtgcatcttggctggacactaccccagcaagctcagccatgtcgggcagtagtgccagctacttctttcctctgagttgtgacgctgacctgtccaggagccatctgcagtccctgcttcccatggggctggggtctaactcttggccaagggaattgaagctgcctagcggcatctgttggtggcttggaaaggatttttcccagctttggggtttctttcccttgcagggaaatgtgataatcaacccaggatagatgaagttattgggttacctttccagatgctggcggtccaagtttcccttgcagctacctctgtgggagctgacaagagtgttggaggagctggacgtgtccaccaacgcaggaggctggcagcttgagagccactgctgagccctggccaggaggggcgtcctgagtgggcctgtggaatgggccccgcgtcctgsctggctttccagctccccccagcagggggagatgctgtcttctctgtgttggggaaagaaggaaaaaaggagggggccagggattgggaacctcattttaggattgttgagaggctttggaactggggccactgcttggggatgtttgcttgaggcccttcctgcagagtgttcctggggttctggactggctttcccagttgtggggttccagctgccctgggccagggagatagtcagcctccccccagctcttcctttctgaggggcctagcgtctgctattcccagagcttgggctggcatctgggctagggctggggtgcccagcgcctggcagaagcctggaaaccacatgccttggaactcggcggaagtaaagtgagaccaccgattgaagccagagcacgcgggtgtccacttccctgtagagagccccaagaaggaaaggtatgggccatggggcaggagataagaggtgggaaggaaggaaatggttagtccccagggtctgctgcagcccctgagcgcctcccaccttttcctcacttccctgaacacttgctcctctttccccagagtaaaggacagtaggctttgtaaggggcagagcttctggttcccctcaagtcctctcagcgtaggagcttttcagtttggcaagtcctcactgagtatcaccaacaggctcagcctgtggaagacagaagaaaatatgagatgggccatccctggtcctcacagtgaacatgttagcaagagagactgttttggtgaggggcagcaggtggagactgtgagtgatttccttctggggcccactgcccaggaaggtgggagctgatgacttccctctggctcgggctgcctaccagcctttgactttatttacctcttttgcagtcttggaatcacaggcggaggctattgatggggttgcctgcttccctgagaccattccctgatctctgccttttcttccggcaaaagggggtttgaggattaaggctgtctttatttttctggaactgtttgcttctgcatgttctcctcagtggggctgaaaggctgacagaactttccctcagctcagactcggcccaaccaggttggaggagctgcccaggggcctgggacccaggccagctctggttgtaccctctttgtgccattgcccagaagagcaggcaagagtgaggcccactgtgcaagccagtctgggtggcagcggggccatggaggaggcggccaggatccttctccccagtgtgggagggagacaagcttcatgamaacacctgcctgcccagcgcctcccagaaccttcacactttctctctttcccttttccaggatggagggcagcagcccccccccccccacgcctgctctctgggtgaccagagaaactggggcatgggtgtggggtggagccaggaacctcggtgtcctgccttccagccttgggctctgcctccttcaragcccccagggaaggcaggcagtgagaaagtgggtcaatcctggcatggggctggggtctgagaagtagactcctggcctcccttctctactgagatgccccctggcacacctctgtgctcactgcagagcgggacctgcttctcccctcctcttccctgctctatcattccaaagagattgaaggcttagaatggaatggccagagaaggcagggtcaaccctgaggggaagtagaagatgccaaagtaggtgttcacatttttcctggacttggcttcaaatgagagggttcagccaacacctagcatggggcctggctggcacatggcagctcccaggccatgctgatgggctccagcatgactgggctcgaagggcaggaaagaacaggagggtgggcaggtctgatatctgggtctcagggaagctggcatctcacacttcatccagggtgctcctgggccagccattggctttttcactgcacactaagcagaccttgctttcttccctttggtcaaggtccccccatccccacagcctttgggctcaggaaatggaacctggagccagggttaggctcttttcctccttcagattcagagggctaggaggtcagagtgcagcctttgagggaggggcagagtgagtctggggaagacagtcctggctctgggtgaagctcatgtaccccatgcttggtgggtgctccataaggtttgtgggatgatacatgggtgtgctggttgggagagaacggaaaagagaagtgaattgcaaggaggggggctaaagcatgaaggattgaagttagacattaggaggaccttgtatcacctgaatctcagaagaaaaaaagacatttgtccccatcccagatctcctctcttattgccttggagggttctgggaattgcactgaggattttctgactgtgtctgatactttgcttcctacttgttggaggctgtaatggtgctgggagctggctccccagctcccggctccagccacctctgggtgtccctgtcctgggtgctactatcttccctaagcaggaagtcctgtttccttcaatgtctgggtgctccaggttctgggggccctgcttttgagtcctggtaactgacgccttcctcttctttagaataaggctctcctgccacactctcctatgcctggggcaggcagagagagctgggacagggctagccagcccttctggttactcctagcgtgggtgggaggagtcctgggctgggaggggttgctgctcttggctttctgggctcccttgaatctgctgcccatcaccccactgatggagaccttcccttcccttcctcttgagagggcctggttggccaggatgaggttggggcaaggggtggtgaacaagatccccagccataccctgaatgtccaccagcactaggcctctgagggagtactgttccactgccctttttctagaatctgccctggtttagaagctgcagctccagacccctgtttctttgctggtccaccactgggtaccccctggcaacatatacatcttgctagtcaagggcctgggaaagcctgcctctgcctataggtgtggtccccctaatcctcccactcccagcctgagggcaggagacccctttgccatccctgactggcagaagctggctgggaaattgggctccaggagccacagccactgtgtccttggttggccagcttctcctgggctcccaacaagagggtgaggtcatccagtccagagagaggacaggtgtccctggctccatgcctggagtgggggtcaaggagggggctccaaaatagcaactgtgacatcaggaagggggagggggatatagacacaggaataaccaggctattaaaaggctctagtgaggtcagggggccaagtgggatctttgtaccagtgggaggcacaacctgaggagcaggggcaggccagcggtggggagggcgggggagtgccactggtcctcatggtgcaccagccccaggacccagggagcaggggctgtgctgccaggcctgaggctggctggtgggtaatggctggatgctgaaaaactcttgactctccttagcgaggttccaacctcaagtctcttcctacttgagcacaggggtcattgtacctgttaatagaaaccctgggaaatgggaggcagtggagtgtggtggttagagctcagacttgagcctcagacatcccagccctgccatgtaagcagctttatgacctagggtgagtgacttcatctccctgtgcctcagttttcccatctgtgcctctcccaaggtcaccacgcagaattaatgagatgatgtatatgatgttcgtagcactgcacctggcacattgccatggaggagctacctgtgctctgagaattagcagatgttccctggtcccttttcctggattggggtgaggaaaggggaccaggggacacctgtctgcccaggaggagtatccctacaccctagaaagaagctgaggctgagcagcctctggaggcgacactccagaatgagcgggagggagctgccatttagcaggtgtttaggggtctctctgctggttgaaggggtggggaggcacctctcaactctgtgggagggcagaagttaagcaaacctccatggggctattagaactccagggaaggtgcctgtgtgccagcctctcctagacccttccaattcctttacctgttctggaaggcaagaagaaagacggaggcttgagtctggcttcttggtctccatcccctggcttgcttgccaagagtagcagccagagccgctcccagatgcatgggtaccctggccggcgcccttccccagcccagcctctggccacccagcgctgtggccttggccctgagtgcaggccctcccctgttcccatccccctcgcctggcgcttcctcctggggtagaaccgcctccccccccatggggcctcctggcagcccgcccgcagctccctgagcatgctccacctatttatagacagggccctcccccaactgctatttcagtctcctgccagctgccggcggcggctcattcgggaaggaggagcagggagccgggcccagagctgtcacccagggttgggagggaacacagagcccgcctgcccgctgagctccccttcctgtcccaagtgctcagccataccccagctcccaggaaccagggagaggctggtggtcggatgcccctctagagcagagctgggcctgcagctctagggcctccctgcccctcctgccgccaggagtgcccaggccggatgaggcacttccctacagtgtgggtcccgtcggcagtggcctgagggaacctgtgctstgcgggctgcccraccaccttcccttcggtctgctccccrcctctggcggccccctccctggcatgctgctggtgcccaaggctcaggggctcgtggagatgctgcagaccatctatgagacagaatcctgtttctcagcagatgggatgtcaggtcgggaaccatccttggaaatcctgccgcggacttctctgcacagcatccctgtgacaggtaagtgccttgatgtccctgcctgccctctgtcatctggcatccttgtccctgggctgagcatctggccctgagccttgcacagatagggtcctgcatagatctgtcttgagagttttgttgagaatacacagggctgggggatccctgctcagagaggcccctgccctccctgcccagagcctgctgctccccggtgcccctccgctgtactctgctgcatctcttccagtcccttcagtctctggcagggtcggcatccactgctgggggctgggggttactggaggatcctggcctagttggcactgtggtcagaggggaggaagtgggtcagtgacccgcctccatgctgcccgctccccaagtttgggcaagggaagaaggtstagctgggtgtccacaagaataaaggttactccagctcctctggcttggttcttggggctacaggatcgagtacagtgacttccgcaagtccccagccaggagtctcttgagaatcagacacttggggaggcttggtgcagtcatgatggagttaggcagaggctggcagcttggatattgaggggcttggctgccttagcccctagctgtctcccgatggcgctcctctccccaggtctgggttgattcccatctcatgaggatgaagaggtgttactctggctcagatgggcttcgggaccccctaatcctgccaccttctcagcaggaacttttttggctcttggctaggggtggggtcccccagagctgggccgctccttccctcactcccaggaacctgttggcagcatcaagccttcctggcacagcctccccaccaggccggcaccacaagatgcttcctccagggaggggcctgctggacccatgcctgctcagcccctcctggcagtggcttggcactcaagtgtgggtgtctgtgtgtgtgcgtgtgaatggggagtccttgcctctggatatgtgggtgtgcatcccaagcttcaaattggaaagtgggaactgtgtgcctctgcaggtgcctgtgatttggctctgagctgcccagggataaggttgcagtgggacttggatgtgtcagagcatgaatgttttgggaagattcaaaaaatctttggaacatggcttatcatctgcccaggcagggatgcccatgcagttttctcatgtaggagcatgaccctgaagactagccctgcagggtatccatgcaggccccraggataggggcattaccctggggccagccctgtaggctggggtggggatgggggygtaaccttgggaaccggctctacaagatacccacgtagtcccctgaggtaggggcgtatgcctgggggccccctacacaggtccctgggatgaggaataaacccagagggctggttcttatcctggtctggagtccacaggtccagctaaagaccctgcctgctggcccctagcccacagcctctgggactcaaggtggtctcttggaaggcagaataatcccagagcatctgcttgggacagctccacgccatctggcttatcaggtccacccatcctgccctgtcgcctctgttccttgctaccagcagcagccagcagttggccggaagtttcctcctcagcttgttcattcacctgcttccagattgtaccccagaaaccttgcagrctgggaccctgctctctcatctcctccctaagcctggctgcccctgcatggactcccaggcagcccctctgtccagatccctgtctccccactccacccccaacgctggctggccttcagagtggtggcttggtccatgctggcaggagggaggcgtgagtcacctcagcggctcggggagagggctaagaatgttccccctgcgcagctctgatgctgtgtctgtgacgcggctagggacagatataggcctggagctcggcagccttgttttttttttgttttttttttkttttttttttggactctggaatgtaaatagatgtttcaaatagaaacactttaacctttgggttaaaaaaaatccaccccggataaacacggccatgagggcccaggcagcctggtgtttccctccccaccccctctccccatctcttgatcggtctccagacaggatgcaagatcctatggctgaaaaagcaggtgtccagggaagcttctttggatggtgtgagttgcgcaggtctcccaagcccaaggggttggggcaagggtctttcgagggtggtgcctgcctgccacctccagcagcatctttagaaccctattttagggatagcctttgctctctgggctgtcttggttgttgccattgcccagcacctagcacagtgcctggcacatggatgaatgaatgtcgcatggggagggctggagtccagaattgctggcaggattcctgggctctattctggggcctggacctctgggtgaatagagacagctttagtgagtcaccccagcgggtaagacagagccttagcctaccgaaggacaggggcagtctgctgttcttgcttaaagagtggggcggatctcagcatctgctcttagcgatcagaggtcttccttgatggatggggtctctgcctggccaccctaccacagcyccccagtgcacagtgggcaccaccatcatcccagcttagttctggcttggggagcctgggagtttgaactctagtatgggattctcaaggacacagaggtggggaattctctgcctcccttatgtgggccctggattcccctttgtcttgtactgggtggagctgatgcccagacaatacgcaggactttatgagatggcatggaggaggagtctgcttttcccatggagggagggtgtgaatcctgcttgtgccaggaaggaatgctatggacactgggaagtgccatggggtccaggtttggtcttagggctttccctggatattcgtgttcgtgctcttcagtctttctgggtttggctgtgtgtataggtatgtagtgccgggagggtaagaagtgcaagactcaggggtgagagtggaactattataatgcactgagtgacaaggctatcaggtactttccctgcccttttttttttttttttttttgatacggagtctccctcttttgcccaggctggagtacagtggcacgatcttgggtcaccacagcctccacctcctgggttcaagcgattctcctgcctcagcctcccgagtagctgggactacaggcacacgccaccgtgcctggctaatttttgtatttttagtagagatgggttttcactatgttggccaagctggtctcgaactcctgacctcgtgatccgcctgcctcagcctccccacagtgttgggattgcaggcgtgagccaccacgcccggcccttgccatatctgttttaggacagtgttgatagctgtggtgtataattgagaaggctcagagaggttaaggaacttactggacatggtagctcatacctgtaatcccagcactttggaagcctgagggaggaagatcacttcaggccaggagtttgagaycagcctgcgcagcatagccagaccctgtctctacaaaaaaatgtaaaaaaaaaaattaatcaggcacagtagcatgcacstgtagttctagctactcaggaggctgaggcaggaggattgcttgagcccaggagtttgaggctgcaatgagccatgatcactgcattccagcctgggcgctataacaagaccctatctcttaaaaaaagggaacctgcccaaggtcacagagtaagtgagagctggaatttgaactcaggtgtctgggtaggaccattgctaatccacataaaagctacttttggccgggctcggtggctcacacctggaatcccagcactttgggaggttgggagtttgagaccagcctgaccaacatggagaaaccccgtctctactaaaaatacaaaaaattagccgacgtggtgcatgcctgtaatcctagctacttgggaggctgaggcaggagaatcgcttgaacctgggaggcagaggttgcggtgagycgagattgcgccattgcactccagcctgggcaacaagagcaagactttgcctcaaaaaaaaaaaaaagcttcttttgtgcagatttttaaaaggtggccctcttctgggtagatacgtcctcatgccagtgtgcatggcctggcgattggagcttgggctagatgtcagccccaactcacccctttagacgagagcccatgtgcaatatgccacctacacagccttaagtgctgggcctgtcagtgygcgtccacagtttgtgctcctagagcacaggaaccattctagccttgggggcctcctggggttgtgagaggaggctttgttttctgtaaatactgaggaccacttggtctgtgatctttctccctgaggggattttagcccaaggagaggaggggctcaggaataaagttgaacaccagcccccatacaacctcstgtgtccccctccccctgcctcatcccctcttcttgtttttgagaccctcagstgtccyttccctgccacacagctgccagacaggaaatcagattaactgtgtccatgcacacagctgtaacagctgtcaggttggcaggaggcagcctggggacgctgtgaggcagtggttctcaaacttttggtcgcatcagaattaaccaagggagsgtattaaaatgcagattctcaggccttgacaccctgcccccccaacaaaggtttggattctgtagggcagcccaggaaccagtgatttaaactcatgtctcaggtgattctgatgcgagtagactgagcccatccttggagtaagagctgtgtggacatgggtcacagggcccagcagtcagccagtagatgtcatcagcatccctggaaggccttagtkggtcttgggactcctgggagaagggcctatacaggaggagggaggctgtcgccctagaaagaggtgaatccaactcccagccgcctgtcagtcaggagagaggatgtttccagccgccagggagcaggtgtctaaaccccagtggaatgggggattatggcaagcagccaggtgggcagggtgccctgctggacacccagggctgtgctgtgcttagggagtggaggcagatctgctctggagcccctgccattccaccccaggtgtggagcaaacagtcctagcaatagctgcagactttgaatggttagtgtgccttttacttgcctgtagctttgtacccaggtatatgctagaaatggctggactgggaaatgtgagtctayttctccagagagcatcccaggatcgactactaactctatttgcaccagtgagagatgttttatgccttccatcagggctctgcatcccgagcttaaggtccttcagagtcacagtctgcctcaaggtttctgggggttccctgcacttgatcccattctcccctgcacccctgggctcagatgttctggggaccaaccaggtgcccttgtctagacctctggatccttaatacagagtttggccccttgttgcatctctcattcagtttgagaccgggccttaatgtttccccttctgttttttagtggggagaagacagagagccagaagagctgggattaagccctgggtcctccatctcctttccaggtgaccttggacaagtctcttccttctctggcctcactttcctccctctgaaaacagggggaattgagttgctggycttcaggcctttccttccctgacactctaagggtctctgaggtcagtttcacattgygtctgctttgtgggaagaggggcttagggcctcctatgtcctcagcccgggaggatgtggaatagaactggggagagaggtgtcacctgcasykgggctcagtgaggttggagcccagggaagaattttggactgcttgcagctgggggccccgagagcaaggcccaaaacttgtgcttatctgtgctaagtaatgtttttgagggacaaaagggatcccacaattgtggcctgagccragagcacagagtggcccttcctggaggtagcgaggcaggtgagatggcctggaagtgcgggagtgggaaggaagctgctctcagagattcctcctctggcatcgacacccagccgctggctgcacgggtttgtgttgtgtgggacccacaagaagggctttgtttgtgccaggaccgcagagtgacattcagacagtctgaaatgagtgctaagacttccctctggtgggaktctgaggctggcacccttagaatccaggtggtctgtgaagttggccccacttaaaagatttgggaattcttaagtatttcattttatgcactttattttttatttatttttttaatttttttttgagacagagtctcgctctgttgcccaggctggagtgcagtagtgcaatctcagctcactgcaacctccgcctctgggttcaagcgattctcctgcctcagtctcccgagtatgtgagaccatgcctgggtaatttttgtatttttagtagagacggggtttcaccacgttggccaggctggtcttgaaatcctgacctcaagtgatctgcccacctcggggtcccaaagtgctgggattacaggtgtgagccactgcacccagccgattttatgcacttcagaaacatcctgagaaggccaggcatggtggctcacgcgtataattccagcactttgggaggccgaggcaggcggatcacctgaggtcagggcttcgaaaccagcctggccaacatggtgaaaccccatctctactaaaaatacaaaattagccgggcatggtggcgtatgcctgtaatcccagctacttgggaggctgaggcaggagaatcgcttgaacttgggaggcagggattgcagtgagccgagatcgtgccattgcactccagcctgggcaacaagagcgaaactacgtctcaaaaaaaaaaaaaagaaaaaaccattctgagaagtggtccacaggcttcactagattgccaaaagagttcaggacacaaaaaatatgaggagccattaataatagccctgcctcgcacctcttgatcttcccaggccctgtgccaagctcctccgcgtacattctcccgagcctaactaccctgggtgttgggtgctgttctgcctgccagtttacasatgcctgcatggagcgcagggtggtgccctgtgtcttgccctaggaaggggagwgcctgaattgaaccccagcgtcctctcactccagagcccttgctctcaaccactacgtgatgtgtgttcacttgtgttacttaaggaattgtgaaaattgctaggtgagagtcagacccagcttgcctatgtggaaatagtatctgaattgtggtagaacctgttgagcctaaattggcctcactagtcacacaagagcacasaaatagatcatgggaaactgtccttggtggggaggggtcatcggtgtcacagcgtcatgggctcagggtgtgaaatgttgttctccgcctccttccaaactccctcaggccaggacaggaacaagagcttttccccaatctccaagagacagaacaaggtaattagaagctgctgtctccccyacctggtgagggaggtcctgagggcctgggtgctggtgggagattctgccctctagggtaggccagttacctagggctgtctcttaaataaagggaacctgggccgggggcggtagctcaagcctgtaatcccaacactttgggaggcgaggcgggtggatcagctgaggtcgggggatagagaccatcctggctaacacggtgaaaccctgtctctactaagaatacaaatgattagccaggtgtggtggcatgtgcctgtagtcccagctacttgggaggctgaggcaggagaatcgcttgaacccaggaggcggaggttgcagtgacccgagatcaccccaccccaccgcactccagctgggcaacagagagactgtctccaaaaaaaaaaaaaaagagagaacctggccgggcatatggctcatgcctgtaatcccaacactttgggaggccgaggcaggcggatcacgaggtcaagagttggagaccagcctggccaacatggtgaaactccgtctctactaaaaatacaaaaattagctgggtgtggtggcacatgcctgcagtcccagctactcaggaggctgaggcaggagaatcacttgaagccgggaggtggaggttgcagtgagccaagattgcaccactgcactactccagcctagcaacagagcgagactctgtcagaaaaaaagaaaaagggaacctgcccaaggtcatagagtaagtgagagctggaatttgaactcaggtctctgggtaggaacgttgctaatccacataaaagcttcttttgtgcagattttaaaaaggtggcccttcttctgggtagatacgtcctcatgccagtgtgcatggcctggcgattggagcttgggctagatgtcagccccaactcacccctttagacragagcccatgtgcaatatgccacctacacagccttaagtgctgggcctgtcagtgtgcgtccacagtttgtgctcctagagcacaggaaccattctagcctcgggggcctcctggrgttgtgagaggaggctttgttttttgtaaatactgaggaccacttggtcggtgatcttcctccctgaggggattttagcccaaggagagaagggggctcaggaayaaagttgaacaccagcccytgtacatccttccctgcccccctccccmtacctcatctcctytttattgtttttgagaccctcacctgtcccagggctggcttacactgagcacataggacatcccacatgggagccagactgcacacgtgtgtgttcagagggaacctgcctgtgccaggagtcaggacacctgcgttcagatctstgttttgctgctacttagctggtaggatcatctgcagagcagcctctctaagaggcttggtttcctcacctgtgtcttgagggtattgaaacagatgacctccaaggtccctttcactttctcctcttgtgaaggcagctcctcagatccagggagtatctgcacggacctcatttatgttatgtatagacattccaaacagcgtaataatgtcccatgccttgtactctacgccccttgggtcccctcccctcctcctagctttctggggctggtggctcctggagcagggtctttttttttttttttttttttttgagacggagtcttgctctgtcgccaaggctggagtgcagtggtgtgatcttggctcactgcaagctccacctcccgggttcatgccattctcctgcctcagcccctcagcctcccaagtagctgagaatacaggcctgccaccacacccagctaattttttgtgtttttagtagagacggtgtttcaccgtgttagccagggtggtcttgatctcctgacctcgtgatctgcctgtctcagcctcccaaagtgctgggattacaggcatgagccactgtgcccggctggagcagggtctttttaaaaattaattttattttaggccaggcgcagtggctcacgcctgtaatcccagcactttgggaggctgaggcgggcggatcatgaggtcaagagattgagatcatcctgaccaacatggtgaaaccccgtctctacctaaaaatacaaaaaattaggtgggtgtggtggcacatgcctgtagtcccagctattcaggaggctgaggcaggagaatcgcttgaacccagaaggcggaggttgcagtgagccgagatcacgccactgcactccagcctggcgacagagcgagactccgtctccaaaaaaaagaaaaaaaaattacgtatgtatgtatgtatttatttatttattttgagatggagtctctccctgttgttgcccaggctggagtgcaatggcgcgatctcagctcactgcaacctccacctcctgggttcaagtgattctcctgcctcagctgcccgagtagctgggattacaggtgtgggccaccatgcccagctaatttttttttttttttttttgtatctttagtagagacggggtttcaccatgttggccaggctggtctcaaactcctgacctcgtgatctgcccgccttggcctctcaaagtgctgggattacaggcatgaaccactgtgcctggccttatttttatatttattttatggagcagggtcttttagagctagatgctaagcctcttgggtctgccaggcaggtccacactgtgccagctccctccccccagggcttctctagggggaactatagttcccatttccttgctggccrgggttcttgtcacagggattcttgagttggagatgttgtctctgagagggggcttggacctggggtgcagctcatggtgtgttcagagcaggcggaaggcttggccttgctcttgggaagctagatctgttttttattgtgaattcttgttcccaaggcactgctaaaacctgtgcctcatggcccagggccactcgtctatttggaggcagtgtctctttgcctggacaccgtttttttagactaaggctgtgctggcagtagtctcaggggttgccccacgagcacctacatcatctcccccagaggaccaggctctccctcatgctgcctgaagaatctaccacagaagtccccactgggctgatggggttcctgaagaggaggcagacccagcgggatgggaaagaagtgtcactcaggtggtgcactgcccatggccacttgtgctcgtgagctgggcagggcagctcctgagccagagcttgctatttttccagcccctcgcatggctagaaacacacagccccaaggccaggcacggtggctcacgctggtaatcctggcactttgggaggctgaggtgggcagatcacgaggtcaggagatcgagaccaccctggctaacacggtgaaaccccgtctctactaaaaatacaaaaaattagctgggcgtggtggcgggtgcctgtagtcccagctactcaggaggctgaggcaggagaatggcgtgaacctggaaggcggagcttgcagtgagccgagatcgcgccactgcactccagcctgggcaacagagcgagactccgtctcaaaaaaaaaaaaagaaaaaacgaaacacacacagccccaccyactcagcaacccaggctgggacttcccatggaggcagggtggtcagccctgcagaaaaccagaggtcaggatggtgctgctgcttgttactgaggccaccactcccaggagaaggaaggttctcagtgctgggaaagaggaaagtatagagctgggtgcggggggcccaaggctttcccccagagccttgcctctgacctctgcaggaggtggctctactggcctctygattcccatcagagtgaagtcctggcaggtgagggaaggacccaggtccttgtcctcccctgtgaacctttccctggctttcttttcttttcatttttttctttttgagacagagtttcactcttgttgcccaggctggagtgcaatgtcgcgatcttggctcactgcaacctctgcctcccgggttcaagtgattttcctgcctcagcctcccgagtagctgggattacaggcatgcatcaccacacccggctaattttgtaattttagtaaagatggggtttttccatgttggccaggctggtcttgaactcctgacctcaagtgatcctcccgcctcggactcccaaaatgctgggattatagccaccaacgcttggctctccctggcctttcagtggggctctttgctagccagagctcttggcctgtcctcttagggaacagtgccccttcgtctaccctctttttttttttttttttagatagggtctcgctctatcacccaggctagagtgcagtggcatgatctgggctcattgcaacctctgcctcctgggttcaaacaactctccctgcctcagcctcctgagtagctgggattacaagtgcccgctaccgcacccaactaatctttgtattttttagtagagatggggttttgccatgttggccaggctggtcttgaactcctgacctcaggtgatccgcccgcctcagcctcccaaactgctgggattacaggcatgagccactgcgcctggcccagkttcccttttttttaagagacagccctgggtaactggccaccacgccccgggcctgtctatcctcttcttttcccagaggttccccagccttcctagtccaccaggaggcggccaagagcctcttcctatcatgacacaaccacttccccttccaggtgcttggtgctgatggcaactgctgccacctgctctgctcatgccaggctggcagagggcacagatccttgagagagtgcaaggcccgccaggctccagggtctgtgcctgggcagactctattcatggggctccatgcccctcctttccctgactcaggcagagtagccatggccccttccactttgggtggagcaggttgctacctggcaaacccctggggtgctgcatgtcacccagtccctgcaggtcctgcaaattaatattctggagtcgcctgtgcttcctgtttgcatgggaacgaggctgcatggcagagccctctgcctgccctgccacctgcataccaatagggctgtggttcccgctgcagctccgggcctaacatctctgctgctgcagtggcagtgacaggctggtgggagattccccttgcctgagcccatgtgctctctgcagggctcctgcaagggaagccagtactgctggcgacagttccagccctaggcagggttatctgctgggagccaggagtgcttggacctctgcccttccctgggcaggcaggctggaatctggctcctacaacccyggcattgccgggagcagcaggttgacggctgtccattgcttggctgagtgatcagagtgccacgggccaagccaagcttgactaagaacagataaccctccggccagctcagggccttgctgagcacttcacgggctggggagacctgagctggctgccatttccttgccaccatcgtgggctgtggctagttacctccaggaaggccttctgcagtttccaaggaccctttctcctggtgctgggggcaggacatgggttgggaatgaagatgagtatgtgtaaccccaccctctggccacatctggccacttctgcacatgtggctctggccttgtggccacagagtcgtcagtatggctggcgggaaaaccacagaggaatgttcccaaccatgcctgggggagaagaggctggtggggactgctacatcatgctgagcttttaccttctcccaccccaccctgcctgcagggggttccagaggccatactccaggcatgygggtggcatggccttggcctcggcctccagcaggccttgctcctgccttggtgacacccattcagtgctaggttctctggagagatccagacccatctaaacaggtgtgggggcctctcttagcccaccctttgccacctcctacctcccacctccctctcttctctttaaaaattgttyggctgggtgtggtcactcatgcctgtaatcccagcactttgggaggccgaggcgggtggatcacctgaggtcaggagttcgagaccagcctgacctacatggtgaaaccccgtttctactaaaaatacaaaaattagctaggcctggtggtgggcgcctgtaatcccagctgcttgggaggctgaggcaggagaattgcttgaacccaggaggcggaggttgcagtgagactccatctaaaaaaaaggccaggggcagtggctcatgcctgtaatcccagccctttgggaggccgaggcgagcggatcacctgaggtcaagagtttgagaccagcctggccaacatggtgaaaccttgtgtctactaaaaatacaaaaaaattagctgagcgtggtggcgggtgcctgtaatcccagctacttgcggggctgaggcaggaaaactgcttgaacccaggaggcagaggttgcagtgagccgagattgtgccactgcactccagcctggatgacaagagcaaaactccatctccaaaaaaaaaaaaaacaaaaaaaaaccaaaacttgttttttgttttttttttccctctctcgcctcttaatgctggsgggtggtctggagagaggccagctcatgarggcagaagatactggtagccagaaggatttcggggtccttttttctcaggcctgggctggagtgggccactttgccacaggagtcttcccagcccctcgtgacctccctgggctgtagcgaggagagtgagggctttctttggagaaagaagtagaagagaaacaggaatgggttggcctgcctctctcacttccgccttcccaggcagtggtatcctgccttccccttcctggctggagactttgtggggcttgggctgggcttggggctccctgctggtgtggtgtttgcccagttgtcctggcaaccacagggcagtggtgaggagtgacatgcagtgacctgagaactgtgtgtaggtacaaagaagtggagacctakccctcccataagcccattggaacttcgtgcactccctgagccactcggcccattgtccatgtggggactggacccaaggtcttggaacccagcaggccctccactgcyttcccctccscagcagcyttyctctccmcagccggttctccgtaagaccagagttstgagatctctgycgaagctcctgccctccccctgctgttacccttcttcctgtstgattccctttcctttcstgtctcctcctcccacctcctccctgctgcstgcccgcccatcctmttattccccctccccccaggcacagctgctgtttggctcactctatatatagcggcattttcagggtaattacaataaaactgttgaaaggagataatccagcaaaggaagcgagtcttgactcccagccccctcctgtccctggcttggtgcagccctgcaccccctttccccgaggcctcctgttcccaccccacccccattcccacagcctctccctcctgcccagtctgccccagatagggatgaggccccagaaggggacagagggtagagatatccagaaggtctccaccagcctctcctggggttaccaagggcactgtcagtcctagaaccaacctctgtgcctcagtttctcttctagtatgaggctttgcatggggcacggtgttgagaaatgggagcgggcacagtggttaaaagcttaggatttggactcatattctagttattggatcacctagctgtgtctggttgctacttaaacttctctaaacctcagtttcctcatcagtaaaatggggtaataatagcatctaagtcatagggtaactgtgatatttaaatgagtcattgtaaaatgcccagagatgttgactatcaatgataatattatgtgttgaaggctgggcagtggctcacgcctataatcccagcactttgggaggctgaggtgggaggatcgcttgagcctaggagtttaattcagcctgggcaacatagtgagaccctgtctctactaaaaaattaaaaattagcctggtgcattggcatgctcctgtaatccctgctacttgggaagctgaggtgggagggttgcttgaggtcgaggctgtcatgagccacgatcatgccattgcattccagcctgggcgacagagcaagaccttgtctctgatatatatataggtagagagataaatacacacacatatgtatgtgtgtgtgtatatatatatatacacacacatacgtacacacatatatayacacacacacacacagatacataaaatgcgtcgagtagtcacaatctgtcaggtacagcttcatgcttatgcacattttctttatttttttgagatggaggctcgctctgtcgcccaggctggagtgcagtggtgcgatcttggctcactgcaacctccacctccagggttcaagcgattctcctgcctcagcctcctgagtagctgggactacaggcgtgtgccaccacgcccagctaattttttttgtttttagtagagacaggatttcaccatgttagtcaggatggtcttgatctcctgacctcgtgatctacccgcctcagcctcccaaagtgctgggattacaggcaagagccaccgcgcccggcctccccctttttgttttttgttttttttttttctggagacagtcttgctctgtcacccaggctagagtgcagttgcatgatcttggctcactgcaacctccgcctcccggggttcaagagattcccatgcctcagccatctgagtggctgggattacaggtgtgcaccatcacgcccaaataatttttgtatttttagtagtgagggggtttcatcatgttgaccaggctggtctcaaactcctggcctcaggtgatctgcctgcctcagcctcccaaactaacctgagattacaggtgtgagccaccgtgctcagcctgtattttcctattgaagttcatggcttcagcctcatttaattaaggtaaaatgttgcatccatggagcagagggatttgacttcctctctgtctctgttctctttgggtctcctagaatcctgcgtggtagcctttgggcctcaggcatgactggagtctggggctgggcccactaactccttcctgtctcttctgcccrcagtggaggtgaagccggtgctgccaagagccatgcccagttccatggggggtgggggtggaggcagccccagccctgtggagctacggggggctctggtgggctctgtggaccccacactgcgggagcagcaactgcagcaggagctcctggcgctcaagcagcagcagcagctgcagaagcagctcctgttcgctgagttccagaaacagcatgaccacctgacaaggcagcatgaggtccagctgcagaagcacctcaaggtgagcgaggggggtgcggggggccgcccagacctccgatccccgcccgggcctggctcacttgtgcctccrttcccatgcccctgcagcagcagcaggagatgctggcagccaagcagcagcaggagatgctggcagccaagcrgcagcaggagctggagcagcagcggcagcgggagcagcagcggcaggaagagctggagaagcagcggctggagcagcagctgctcatcctgcggaacaaggagaagagcaaagagagtaaggcagggcctcctgggacctcgtagggccccrcccgtgatgcctgcccctgccatggggggtctggccccaagcagccaggtcagttgtgccctgtcctgcaggtgccattgccagcactgaggtaaagctgaggctccaggaattcctcttgtcgaagtcaaaggagcccacaccaggcggcctcaaccattccctcccacagcaccccaaatgctggtaatggccctgggcaggcatgggtgggcataggtgagccgctcaggggctgcctggctataggatggcaaggggcttcttccccgtgcccatatacgggccctgcaatctctccttagagacaggacccccatccctggtttatttcctcattccttccccaagatccaygtcctcttcctatatacaaacgatttttcataaatgtagattgccaggtggcaggtccagcagactgggtgataacctagatctgcttccatccccacccccccccaccccaggggagcccaccatgcttctttggaccagagttcccctccccagagcggcccccctgggacgcctccctcctacaaactgcctttgcctgggccctacgacagtcgagacgacttccccctccgcaaaacaggtgagtgagtcccccacctggcctcccagaatatggctcctgggaggcagaggtgggcttgtggcagtgtcagccctgaccccagtgggctcagctgcagatgtgtgctgctgtgcgcgtatctgaacctcggttaccttctctccagcctctgaacccaacttgaaagtgcgttcaaggctaaaacagaaggtggctgagcggagaagcagtcccctcctgcgtcgcaaggatgggactgttattagcacctttaagaagagagctgttgagatcacaggtgccgggcctgggggtaagggctgctctcatgtacctgttctgagggtctgggaatcaggggtcgggggtagttcacagcaggcccaggtgacagccacttctcctatagcgtcgtccgtgtgtaacagcgcacccggctccggccccagctctcccaacagctcccacagcaccatcgctgagaatggctttactggctcagtccccaacatccccactgaggtacaggcctggctgggggctggtggggcggggacagagttgctccttcccatggaagaaagagtgcagctccttccagtctgtctgcctgagtgcccagcagagacctctctgcccacatgaataggctggaggatccttgcttggacttaattgcattgaaggggaatttgtcccacaggactatgaagagccctgatggctcagtctccctcagtgggagctcagggtagagggaactgggcaccattcagagaccttggccttggccccaggttgccctcccttgttgcctcccctttgtgcactctcatgcctgtctcttctgactgctccccagatgctccctcagcaccgagccctccctctggacagctcccccaaccagttcagcctctacacgtctccttctctgcccaacatctccctagggctgcaggccacggtcactgtcaccaactcacacctcactgtaagtacagggcatataccccatcttccctctggtgttgaggtcacaggtcctgcatgcccccagctggggttttccccttccaaggccctaagggagatctgttggccctacccagagcttggggggtagatagtgggtagatggggatgctagtccaaagttggcaggactgaggctgtataagcccctcccttcaccccccaggsctccccgaagctgtcgacacagcaggaggccgagaggcaggccctccagtccctgcggcagggtggcacgctgaccggcaagttcatgagcacatcctctattcctggctgcctgctgggcgtggcactggagggcgacgggagcccccacgggcatgcctccctgctgcagcatgtgctgttgctggagcaggcccggcagcagagcaccctcattgctggtgagtggacaggtagctgtgcaagggagggggctaaggtcaggaccaactgtcagggatactctccaaccctgtcacagttccccttagcagaatcaacagcatcagtgatttcttccacattctggaaacatgggatacctacaggatgccaggcactgttcttgacaaaatctgctgccatcttggcgttcacatcccagagcagtgttgttcagtagaaacataacacaatctacatrcgtaatttctagcatccacattaaaaaatgtaaaaagaaggccgggcgcggtggatcacgcctgaaatcccagcactttgggaggctgaggcgggtggatcacgaggtcaggagattgagaccattctggctaacatggtgaaaccccgtctctactaaaaatacaaaaaattagccgggcgtggtggtgggcacctgtagtcccagctactcaggaggctgaggcaggagaacagtgtgaacctgggaggcggagcttgcagtgagccgagatcgtgccactgcactccagcctggggcacagagcgtgagactccgtctcaaaaaaataaaaaaattaaaagaagcaagtggagccacacatggtggctcaagcctgtgagcccggcactttggaggccaaggcaggtggatcacttgaggtcaggagcttgagaccagcctggccaacatggtgaaatcccatctctactaaaaatacaaaaattagctgggcgtggtggcgggcacctgtaatcccagctactcgggaggctgaggcaggaaaattgcttgaacccaggaggcggaggttgcagtgagccgagatcgctccattgcacccaagcctgggcaacagagcgacactctgtctcaaaaaaaagagaagcaagtggaattaatttcaccacatatatttaactcattatatccagaatattacaatttcggtaatacatatgcagttattctttctattttttaatttttgtagagacaggatcttgctatgttacccaggctggtctttttttcgagactgagtctcgctctgttgcccaagctagagtgcagtggcgtgatcttggctcactgcaacctctgcctcccgggttcaagcaattctcctgcctcagcctcccaagtagttgggattataggcgcctgccaccgcgcctggctaatttttgtatttttaatagagctggggtttcaccatcttggccaggctggtctygaactcctgacctcaggtgatccgttcgcctcggcctcccaaagtgctgggattacaggtgtgagccgccatgctcatccttttttttttttttttttttttgagacagaatctcactttgttgcccaggctggagtgcagtaagcaggatctctgctcactgcaccctccacctcctgggttcaagcttcaagcggttcttttgcttcagcctcctgagtagttaagactacaggcgtgtgccaccacacccagctaatttttttttttttttttttttttttttttgagacgaagtttcactcttgttgcccaggctggagtgcagtggcaagatctcggctcactgcaacctctgcctctcgagttcaagtgattctcctgcctaagcctcccaagtagctgggattacaggcatgtgccaccatgcctggcttaattttttgtatttttattagagaagaagtttcaccacgttggccaggctggtcttgaactcctgacctcagatggtccacccgccttggcctcccaaagtgttggaattacaggcgtgagccactgcgcctggcctaatttttgtatttttagtagagacggggtttcaccatgttggccaagttggtcttgaactcctgacctcaagtgatccacctgccttggcctcccaaagcgctgggattacgggtgtgagccaccgcacccagctgcccaggttggtcttgaactcctgggctcaagccatccccctgccttggactcccaaagtgctgggattacaggtgtgagccactgtgcctggccaatatgcagttaccaatgagatattttggtttttgtttcatactctttgaaatctagtgtatacttcacacttatatcacatttcagtttagacaggttgtgtgcaagggctcagcagtcacatgtaactagtagctatgggactagacagcacaactttagacagcccttaagtaccagggctgtctaaagagccctggcaccagaagaggttctgcttgaaagatacatgatcctggccctagggcttcctagcctggcgggatccacggggaggatccatgatcagggaggccttgttgcacttagggagaaaagtcattgttcgttcagagggctcaagactaaatgtatactcagtttattcagttaaggaaatcgaagggaaaagatggtgaatccaggaaggcttgctggaggtggtaccttagagctgtgaaactcttcattcatggggaagaggaagaatggagctcaggtttgggtggggggtgcttcaggtcccccagggtttttcctgagtatataggtggtgatatgccagagggggttgtgggggcaagatgcagggtyggtgggagggcagtcaggtgccctgacaatggtgcttagtcatcacccccaactcygtagtgccactccacgggcagtccccactagtgacgggtgaacgtgtggccaccagcatgcggacggtaggcaagctcccgcggcatcggcccctgagccgcactcagtcctcaccgctgccgcagagtccccaggccctgcagcagctggtcatgcaacaacagcaccagcagttcctggagaagcagaagcagcagcagctacagctgggcaaggtgagcctggaaaggtgaatggcctggggctgtggtgggggcagsacacaggagagtaccaggctggcagaaaagtcctcctttcaggccagacacggtggctcgcgcctgattgggaggccgaggtgggcagatcgcctgaggtcaggagttcgagaccagcctggccaacatggtgaaacccccgtctctactaaaaatacaaaaattagccaggcgtggtggtaggcacctataataatcccagctactcgggaggctgaggcaggagaattgcttgaacctgggagatggaggttgcactgagcccagatcgcaccattgcactgcagcctgggtgagaagagcgagaccgtctcaaaaaaacaaacaaaaattagctgggcgtggtggcgtgcgcctgtaaccccagtcactggggaggctgaggcaggagaatcgcttgaatttggaaggcggaggttgcagtgagccgagatcgtgccactgcatgccaggctgggcgacagagggagactctgtctcaaaaaaaaaaaaagtcctctcagaggagctacctcacctttttctaattcacatagaagctctacctggaagaagggagggagggaaggatagactgttctgggttwtaggctgcacagctgctccccaactcccagctgatgtgcccccatattctgttatcagatcctcaccaagacaggggagctgcccaggcagcccaccacccaccctgaggagacagaggaggagctgacggagcagcaggaggtcttgctggvggagggagccctgaccatgccccgggagggctccacagagagtgagagcacacaggaagacctggaggaggaggacgaggaagasgatggggaggaggaggaggattgcatccaggttaaggaygaggagggcgagagtggtgctgaggaggggcccgacttggaggagcctggtgctggatacaaaaaagtgagccccgtccctggtcccagtccttggtcaccacccctctgtccttctccacccctgcctctgcccttgtctttccctctcccccatctgcagtttccaggctgtgcaggagcagctttctgtagagagcaaaaggggagtgggaaggaggccggtggggagaaggrggagctgtttgtgttgatctcagagytgtgtctgycctaggctgccagttccctccctgtgtctgtgatactggcctgcctctctgcttgtgtgtctgtgtatgcatgcgtcggtccctgtgcgtgcctgtgcgtgtgtgtacacacacgcccccgctgttactactgtctgcctcgcgcctagctggcactccattcattgcggacacagccgagccctccgggcctgactcatcccgcccccaccccgcccccgcccccacccctcccagcctcttacctcaatgctactctttgatgtgactcatcacatctcccccatccctccccatctcagaggagatgtgtctcctgtccctggagggagcaagtgggaggaggtgggggaaggagacttggaagaaaagggctggattggggccccactggaggccctgacagggcctgccctcacccctgtcctggctgagtctgacccaggccccctcccattctcccctccagctgttctcagatgcccagccgctgcagcctttgcaggtgtaccaggcgcccctcagcctggccactgtgccccaccaggccctgggccgtacccagtcctcccctgctgcccctgggggcatgaagagccccccagaccagcccgtcaagcacctcttcaccacaggtgagcccccaccaactgttaggtccttctgccaggcaccagagggcctgtgtgtggtgtctgccccatggcagggggaagaggctgctggggccccttasgcaccctgaaaggaggggacacaggccttcgttctctccctgtaccccagagctgttcatggtagcggcagggccttctgcctcagccgggagagtgggtagcgtctttctcaccccgctgaaggaargactgccccacagcctgaagtgctgggtagagagagcctgctgtccctgttgggccctgaccttctaccttcccttcyttctccctgtgaggtctgggatgagaccagagtcctcttccctatgaagctgccacaggctgggctctggggggacacagacgtgcctgagggtggccctgtatcacccgtggagagtaagacacgggtttggcaggagggggaaagcaggaggtgccgtgagaagggtgcagctgaggaggcacagctggcagagatgagactcatgcgagtgtccagggcagccttgctggggcttgaggagcagggaagcttctgataggcaataatggagcaaaggaatttcaggaggagtcaagagggggcaaaggctgsagaggaaaggccaggtgcagtggctcacacctgtaatcccagcattttgggaggccaaggtgggaggatcacttgagcccaggagtttgagaccaacgtgagcaacatagtgagaccccgtctctttaaaataaaaaataaaaaaataggttgggtgcagtggctcacgcctgtaatcccagcactttaggaggctgaggtgggtggattacctgaggtcaggagttcgagaccagcctggccaacatggtaaaaccccgtctctactaaaaatacaaaaattagccaggcgtggtggcacatgcctgtaatcccagctactcgggaggctgaggcaggagaattgcttgagcccaggaggcagaggttgcagtgagccgagatcgtgccactggacctggccgacagagcgagactctgtctcaaaaaaaaacaaaagaaaagctaggtgtggtagtgcctatagtcccagctactcagaacgctgaggtgggaggatcgcttgagcccagggtggtgggggcagtggttgaggctgcagtgagccatgatagcaccactacacactccactccagcctgggtgacagagtgagaccctgtttcaaagaaaaaaaaaaaaaagctggagaggagagggggcaggtttgtggcagggtggctgcagtggccatggggaggtgtttggacctgggggttggagacagctccatgagccctgctgaggatcatggtagccaggctgggatcctgggcccagagcagtgctggctgacacataggtctgtggcccaggtgtggtctacgacacgttcatgctaaagcaccagtgcatgtgcgggaacacacacgtgcaccctgagcatgctggccggatccagagcatctggtcccggctgcaggagacaggcctgcttagcaagtgcgaggtaagggagcccctccttcttctggctctcaacttaaatccagcctttgtttccctgttagataagcctctcttcatgcttcttcctcatcctctcttcagccccagacttcggggccagttctcccaccaccccgttccatcccttgcagcctgttttcccccatggtccccagctgagtgggggggatcygggagtaaggtcatgacagagccaggatctactttctgaaaatatttggatctcctgaggccaggaagtggctctgtgtgccctggctatggggcagagaggctctgagagagctgtgcctttgtgtgacccctcttactgatcctcctggcagcggatccgaggtcgcaaagccacgctagatgagatccagacagtgcactctgaataccacaccctgctctatgggaccagtcccctcaaccggcagaagctagacagcaagaagttgctcggtgagctggcacatgggtgggcgggcaggcatgttcagtgtcagggtgggatgggggctctcaggaagactgcctgaccaggctaggagggttgtccccacgggcatagggcattgctgcggcagaggtggcacaattatcacgtcacacacctccagagggcgccactaaaatagagcatgctgtggggcgcggtgcaggaggatggaagtgctcggttggggggactgctttgttcccctcctccacggcttatcatgctcctctctccctgccacctgcccccagaggtaagacgtccccaaggacagaggactgacagcttccaactggtgtgggctgcagaggcctgtcttgtacttgggtctgagccctcatttttggtggctaagcctgtagccctgtggcagttgaggtgccttttttttttttgagacagtcttgctctgttggccaggctggagtacagtggtgcgatctcagctcactgcgacytctgtctccccaggctcaagcaactctcttgcctgagcctattgagtagctgggtttacaggtgtgtgccaccacgcccagctaagttttgtatttttagtagagatggggtttcatcatgttgtccaggctggtctcgaactcctgacctcaggtgatccgcccgaggccacttctagagtagctctattcctcttccatgcaggccccatcagccagaagatgtatgctgtgctgccttgtgggggcatcggggtgagtagggcgtacagcagtgggggtgggcgggcggctctcctaggtctgtctcttccctgcctaccacagccgctggcccactgtccaggtgccctccsctgttcttgccctgcagggggcacactgaaacctgctctcctgccctgcaggtggacagtgacaccgtgtggaatgagatgcactcctccagtgctgtgcgcatggcagtgggctgcctgctggagctggccttcaaggtggctgcaggagagctcaaggtgagcgtgtgcttgtgacctcggtgccccttggcatggccctgctcctcagaggcagaggacaggggcagccttgggatcctttcagtgaggcactgtcctttgcaagctcaactctcaggcaccagggtgggaaggagttgccagctgggaattcaggttatgagggaccaacaaaaagacactaatgcccagtgctctcgtgggtgtctcgaggcagaaatagtgtctgcctgctcaagcctcatggttggcattcaaaatggtccgttgaggctgggcacagtggctcatacctgtaatctcaacactttgggaggccgaggtgggcagatagcttgagcccaggagttcgagaccagcctgggcaacatagtaaaacgctgtctctacaaaaaattaaccaggtgtggtggcgtgtgcttgtagtcctagctattcaggagactgaggtggaaggattgtctgagcctgggaggccaaggttgtagtgagccatgatcgcgccactgcactccagcctgggtgacaaagcaagactctgtctccaaaaaaacccataaaaaaacaaagaaaccccaacaaaattgtgcattaaacatatggatctgcttttctggtttgtgttcacttccctgcctggcttgtgcttctgtcctgtgctaccccctccacggccttcctgcctggatcttgcccctcacctctgcctgcacctcttcagaatggatttgccatcatccggcccccaggacaccacgccgaggaatccacagccatgtgagtgccctagattctctgccctcgccccttcctgtctcttgcaaacgtcatgctgaggctgacctcctgcccttttctcccctcctcaggggattctgcttcttcaactctgtagccatcaccgcaaaactcctacagcagaagttgaacgtgggcaaggtcctcatcgtggactgggtaggcagtgagctggtggggctgggcaggggcgggtagagctaggaccagggtcagccttcaggaagtctcctcccccagccccaccttcaagcaccccagtcgtcctcatcctcgggtgctgggtgtgggtgcagaaggaagggcgctggggctcctgccggatgactaacgtcacattccaacagggctccctcctcaactatgaaagacatttagctcctgttccatcttggccctcacgttgcagtttcaagcaacgaaggggatttcctaccttgaacggtagtgacgctgccgccattgctagtagccgatatttcctcccaccccctacaattaggagcagactgtataccaggaacacaatgagtactttatggccacctcgagtagtaagaacgaggatgtccatttctgtgaacaaaggtgttgttgcgtgacttacccaaggccactcagctggggatgtcggcactgggtttcagaccaaggcttttggccccagcactctgctcttgctaccatgggtgcttcccaaaccctgctcctaatggtggaggcagaggcacacaccactctctgtgagctggggaagtagccaggaccaagcctcaggaaggacaaaatctcttggaagcccaattctggcttaaaaattcatgtaaatgttggatcctccttcagaatcttacgtgcttgtggttgggcacaatggctcaaagcctgtaatcccagcattttgggaggccaaggtgggtgaatcacttggggtcaggagttcgagaccaggatggccaacatggtgaaaccctgtctccactgaaaattcaaaaaaattagytaggtgtggtggcgggagcctgtaatcccacctattggggaggctgaggcaggagaattccttgaacctgggaagtggaggttgcagtgagtcaagatcatgccactgcactccagcctcgatgacagagtgagattctgtctcaaaaaaaaaaaaaaaagaaagaaaagaaaaaggaaaacaaaaaaggccgggtacagtgactcatgcctgtaatcccagcactttgagaggccgaggtgggtggatcacctgaggtcaggagtttgagaccagcctggccaacatggtgaaaccccatctctactaaaaatacaaaaaaaattggccgggcatagtggtgggcgcctgtaatcccagctactcgggaggctgaggcaggagaatcgcttgaacccgggaggtggaggttgcagtgagcccagatcgtgccactgcactctagcctgggcaacaagagtgaaacttggtctcaaaaaaaaaaaagaaagaatcycatctgcctgttttaaattccctactagccttaatgttttccccaaaactgtgaggtggaatgggttctgtagggagatatgccacatttatcccatggttttgaatatcacctacacagtgccaccccacagaggctcagacctagttagagaagtgtggggtgtgcaataccattgtgaacagaatatggatgccctgtggccaagggtggagtcctgggctcaagcgatcctcccagccctcagcctcccaaaatgctaggattacaggcatgagctacagtgctcagctgacaggtggmatttgaccattgggtcagagcgcgggccattttcccgatgcttctacctcccctcayaggacattcaccatggcaatggcacccagcaggcgttctayaatgacccctctgtgctctacatctctctgcatcgctatgacaacgggaacttctttccaggctctggggctcctgaagaggtacagctcctgggcgtaaatgcagaccctcctggcccctctgggagrtggcacaatgggacctggcggggagccacggaggcccatggtggtgttggtacctggggagtctgggctcctagtgggaggaccacactgatctgactgcccctccaggcagagcagaggtcagtggagtgagatctggaggcaggggtgagggcaggggcaatgtttgggactcccaggtggtgagaatagccctctccccaactctggtgccaggttggtggaggaccaggcgtggggtacaatgtgaacgtggcatggacaggaggtgtggacccccccattggagacgtggagtaccttacagccttcaggtagggactgaaaagggccatggtagtcartgggagcccctctgggccctgcagtgggaggggcrgaaggcactcagttcagtgtgggtagagggggttgtctctgggaggataacagtggggcgaggcctggcctggtcatctgccgggctcagcttgagccatccctttgcaggacagtggtgatgcccattgcccacgagttctcacctgatgtggtcctagtctccgccgggtttgatgctgttgaaggacatctgtctcctctgggtggctactctgtcaccgccagatgtaagcctgctgggggattgagggaggaagtgaaacagtgaggatatcgagtccagtgaggcatggggcagggaacagactgatattgcagcagacggggaaagcagggggcagggcctagacttggaatcatcttggtaactcccccaacttgtcctctgccaaccccggccttgaggggataggaggtggcagtggggtagcagaggatagaggatgtatcctgccggagctgtagagatgggcttgttggtccctggtgtttcagtgatgctccttgtcattggattggagtcttcagccagtctgttaatgttttgactgtgatagggcatttagttcactgatgctgtattttattatggatatatttgggtttatatctcccatcacattttgtgctatttgtcccacctcttgtgtttctttttctctccttttctttctttttttttttttttttttttgaggtggagtctcactctgtcacccaggctggagtgcaatggcgtgatctcggctcactgcaacctccgcctcctgggttcatgccatcctcctgcctcagcctcccaagtagctgggattacaggcgcgtgccaccatggccggctaattattgtatttttagtagagacggggtttcaccatgttggtcaggctggtctcgaactcctgaccttgtgatctgcccgccttggcctcccaaagtgctgggattacaggcgtgagccaccgcgcctggccttttttctctcctcttactggctcttgaattgattgattacctttcgccatttcttcttcctcccttcacccatcctcaaaggttttggccacttgaccaggcagctgatgaccctggcagggggccgggtggtgctggccctggagggaggccatgacttgaccgccatctgtgatgcctctgaggcttgtgtctcggctctgctcagtgtagaggtaaggggtgggaaggagctgggaggtggcaggccagaggkctgaggggccagcaaggggtcagccagcactgggagccccttaggaagcttttccttggtcctaaggaacagctaatggccaggctttctgagtatgcgtttgtccaaaaaggccatgtttgcccctgttgtgagggatatctggggctgagtggggcagtyagaggggtatgcatggcaaccctactccccaccctaagccttctcttctttcccctgccagctgcagcccttggatgaggcagtcttgcagcaaaagcccaacatcaacgcagtggccacgctagagaaagtcatcgagatccagagtgcgtgaggacacgtagaggggctcaggctgccaagggggcacggagcttgtgggagcaccaggactgggactgttcatgtgggtgtsctctgccctcccygaccccttgcctgtctctcgtccacaggcaaacactggagctgtgtgcagaagttcgccgctggtctgggccggtccctgcgagaggcccaagcaggtgagaccgaggaggccgagactgtgagcgccatggccttgctgtcggtgggggccgagcaggcccaggctgcggcagcccgggaacacagccccaggtaagcagcaacccgcaccacctctctgcyctcacccctgctggtgcgccccactcaataccctcccctgtgcttgccccacaggccggcagaggagcccatggagcaggagcctgccctgtgacrccccggcccccatccctctgggcttcaccattgtgattttgtttattttttctattaaaaacaaaaagtcacacattcaacaaggtgtgccgtgtgggtctctcagccttgcccctcctgctcctctacgctgcctcaggcccccagccctgtggcttccacctcagctctagaagcctgctccctctgcagggggtggtggtgtcttcccagccctgtcccatgtgtccctccmcccattttcctgcattctgtctgtccttttcctccttggagcctgggccagctcaaggtgggcacgggggcccagacagtactctccagttctggggccccccgagtgaggagggaacgggaagtcggtgccttggtttcagctgatttggggggaaatgccttaatttcactctcctcccttctccagcctcaggggaggatctggaggatccactactgtctttaagatgcagagtggaggggaggtgggcacccaccctgcgattctccaccctttccccttctttcgtcctcaccatctctgcagacccctctcctcctccttcctcttggtctcagcactgatgggaggctggtgcccaagctgwggcctgcagtctgtgaggagggctgtcttgcctcacactcctcacagcctacttccccttccccggggctgagagggtgaaagtgtgtggggaaggagaggactggtttcctgggttctcaggggccaggaggagtaacagaaccaggtctgctccccaccttactcggatggcctccctgcccctctgctggcacagcctgggcaaggggagaaggtggtccctgcagaggggctccaggctggtgagagcccccctgctgtcaggaccagattttcccagccatccagcatgctgcggggagaaggggcagaggctcacctccctcctggggccttttgttttggatcctggggatggtgagaatggaggttctagaaggggtaaggccagaacccagggatccaggagtcggctctcagctggagcttccataccttctgggctccctttgctgaccaccagcccaagggagctaagaccaggagggggctgggcgctgtcccttctctttcccaggagccctgccaggggctgtgggcctacaaggcttccaggggatgccatccagcctgtaggaaaccaaagatgggaagtggctcctakggggctgactcttccttcctcctcctccccagtaccacatatactttctctccttctatcyccagggccccaccaatctgtttacatatttattatcctatgggggcctgagcaggattgagggagccaggggaggggcaggagtcccagcaccatcggttcatagtgtgcttgtgtgtttgttttagatcctcctgggrgatggggatggggccaggctcagtgtactaggcctctctgtgctgagccccaggctcccggccccttacccactctctccctgtggctggtctggttctcatgtaaacccactccttgctttgtctccctggatatggatttcagttaagtattttgtaacccgttacactgtgtgtccttgtgtaaataaacttgtttctggcagtgccttctggggccaatgtctctattctctgggctcccaaatggagtagaggttctcatcctccttcctagccaaacacactactcttttctccagcccctggactagaagccgatttaggaaactggaggttggggcgcaagatctgtcctgtaagtgaaaagacagggttataccgaatatagtcacagcatctcatgggacctctcatgtggcctaggcagtgatgaggcaggggacccagggctgagaggtctcacctgagtttacagccctctcctttcctgcctctctgcccctggaaacagggctggagatggcacagagactactggagcagcctggcaaaggttccacttgtgcacacacaggcaaggcccatggagatgtgcgcataggcaagaaaggaatctcaaagtattcaagggctttattggggccgccctggctgcccctcacagtgttgcaagaacccgctggtcttgctgttgcctttgctctttgggggcttgagaggaaaggcagagggaggaccaacttatctgggagagagaaggcccatctttggggctaagaccaggtggtgcggaagcagatttagggaggggagggcctacttaggggctggaaggggatggggctgcctcctggagtgtggtggtcacagagtgttggctttgtgggagggaaaggaaagggaggcacacaagaagtcaggaagagtggatgggcggtgcttcctgggcactgaacatgtgcactgcccagggcacgagggccaggactaggcatggccagagggtgtacttgaggaaattgaaaatgtagaagaggctgatctgaggggggtggcccagccagtccagggggcccagcagccccatggccagcacaaggcaggctatcttctggccatttcccagctgtgcccgacgcacctgggcatagcagggagagtgcaaggcaatgcccaggcccagggcagcccctgagtcacggctcagggaggcaaagggccggctatccacgtgtatccactcaggccgctcacaccacttgaaggctaggctgatggacctgtggggaagaagagttcttgccaggagaggctggaacatagaaggccactggctcttggccatctgcccttggggcccactcccatgttctgttttgtgcctgtgagggtctatgtgaataggtaatgtgtccttttttagctataatgaaccagagacacaccaggctaggtgcaggcgagataggacagggcccagcctgcccaggcttcaaagcgagacttaccaagaaagatccaggcccagtgtaaagagggtccaatagatgaggctggtgcctagcatgagggccagtgcagtcaacccatagaagcttagctcccgctccataggcactcggggagtcatcagccagcccaggacagcgcctaggagagtggagtgacaacagcttcaaggagtctggggatatgaccctccccaccccgacccccagctgcagtgcagcttggcaagagaataaactgagacataacggggggcctctggggtgggctctacagaagctgggagcgatgggaagatcctagactgatcctcccactgccaaaggcatcctctcagtccaccccgttgccccagttgctcaccagttattaggccagccagcacctggtgagggaaatgtgctaagatgaagattcgcgacaagccaaccgccaaaaggaaggtgcaataagccaggctaggcatcacccttacccagcggctagaaagaagagaggcaaggagctcagagcgtgtccatacacagcttggcctcctgcagcacccaggtactccatggttgaaccacacaacctagggtccccaaaactccagctcccaggctgccatgctgctgtgtctattaggtacagggtgccatcacccctgctcccaatggtgggcaatgccaagggtatacctgcgggcccgagtggccacctgcgaagacagggccgtcattatgggccagagggctgctcctgtgatcatgcagtgtccagaagggctgcctgccagcaaatccagaagctcgtggtgagaagatggaggcagaaccccggggcccctggtgatgcctcaataatacagctgcctttcctggctgagaagagcttttccccagcactgattcataactcgctctgctctgaggcctttttactgccacttgaggtcactgtgctcaggtttctgtcctgatctgtgtctcttggctgtcctctatacaaggtgggcagctggtacatagcatgagtgccctcctcccataactcagcttggtctccctggggttcttttgttctctgcgccagtaattgagaggctggtcctttggttgggccacccaggctgaaaagtactctgaaatgttcacccgaaccctaaccacattgggaaagggagaatgtttgaggcttcccacctggaccagtctcacaagaagaggggaactggtgaacctgggctggagcctggctgtagtaaccagactcatggacccaccaaaagggcctgtctccaaaaagaaacctggaagagaacagatgcaagatgactttccacatgcacacacagccagggggggtacaaggcgggcaggacacagagtactctggagggcctgaggggtgaagtcaaaaagggactacgattctgtccactgctctcaaggtatccatggataccttgccatggttttctaccttagaacaggagaaagaaagcacactatttcttttcttttttttttcctaaccctcagcctgtggaaacactatttttaaaaactagtctggggccaggtacagtggctcatgactgtaatcccagtactttgggaggccttagctggaggatcacttgaagccaggagttcatgaccagcctgggcaacatagcaagacccagattcaacaaaaacaaaaaattagctggaagtggtggtgcacacctatagtctcagctacttgggaggctgggcgggcagatcacttgagcccaggagttcgagaatagcctgggcaacatgacaaaaccccatctctacaaaaaatacaaaaattagccaggcatcttggggtgtgcctgtagtccctgctactccagaggctgaagtgggaaggatcacttgagcccaggaggttgaggctgcagtgagctgtgattgtgccattgtactccagcctggtgatggagtgagatcctgtctcaaaaaaagaaaaagtgaataaaataaaaaataaaactgatacagaggcaagagattgtggtaagccgtgtgtgtgctctgagatactcagccgtcccactctaccccctctcactgcaaggccagctcttatcatccacagagagtccaggacccagctctctcctccaggccctcactaaccctcctgctacccctgcctccatgtccccagttacagcctgaattatccacacctaaattatttaggtgagcctctcaggtctgaaaatgggggtgggaaatggacagagaaggctgagaaagaataaggaggacaaaaaaatgtcaaaatcctctggtctagcaagtgcttggctgggccctgggaaccacacaatgaagaggctgctgtggccagaaagagaaaagatgggatagcaaaagagatgctggcaggaagccacgtgctggggagggatatacagaaggcacttgcctctcccctctgaaaactgagcctagtatatatacaacaagtgctcacacagaaaatgaacggcggtgccaggcgcggtggctcacgcctgtaatcccagcactttgggaggcagaggagggtggatcacttgaggccaggagtttgagaccagcctgaccaacaaggtgaaaccctgtctctactagaaataaaaaattagccgggcgtggtggtgggtgccgataatcacagctactggggaggctgaggcagaagaatctcttgaacctgagagacaaagaggtttcagtgagccaagatcatgccattgcacgccagcctgggcaacagagcaagactccatctcaaaaagaataaaaaaaaaaaaaaaaagaatgccaggttgctcacgcctataatcccagcactttgggaggctgaagcgggcggatcacctgaggtcaggagtttgagaccagcctggccaacaaggcgaaaccccttctctactaaaaatacaaaaattagccgagtgtggtggcacacgcctgtgatcccagctacttgggaggctgaggcaggagaatggcatgaagccgggagacggagtttgcagtgagccaagattgcgccactgcactccagcctgggcaactgagcgagactccgtctcaaaaaaaaaaaaaaaaaaaaagagaaaatgaaaatgaatagggactttgccacttgggggacattaatagtgtctgaaggagattgtgatctttgggggacaaggaatagagggggaggcttatacagactttgagagaggagagcacaaagcaaagggcaattaggcaagaaagaagtgaacagatcactgtggttccctttacataaggatgaggccctcgtggaaaagagtggaagggaggggaactctatgttgtttttcagcaagtcattccagctcattgaaatacctcctatgagcctcccttccttcccccaggctgaggatctggcaacagaggctgaggtgaagggaggtgtggctgcatgcccagccccaggggccacagggcctccacccatgtccctgggattcctggcttctaagtctcagtgtgaagagtctactggtgaatgaaagagaaagaagagaaagtgttccctggaaagcagtgctttagcccaaactttactgcatacgcacagggaatcacctgggaaccttgttaaaatgcagattttgattcagtagctctggcccggggcctgagagtctgcgtttttagccagttttcaagtgctgcctatgccgttgggcatggtccagggaccacaccttaatctgcaaggtgtctctgtccttagcagctaccgtgatgcccagcacaaagcatgcttctgaaaaattatagcaaatgaatgaatacatgaatgaaaaagtgagttgagaggtaggactctccactacttaaatcaccatatttgttaaaatatgaattcccataaaccaaaaataaaaaataaaaaataaattcccaaccccttggagtttctaaattagtaagtgtgagatgaggatgggatatttacattttagacacgccccttaggtgatttttccatcagaccagtttgaagaacactggtctaatgagtaggatggttggactctgaggtttgagtccaagctgcacaaagatgctcaaggggaaaaaaaatcagggactacagagtaggggtgggaaggcccttgagacagttgctgaaagagaccagggcttacacatgactcagggccctcgggggtggggaccaggatgccggagggcttctctgtctcaccacttgaagatgaggttgagccactcggtgatgaggctgatccagagcaccgcgatgcccacacggcgggaggcgtagtaggccgcggggaagtagaacagaaagaggatcttgggatcgcccagaaaggtgatccagagccacacgttctccagccaggctagctggttctgtagcgcctcggctatcacgatgcccgcgcccagcgtggactccatggcggcccagctgccgaccaggccccggcttgctccagggcggaaaccagagtccaggcaacgaagcagcgtcgaccctctgatctccaaagcccacccctctgagccccaggccccgccccgccagcggtcaccaccaagccccgcccccagcagtcccccgctcctgcaagaccggcctccagccggtactgtttcctcctgcgctctcctcc

SEQ ID NO: 94392 - DNA, 153680 bp, Homo sapiens
  misc_feature (1)...(153680): n = A,T,C or G
acaatgctgtgttacttagttggccaccattttaggtgacttgtgctgcattccatgagatattttgagtcttatgaaatgtgtctcagaattgtacactcgggatgacagaggaaaacgtttatcctcaaaggtggccccagagatgttccctaaatttctaggttgcacgtgcctaaatgctgatgtgagtggttctgcagacccacacaatgtcagagaaactttgagattcagggctgagaggagactttcctttgccttccaaagctgtatggaatttgatggaaaggtggctgcagatgtgggtggagtaagaggtgagaccaaaaggattagaagcagtgcacagaatgtgtctgatacatggatcctgagcttcactgacggatgaccttgttcaaccatttgtttggaaaaccccagtgttagcctctgttcatcattcctctaggctgataacattcctcagagaaaagtcttccggctgggcgtggttgtgcaaacctataatcccctctactcaggaggctgaggcaggataatcgcttgaatccaggaggaggaggttgcagagagccaagatcacgccagtgcactccagcctgggcaacacagcaagactatctcaaaaaaaaaaaaaaaaaaaaaaagtcttccactctcctacctggaagacagaagtcactttgccagaaatctgagagccagatggagcaagactgctggagtctctgcattcactgtgcatctggcctctggacctccccatttctttatttcctgtaccctcagcaagcctgacatcctccaagtcagagactttctagaagataaacctccaggtttttttttgctggaagcacagaggggatctagggatctcactgctccttaaattgctttcgctcagttctccttattttagccttctcctccaccctcagtcccaacggtccctggttctggcagtttctgagccttttgaggtttttccagtgtaagttgggttggatctcagctttctcatgtctgctaaatcagttaccactcatccatctatttttcagcttctaaaattgtgttgctcttttctcctctcctgttctcctttccttatggttttacgacttaaaaaaagaaagaaaaggaatagaaaagaaaatctgtttagtgcagttttgggatagagcaaaattagtagcatgcatgctatctgccatcttagcctggaatccacccatagatatacacatagctagctgcctcctttgtgcccttcctgcctcaacttaaatattacttcctcagatcagtcttccctgaccactcaaccaaaatttggctcccatcgtcacagcacttattactactgggtattttcttttttttttttttgagatggagtctcactctgttgcctaagctggagggcagtggtgtgatctggctcactgcaacttccacctcccaggttcaagtgattcttctgtctcaggctcctcagtatctgggactacaggcttgcgccaccatgcccggctataggtattttcttgtgtattgcctttccccccctctagaatataaactccatgagaacaggtactccatctcttttgtccatgctataacctcagctcctaaaatagtacctggcacatgaaagaaactcaataattgtgcttggcaatgatattttgagaatcaaatgatcttcaatgctgtgtgcgacataacctgtgcaaagcaaagaaggactaccacacgtgaaggagcagagggtataccgagcataagacagagcctgcgttcaagttctgcagagtatgaggagcaagagaagctgcaaagagcaggagcagaacagcaggaatctggaaacgcctgcacttgaaaaccgtgtccttggtttgagtcaaggtcatcctaggtttctgctgcgcctccaagataagctcagctgacaatctaaaggagacaccccaaagcaaaaggggacagggaggaagggaagcagggggaaaggcagaccttgctggcgtttctgcctctcctttaattgctattagaggagtggaaggcagaagaaggaaaataaacctgtgaagcttcggggaagcagggaggactgtggaaagccctgttctattgctgagctgtgtgaagtcatgtgacatttggagtggaagctgctgtctcccattctatgtaccaggagtccttattatcagccaggtgcaccttagatgacgttcacagccctggaggtactgagtttcctgtgaccttcacttcattttaaaaaattacaagtgtttactgtaactaattcaggcaatgcagattcttatgcagtaaataaaaaagttaacctttctttccagtagtgtcagcttttagctcagcagattgtttagtttctttgcttttttccttctatcttgccttccctcctaaagatcagcactttgggaggttgaggtgggagtgttgcttgaggccagcagtttgtgatgagcctgagcaacaaagcaagaccttgtctctacagtaaaaaaaaaaaaattagccaggcatggtggtgcatgcctgtagtcccagctacttgggaggctgagggctgaggtgggaggaaggatggcttgagctcaggagttcaaggctgcagtgagctatgatcttgccactacattctaacctgggtgacagagcaagaacttgtctccaaaataaataaataacttaataaaaataaattaattagggctggacgtggtgcttcatgcctgtaatcccagcactttgggaggccgaaacgggtggatcacttgaattcaggagttcgagaccagcctggacaacacggtgaaaccccgtctctactaaaattacaaaaaaattagccagacatggtggtgcgtgcctgtaatcccagctactcgggaggctgaggcaggagaatctcttaagccccagaggcagaagttgcagtgattcgagattgcaccactgcacttcagcctgggtgacaaagcaagactctttcaaaaaaaaaaaaaaaaattaattgaagaaggcagtacattcacatggttcaaaattccaaagtcacagaaaagtagagtaaaaagtgtcccttctgccccaattctgtagctacatctgaggcaaccagtataaacatatccttgtatccttctagaaatattctctgcccagccaattttttcactggacagtattgaatagtaacagaactactcagagcacatgcacaggcctttcctttaagtgagccaaggctaagggtttggctcttcatcttctttcccaaagaaatggtagtcacaggagtcagtgtgacttgggggtgggagggatttcctcttggttctctggcagatcactgagagtgaaaaggagctgtggagggggtaggatgtggtctgccaggtgtcaggtctttttatttacaatagaactcttcttgctgtaaggagggatgactgaagagatggtatagctatggcaaaggaaatcatagctgtcatttgtgatagcagacaaagtttcaataaagggccttctctaaagaggacatcgtgtgggatgtaaacttgggaaaagaaagctattttatgtaagtcgcccaaggtatctcttcatacaattgagccactccaaagctgaatcctaggggtccagaaatcaaagggggagcaaacaagagagctggagggctcccaggtggcatcaggagattgacagcaatggggtggggcgaagcctggggattcaattagactggatctcatgtttgattctaaaggtagaatacctccaatgaagcataggagggaggagccggcaaatctggaggatccacacaacaaaagatccaaatgacctattcagcgaagggacagtttttgaaaggaaactgggagaggccgaagggtctgaaggcaaattatctgggctaaaatacttcttggtagtgtgaacccgggcaagttacttaaactccttgagcctcagtatcctaatagggataagacacagagagggacgataactgtctctcattggagtgcagtatgatcaagttaatccccaatgagatttgacaacaatgtctggcacctagtcagctaactcaatgcttttcagccatgactgttttaataaatgcctgcttaggtctgtttccctggcatagacatactcggtgatgaatctgtaaaggcacaatcagagagggatttcaggttgtaataagaggggaaaaatggaaggaaaagggagtgaacaacagcacagcaaaaacacagcagaagaatgaggaaaaaaggattcagaatggggctatttcagcaaaaacagccttgttgcaggtccacggtgtccaaagctacactgtgtaagggaatgtctcttggaaattaaatgtctcttggagaaaatttaatttcagttgaagaagtattttgtgggtgtgtgtgtgtgcctacttagagttcaaagtatactgccaaggagggtggcctggttgcatacaaggaaatcaagatctataaaaagtcaggagacttgggatcaagtcctagctttgtcctaagtggctgatgctacactgagccaaatcaatcaacaactgtgtcattttaaaaagcggccagactatttcctaggctctacatgtatgtaacattttctgatgctaacccaggggcagaggctcaaaagaactgaagagttgtttccctcacccctaagcccctcctctaaaaaaaaatccggtaaaactaagcatctggtgttcctttcattttccccaggtcccctgccaaaaggagcaagatttctaaataccggcaacgggagagagctacctcttttttttttccccatccatttcaggaaagtttaggttttcatttttttcctatggtctgcttagagttgtttccacgttaaagtaggaagaagtaacgaaaaaaaagtgagatttgccgaaagcaaatgaaacttgttttgcctggttctctggaaggaggttgaaaaggtagactatgatttttcaggttcaaactgctactctaacaaacattgtcctacagggtggaatccagtcaaccggtattgagattgattcgctaaggcctcaggacactggacattctttttaattgttttttttgatttccatgacgacagctcacaagacactagacattcttttaggctctcaggtaaatgcgcaacaggcagtctacaaatccacaaataaatcgcatctcaactcggatactggggctagggaatgtgctgatggtaaaaccattggtcctgactgtgtgaccttcatggaaggcctgggtgcttagaacaaatattttgaggatatggctgcttgcccaagggctgtgggcctgtatcttgtttgctcatcatcctgtcagtcatttttttctttccctttttttaaagacaaaatctgaacctagaaacaccgaagccagagctttttctagacgcgaatccactatttgtgcgaccctgcactaaccattctagcctggcctagaccataccaggaaccctccagctagcctggaggggtccgcactgcggggaaaaaagcaacagctcagctccaaccccaaaggttccatcaccagccaatcgtggcccggggcttctcaagaaaaccagaaacgcctacggacagtgaatggcactaaggccagcctatccgcacgaaggaggcggaaggggtggtgttgaaattaaccaatagaatggaagaagttgttgttgggagggaggaagacgccagctaacgtgcgtgaggccgctcccggataggggatgcaggaagctcgtggagccaatggccgcggcgggcgggcggcggcgcgcgtgcgcgttggcccccgggcctgcgggcgggaggcggggatggtgggggaggggagcgggctggagcgcggcggagctcctgccgccgccgcagccgctgccgccgcagcgaagaggccatgttgtgtggtgtgtggggcggggggaggaggaggagggagtaaagcctagagaggagacgggagagagacaccacacacacggcacaagatggccggagaggcagcagcaccccgagctgtcaggcgttccgccgcggccgcgaggcccgccggccggcggggagctacgcccggacggccagcaggcccgcgggagtggggctgccgcggctgaggcgaggcgggccgcgcgcgtcggcgtcacagcccgcggcagaggcgcccagggcggccgggcccacgacgccgaaagcgccgctgcggttgccgcctcggaggctcccccgggccccggcggctggacccggcgcgggcgggaggctcgggcgggcggtccggcccgggactcgggtttgggcgaccaggaggtgccggtggccgcgctcggacccggtgagtggctccctagctccttttattgtcctttgtccttgggaggaaaagcaaaatgtccttgagcgcgcgagcaggagggggcggcgggccgggcctcgccgctcggctcttctcgcactgcccctccgtggtcgggggccggctctcgccggcgggatgcgcctcggtgccctgggcccgagtcgtagggtcctggggtagggggcacgcggggccccgctgcagagccygcgggcggcaggtgggcggggggcagcctcgtcgccgggactggatccgccgggaaaggggcggcgggtgaatgccggcgagagcccgaaggggatckggcgtggagagcccctttctgtcctggtgagttattttgatatttagggtaaaaaaatccctttcaggttctccaacggaggagctttttaacctctttccggtgaggtgggaactcatcttcatgatcgaatttaaaagaacaatggaaccctgactacgtttcaacaaaaataaaacttgtttttttccctcctattgggtgttggcttttaactctttcaaagccgattttgaaacggctgcagtgatacatgcgaaggtacttgctgcttattaaacctttatgacgttaaggttgtctttgaaaaatgcaagttggaggagtgcttctggtatttcagaattacgaagacaagtttactgtgtcgtcaaggctgtttaatggaaatagatttgataattacggtgctagctagctgatgacgtttggttaatgtagtttattttaccgagtaatgacgccaagatcatttgatctcctgatatttaaatatgattaaatacactgtttggtactttttaaaaaggtctcaaggagccgttatctgcaacttctcacacctgaatgttagaacgtacttgggtcaattcctagtctttaaaagttcataatttaattatttttaagaatttatattatcacaagccatgatcgaaaaactttcacaaaagaacattctgacaccaaatctcttcctgaagttactttctcgtaatgtaaatatgaataaagtaggactgctctcggtaatgggcgatgaagaggagccatatttgttgcatttgttgcatgtataaaaatctagatatgcttaaaacggaacagtattttaaaagtacaggtttcataaaatttagtagagttctctgtatagtctctaatcttagaaaaatgttggaagggtaatttttaagtgtagtggtttgaagaacaaaccagaagcgcacaaacctttgtgtattttagaatatatttgtcttcattctgcggagctcttgtgttgtaaaggtgcagaactacgtaaaaatagtgttgggcagacttacatagtacatctgaaatcagatactggtttattcgaccatatttctaagggcatttttccagtaaaattgttttattttttgagtagccttcctatagtggtacatgttacatcagttgcgcatatcttgattttacagaatctgtcttaagtaccaattttggtttttcmaatcaatgtttctgaaatttttgaacactgmaagtggttttaaatgaatattctgaatctagttctttagaatcctctttgaattgtgaaatgcaaaataattgttagcagtttaacctgaaagatctttttacatgataaatgggggaggagaaagactgaaatgaaaatgttgaagaccctgatttgaaattgagtgtaaaggtctagatactgtaagttttagagtagctttagagacaaagctagtatcccacttggtgagatcaagtaacttgtggtttaaaatttaaagtaaccagtggccattttaacttcactaatttctcttggaggagctaatttttaattgctcatgattgtaaaacatacttccggatggtaagggagatgttaagatgatttgtcttgaagaatggtaaactttttctttgtttattgcctgtcataaaaagagggaaagtaaaaaaaaaaaggttcataatcttaaatcagtccaaaawtttgaattttctgtatttctgtttaattcaatgcgttaatctttagcattggtcaatacagccaaaagatgaggaaaacaaagactgatagatactaagrtaagaaataactgcaaccataaatgtatacaggttatgtgtccatgagccatctcttcagtttgcccatagatttttgtctgtggaatattttcttgtttcatcacactgaatcgttggccaagaaatgcttgaaaatcaaaacattaatatcatctttcttcttttttttaaaggtgacttaagagattaaaattaatttggttgctgttggttctgaacaaataatgagttcttttatttgaggtaagagtgggttaatttttattgttttgacaaaaattagcttattaggcttttgttttatctttaataatttacatttcaattaatgaatgggtatcatttttaaaagttgtgattatgaatatgagtaaactatcaaataatttgacaaaagcctttaagccttttcactgcaggaaagattaaaagtatatacgcatagccattgtaacttaaygtaccctttgaatagtttaaaatactgaaggtcctttaagcctttgtttaattttgggaacaagagaagactgattagattttgaggaaaaccatgaaccaaagatagctttttttttctgtttaactctgtatattgtgcaaacaattttaatcttttaagtatttaaagaaataagcttattggagaatttgaactagtttgctattcatactgatagattttagggaagaacatttaaaaaatcaggttttgagcatagattttagtttcttttttgtaattaaaaagtttaaaaacacttatttttacttgctattgtttgcttcataattaagtttagaatcttatttgttttcaccaaaaggtatgccattttgaagactgagacgttggagttttatcctagaggataaaggaaatctttgggaaagtcagtattttatatagcaagtaagtaaatgtttttacccaacatctgcaattgaatagttaccaacatttaagtagaaaaataccattaaagtttgttaatgaaacaaactgtagactacttatcactgaaaggatgagaaaaccatcaaatttctttgcctgacattgaaaacacttctrttactatcaagacagtcgatgcatgtaatttatattggagcaggaagacatttagtacttcttaataaaatggtgctttaggattgtggttaaatctgcagtaaagtcatcaagattatgtttttacaaatctggtatatacagtcttaagcctttttttttttttttttttgattgtacaaatcacattttaggaatggtctggaattttgcatttgctgatcgtaggattcttaacaacatttcaaaaactaaatagacactttcatatcttaggcatttaatagatttaaaatactcattttaattgttttcatgagttttcaaacaggtccaaaaatgtgttgttttctaggaaatgagagttaatgcatctaaagagtcctctaatttaattgcttagtaattgcttttaaagcatgaaagatagagataattttcacgcgcagtaggtattgggcccccagcataccatgtatatcacactttaaaatcttaaagctagatacgtgaatttaaaagaatgtccactgatgtttttaaggaaatatgccttttttgtaagttaacgttgaatctgaaaattaatgtcaagctgttattagcgattgactagaggaaatacgcggtataataatgggtatcttgggaaaatttaagaatcgccaaatgaccaattaaaataagggcaagtttaccttttcttcaaaatttatgtggaaaataaaatacagtctttcaatacttggtgttggcttattccattgattgaaataggtggtaagaggaatatttttattgcctttgcttcagcttaacttctttttaatccttttttgcagttcgatcaaacttgggtgtattacagtgtgcaagagaaaactaaatgtttgacttttaactgtagtgttttaaagatacaacatttacaagaatagttgaaacatccctcacttsaaaacttctttaacacaaatgccgagattagsgtttcctctgtgcaattgatgtgatattaaattggcattcctgtcattgggcactgttaaggaaattgagaaatgggtctcttatgtgaagcataatctgtgtttaagtataaacaggcaatacatttataatggcctacggaaggtgtaatttgattcataaaaaagaaaacagctggaaagggctagaaatgttaaatcaaagattcacatgtacttagatctttgttactgcatatattcagtgttttgatacttaactgcttgagccaatcttgtataatgaacctaattgattggcacatgagggcaaatgtgaatgtagataactattatagatagataatattatataagataaatatagtggatcatgtagatatgatattaaagtactatattttataaggaaggtggattattgtatatttaccactgttttctgcttaagaaccaaggtgatacttatataattgtttttaccctagcattttgggataattcttgagtcataaaaatctcctgattaacttggtgattgaattggattgcattagttctgatagaaactgtttaaaaaattacctgacattctatagaaatgaaaggagccatgctgtgtaatcacaaggctttcatgacatgacatttatagattatatgaaataggtaatttcaaatgtaaattttaagttttatttactattagtcatcgttttttgattatttaaaaatttgtactatggacaactaattaattttactttttatcctctgagatttgattgtggagcggcataagggggagaaagataagttgaggacgtctctttatcttttgttaatcagaggtggtgatagagtggaaaatataacacgtttcggcattcaggagacctaccttccaatgtaaataagcccttgcggtcttgatattttattccttttgtaccttcatctcataatctgtatgaagactttagagttccaagctcttaagatccctattagctctcaaattgtgggataaaaataattgttaaggcatgcctaatactcttatacagactttgtaaactgatttcagagaagcgattaaggaattgtactgtctttaaacaatatttagaatgcttcagtaaaagcatttttaaaaaatttttctaatgatgtagtaaatgtacctaatataaagttaagtggttttatttaatacttttcacctgaccatgattatgttataaataagaggatttatagtttgcatgcctgatataatctatttaatttcctttacaaaatttttgtacatgaaagataaatgtcttcattttaccagctacctccttccagattgaatgcttcagtgcactttgattttcaaattggctattattttttaatgtaattaaccttcacaatttaaattgaaggatattctgatccttaggttataaatatgtgacttgatggtttatgtaacattcaagtagcatgttttctataacaatatgataaaagttttgatacataccttgtatgttgcttgacagatctgttttagaaaacattcctctgccttttgaaatgaagccatgtatttgaaattatttcccaaacaattatatcttaagcgtgtgctacatagtaatcatagtcattttaatttagattataaagctatattttaactttgaggtttgtgaattttcttagacatattaatgactttatagttaatggtgctctcagattttatttttaagttaaaaatttgccaggcgcggtggctcacgcctgtaatcttagcactctgggaggccgaggcaggtggatcacgtgaggtcagcagtttgagaccagcccagccaacatagtgaaacccccatctctactaaaaattaaaaaaaaaaaaaaaaatttagctggatgtggtggcacgcgcctgtagtcacagctacttgggaggctgaggcaggagaatcgcttgaacctgggaggcagaggttgcagtgagctaagatccacaccactgcactccagcttgggcaacagagcgagacttcatctcaaaaaaaaaaaaaaaaaaagaaaaagtaaaaaatggttttaaaaaccaagttttctaagaaaagcataaatgactaatgataatatgacaattgactaaagctgtccttactgtttgaaagaacaacaaccaaaatatgtatattatacctgtaagttattaaatctgaaactatgatattatgaaatagggtaggtggaaatacgagcaaaatcattaactttcatagtctgcctaagctgaattttgctcccttctcctgtctttccaaggatggcaaagtgattttagactttgtcaattttggtggttagtaatttttgtgagtgatgcatggggaaggagatgctatggtagattacattagtgtctaattcttgtgatgatgcaaagtgagatacattttctgtctttggtggtgtgagaaccctatctactggtagataacttacttataagcacattatcagagcagtgtgagggatttcccttagacatttcttttaccgagattccttaagtcacttctgcccttctcttaagggtttacttggtttacgatttgtctgtcttcacaaaaccctctgttacttataaggtcagattaaatttggaagatcagaaatatgttgtgttccttttaaattgcttcatttgtcaatttcttgggaagataatttagcacctactcttagagcaattttgaagcagatctttgctatatttcttttttttttgtttgagacggagtctcgctctgtcgcccaggccggactgcggactgcagtggcgcaatctcggctcactgcaagctctgcttccctggttcacgccattctcctgcctcagcctcccgagtagctgggactacaggcgcccgccaccgcgcccggctaattttttgtatttttagtagagacggggtttcaccttgttagccaggatggtctcgatctcctgacctcatgatccacccgcctcggcctcccaaagtgctgggattacaggcgtgagccaccgcgcccggcctgctatatttcttgattatgatctgtccgaatgactaaaggaatttagatttgggaagataaacagggacttgctctataatttgaaaattagtcctaaagaagcatttgggtagcatagttttaactaaaatcctaaacttcgttgccttctaaaaaccttaaattgctacattttgtttttgtttttgtttttggagagtgagtcttgctctgttgcccaggctgctggagtgcagtggtgtgatctcaactcactgccacctccgcctcccgtttttaagtgattatcctgccttagcctcctgagtagctgggattacaggcgtgcaccaccacacttggctgagttttgtatttttagtagagctggggtttcaccatgttggtcaggtctcgaactcctgacttcaggtgacccacccagcttggactcccaaaagtattggaattacaggtgtgagccactgcgccctgcctattttcatattgaacttttaaataagttttctttrtggtggtgggatgattattgtaatcatacttgggaacagaagtgatgaaaaaggtatgttacttgagatatgggaaacgctattttccatgtttagttatggggtattcaagtctaactagtggaaagtatggatacattttatttattttttgagacggagtctcgctctgttgctcaggctagagtgcagcgatgcgatctcagctcactgcaacttctgcctcctgggttcaagcaatttctggctaatttttgtatttttagtagagacggggtttgaccatgttggccaggctggtctcaaacacctgacctcaagtgatctgcctgcctccacctccccaagtgctgggattataggtgtaagccaccgggcctggccggatacatttttattatcaagtatatattttaggaatgattagtgttggtttagttgaatagattggtacaattagtagtaatttgaaatgatgcctatggtttcctaacattttgtcttagtgttgattaaagacataataatgtgaaataatatggtaatactaaggaatgagaaagtggccttacaggtgggcaatgtaaactttcctgtagaaggattgaaagtaaatagatgtaagactagaaagtgaaacaattctgtactgtaagagcaatgttggctgtgttaaataactcgttcccaaacatcagatccacctggggagcccaaatatttacctacatttttggagttcttaggggctgaaacttacgcttgtgattttgtagtaacctattctagagaggagccaaatttgtgatactcaagagcttgtatgatttctgcttggactgtattgttaatacatacatacatcttttggtctattggcaaatgacccttgcaagatgttgacattttgggtataaatcatggtgcttaataatctgttttcattttttatgtataaaattaaattctttttgtyctctgcagaaatatgaacctcaaactgaatcctctaaaggccccatacaatgaagtagacattggtggaaacatttagtaagtattattcaatttacatgtttaatctgtttagaaattttaaatactactttggaaattttgaaaattcgagtcagaattgtaaagagggatttagtgaaactcaacacagtacaagaaaatcaacatggaaatttcgcttattaatttactccaatctattattttctgctttcttcacttaggcaagttaaaatgcaaacaaacccacatttgaacatacctctaacactattataaacatggatgttgctaaatggttcctctttgtttttgtaaataaagttttattgcagcacagctatacgctttcatttagttattgtttgccgctgctttctcagtatatagcagcagcaagcagaggagttctattgaatggcctacaaagcctaaaatatttcctgtctcatctgtagggaaagtttatcctaggtcctacagcttttccttttgtcagcattgccttaacctgtatagaactcagaagcccttcggttctcttttggtaatakaacataatttttaatgatttccaatattataattacttttaattaattaattttgaagttaaacttgaaagcccaacaaaaagttctttagcctgattgtccctgaagttatgctttgatgttagaagacatggttagcacctctgaaatagtttttctaacagcctgaaaaatagttggaaagagttgatgggaaggttgtataaatgaattttggtgaattctcaacatgatttatttatttttattttatttttcgagacagagttccactgtcacccatgctggagtgcagtgtcatgatcttgactcatcgcaacctccgcctctggggctcaagcgattctcctgcttcagcctccagtgtagctgggattacagtcacgcaccaccattcccagctaatttttgtatttttagtagagatggggtttccccatgttggccaggctggtctcgaactcctgacctcaggtgatccacacgcctcggcctcccaaagtgctaggattacaggtgtgagccaccgcacctggccaacatgatttattattgacaacctttttggtaattatatattagctacttcataaaaataatttttttgaatcatatttgggaatctagattttagatgataatttttgcctatggctactttagcttgcattgtgtaaatggctgctagggcctgcgaaatagattttatttttggagggggatttgtttttcaatacaggatgatgaaagagatgaaaacttttctaatatagtacaataattggctgtggtcattttaaagggatcagttgcatagcatatagtagatgctcaataaatacttagtgtatcaatatggcttctgttaaacattgtttatcagctagtgttttggatttaatttaaaaacagtgacattgactattaaaacatgttttaatgaattaaatataaaattgtaggtatgcctgaaagccaaagttttgaccaagtaaaaattaaaagtgacaagatttcattttttctctgcaattctcaatctcttagtttgcatatatagtcaacttttaaaccattgaggacggtaccggaatatttgatttgattgtaaaccttaaataagatgactccttttcttagttgtcacaattgacattaattttatagttagtttttatgcccataagacccagacttgttaatatatattctactgaagattcaaggtatcttggtaataagtcaacatatgtgaatttacttctcagggcttcctttttttttttttttcccctgagacggagtttcactcttgttgcacaggatggagtgtggtggcgcgatctcagctcactgcaacccctgcctcccgggttcaattgattctcctgcctcagcctccccagtagctgggattacaggcatgtgccaccacgcccagctaatttttgtatttttagtagagatggggtttcaccatgttgaccaggttggtctcgaactcctgacctcaggggatgtgctggccttggcctccctaagtgataggattacaggtgtgagccaccgcacccagcctctcagggctttcttgcataaatatttccacatttaaagacagtagacgaagattgaaatcatcataagcaccaagaatgttaattacatgatgagaaggatgaatttttgctctaggtaattttacacctgtttgtcccatcattgactttgaaataagtgttttaagttttaaaataatttgttgcattaataatagtagctttatgatagccatccattaagacaattaggaatcactaatttctttttccttatactactctctgcccctgccccccgccccatttttctttgctattaaaaatgggaaaagttgctgagaagtagaggaaaggagatggtttattttaggagagcccttgtaaactcaatccagatggtgaatcacttacctgtgtatccaccaacaatgtattttatcatgtcccagtgtttttggaacaaatttactaaagtagaatttaaaaagaataccaggccaggtgcagtggctcaggcctgtagtcccagcactttggggaggctgagggcaggtgcatcacaaggtcaggagttcgagaccagcctggcccacatagtgaaaccccgtctctactaaaattacaaaaattagccaggcatggtgatatgcgcctacagtcccagctacttgggaggctgaggcaggagaatcgcttgacctgggaggtgcaggttgtggtgagccgaggttgcgccactgcactccagcctgaggaacagagagagactccgtctcaaaaaaaaaaaaaaaaccttagttgggtgcagaggcatgtacttgtgttctcagctactgggaaagctgaggtgggaggatctcttccacccagaagtttgaaaccagcctgggcaacgtagtgagacctccatcttaaaaaataattaaaaatacaatgaagagaatacctccatgttcaactttatgttcttctggatgtatgataatgcgggaattttaaggggtagtagttactcattgaagctttgttgccatttaagtttttacctttgctgtgggaatggtactcttagaacatgcacattattttgaaaaggaagtataaactagtgaatatcaaaggggaaaaattttgttaaccatttatattatgagcttgaaggttatatgtgaaatacagaaaagatctaggtttgtctgattatggaattctagatcaaaacatstcttccatgtctgcagtaattcacaagttactggaaaggaacatgtagagggttttgatatctaaaccctacccagttttctgtaggatcttgattttattttaatgcaagactgctgaccccatgatcctgtgtgttcttcagagatactcttactgatgatgtataaatgaactttgattcagtaaggtcagtttgtaggtctcaaagtactttggttaktgtggtacatcagaatgatagctagtatttactgagatctttctatatgtcaggtaataaaaatcctataaaagtattctttctacagccacaggaggtaggtactatttttattttacagatgaagaactgtggattttgtttctaagaaaatttccaggctcacagaactaagcctaatttctttttattttttagcaaatacagtttttataagaatttgaattctatgaaaataaatggattactcctaaatctctgatgcctcagtgaacactttttccttattaacaaaattctcacttttggctttggattggctttgcaggagtgcagattgatcatagcttttttcatgtcctaagagttgtcagagttttctcttgtagcatktttttctttacttttttttttttactatctttaaatatatgactgtaagagtatgataaatatgctgttttctaatctctgctgttgtcacataaactaatatattttgagtaattttgmaatgatattaataatgtcattagattttctttggattttttgaaaaaaataatggttttagaaggaaatctggataaattttatctctgtcctgtgtcagaaaaatataaaacttgagttttttaaattaaggtactaagatraataaattgcatctatagatattgaaatatgactgtaatttgataatgcattttcattctcagtgtcattgttcatcataatagtatttacatcaccaacttcatttagagcttgaatcttgtaacaatagagattgaaaataaattggtttataattaactctgacagagaatgatgtttttacttttatacttctctatagaagtacatgtcccttaattttaaggaatgaacaagtcagatggaagatttttactgagatcaggaatgaattgagtaatttagttttctttttaaagctggggagaaatgagcaaaatcaaggagaaatatcttgcttttgatatttattactgatgctgtgacactccctttaatcaatgttttttaatatgggtggcagtatctcagttaaccaaatagttaagtaagtagatttttgtattgtatatagtaaacagtatcctaattgttgccaaggagacaaggaattacctaatgggcaaaaatgcccttatatttatttacctcaaattcagtcacacttgactgtatctccacaaattcagatggagagctggaaaatttatagagwagaccagggtttaaatcttgttttttcaaattatgtttggtcatgatgaatctgaatcatttatttaatgataaaatcatctgacttctcacttctcacttctcccttcagttaaaattatttaagtaatggatttgtttttctatgagagacatttggtattttggtaatgaaagtgtattattttagttgcatataatttgaaaacagcattttatggcaaatctatcaagccaggcagatactttgcatttttgatctttttttttttttttttttttggtggctacatcttttctgtattctcagatatgtcgttaaagatggtgccacctatagtggccattttcgttatctaaacaaaaccaacatctgttggattgaaaaactatgctatgatcgactgctttatgtgtgtatgtttttttttttttttcaaatcccttaagattcttttctataattagttttctttgaagaagcttggaaagttttctgcattgagatttaraatccacagtgtttctgtaatttagctttccaggaattttgaattttaatttttgtttttactttttatgtacacagtataatgatgttagtgttaaatattaaaaatctgactcttcactgggacttttttatagatacaaatgtatctgtggtagtacaaggactttgttactttggcgtgcagtcttatcaaggagttgtgtgtgtgttttgcatacaactttacaatttcatagttgaaagctgttacaaaatgaaagttttgtgtatggtaggatatcttcaaggtgggtggatgttttctgtttaaaagattaagatgccaacagcgtttttttcttttaattttttcatcaagcacccagtcagcttgaagagtttcaaatggaccctaccactgagaaatcaagatggcagtctactatggggaattgaggaaaaatggattaatacaagagtcctgtgataatatacaaccaagacagggttcttttaacatggattccatgcagtgaatgaagacataggtttcttacccaacacaaatggacagtggatttgactttctaaagactttttttgtggacattttgacatttggagaagaaagatggcacactaacccagataatagtttttatgcctggaattttttgcagtttgatttgtatrcgtatgacctcttgaaatgttaatttttaataaaatttgtaacacttaaaaatttctcagtttgggtttttttttttaagtggaagtttaattaaatgtttagttttattttagtaatactttggcctttgtagttgccgagtggtaaagtgtactgaatatgaataaagctggtaaattggaaatggtgtaatcgaaaacattttacttggtttatgaagatttacgtttttcacaaagttgtgctcttagatggtcatttggtttaaatactgttttgtttgtgctttcatgaaacacctttcaaaacaactcaatgggtaataatagaatctgattttaatctgccacaagattttaatgaacttgaaacaaactgcttgttgctcgaaaattcaggatgagtgatacacatatacttctgaattattttgtgttgattgaaatggtttcttaagctttttaatactataaatacatcttgctatagaatattcatctgaatatttaaattaatgtctcctattgtcttactattagaggaagaagtgttggatttatgggttagggtccttggagtattcacaattttttaaatttgaaattatgtgtgtaatccattttatataactttgaagtrggattaatatcttgtatcgtctttattttgtacaattggggatttagaataaatgaattgcaccctgccatagattacttacgtttgmtttttaaatgccaggttttcatttattactaatcaactgataccagttttggtaactattacaaaggtggtaggcattattttggtagacaaaatgagttcttgattctgttttcccattttacatgagaagaataaatagttcaggttaaattgttttgtgttaatcatactgtttgtgattcatgtcaaatactgcagcatacacatccatggttaatacacgagcaccatttgttattgactgatgtgaggtggttggtctttgttaaattcaaaaatggaattttggatattgttcttgctacgaaatttatctttgtgtgtagagtatggaattgaaacagtttggattatggattttacctagattggacattgttgmttttgtttggtgtaaatctaaagtggatttcttcagtgagggagagacatggttctggcagattatgttgaataaggaaagttgattggatttttttgggtgtgtgaatatgcttgtctgaatggagtgcttggtaggatattgtttctggaattagtaatttgtttctgtggatctcatggttttgatatttaggagaatttgctttgtgacattactttgataatttgcaatcacgtatgtcctattgttaataacattgttgaaatgggtgtatacttacttgatttgaaatataagggaagtgttgggatatgtgttttctgttggatttggacgtggagtttcttgggttactgatttaaaggtgatcgtgtttggaccatactcttgaatttttgcctgaatcagtatgggaagtaaatatattgtgattatgagaagtttctttggggggaggagtgtaatattttcaaggttatataatgggttaaagaattttgtgaaagaacaaagaaaaatggatattcttgaataaaaattggttgcattaacttttgctccagtgcaacttgaacactarggaggcgctcttgagttgtaaaagttacccctttcttccagtggagatggaaaattcccccttaaattttgtctttagattatttttaggcatcataaagaaggaaaaacttgwatttatattatgaaattaaggttttacttttatttagcaatcatttcacccattgggggattaatttttaaaaagattagtacttagctgagctttagattctctaagaattatccctttttcaaaatggcttgataaaacaccacttcctgtccagggaggaagttattttagctcaaggactgaaatatttagcagatctttagacaaaaggaacaaattacatttctctctggcttaaaaagggtgcttgagccagagggggttaagaagccctcccccctccccctgttggggtggtctggaggggcagggaggtgtgggggtgggggtccttaggctccctgggatggaggatctgtctctctctctctctctcctttttttttttttggtggagatgaaggggtgggtctatggtacatcacctgagttgtggggtaaatgtagagagtgtcaatcaaaggcagagctctcagagctgggaaggaggctctagatggcggctgtgccttagagagagcgcgctctgctccctgcctttgcctcactttacgcaactttccctaactttcgggcagcctcagggggcccccgtagccccctgcctttcctagggacttactggggtcgattcgaacctttttttgggagaaaagcagcttttaggagctttcttttcgtgccttgttggaaagaagcagccgtactgagagcccaggtcgttgttttttccagcttagaagccatggcgcacctccatttttgtgcgctctcctaatgaggttttttttctttcggacctgttttagtattaattattgctttatttttttgaccagttaacatatttgagggttattttatttatttttcgttttttaacggaggattttgcctttatttttaattatttgggatctgatatttttctactagtagataggactcttggtttggacatactacatggatcaggtaagttcacgatcattggtgataattttaaagatttatttgtttaagtttgccttgttttctgtaaatacgagaaattcttggatgacgcaataagatacagagattgttatttgtatctagtgtgctactttgagaaagtttccttattgatagtgatgcttccactgttcggtttatcctgttgttttttcttttaaggaaaaaatagaaatatttagttttttggtgcttaccgttgttgtgttataacaatatcgttaacatcgtcaggactttgttcctgataataaaaagcatcgatagaagccgggaccttacctttctttcaacttttgacagtaaatacctgggcacaggacttcaaagcaaacacagattccccctcccccttaatatttaagaattaaaagatgatgagaaataaggacaaaagccaagaggaggacagttcgctacacagcaatgcatcgaggtatgagctatcaactttcttcctttttgtctttttttttgggggagaaacctcagcttacaattgtttaccttgacagacatggattgctgtctgttttattgtgtttttctaatttggattcgttttttaaagcatgaccttgagattgctaatatgccacaccctaattttttggtagcaatttatgaaagttgagttgtgacttaaggcctcttacagcagtcaaaaggtaaggtacctttattcaaaggggcctttactgtaatgtacagtttttctgtcagtaaatttcartttttaggtttttgtactgcagaaaaatgaccttgtcggtttagccattgctgcattgcaccattttacatacaaggcaaattttttctttgaagaatccaggatatctaaacttgtaactgagggccatagagaagccttgtagtagtaaattatagtaaatagacatatcagaaagttatatgaatgaaaaaatgtacatttaaaaacaaaatcacttaaaggaccctttgactgatgcctctcagtttatatttttatgtgactttatatttcttttgatacacttgacattttaggaaattttgatgtgatttatcaaaacctttacttgatggttagagttcctgcatttatgaaatcaaatctgtaataacagaaatcctggaatactcttaatatatacttctattttgtgtttgttactgtgattaatatttgcagttgtatattttacatttaaattattttaaggtttgcatttgtatgcttaagacattgatttcctgttggtagatgtattttatcctcacaatttagatgtagctgctttaaatttattgatgtatttcgacagagtcgtctggaatgctttatcttctgaagcttaaaaatgtactgtttgtgcaaatcatgatctgtttcacattccttggagtaccttgttagtgatgaagtaataaagcctctaagatgtttttgttgtatgacctctgtatattaatttttaaaagtacatatgaatgcattttttgatgtgttctttatgcattttcatattataaattttaaatcatgcagtttaacaaggatgtgattcattatgtggttttccttcccaatttttacttttctaatttttataaataatacacttttctattaggctagtgaatttgaaagttttgaacatgatgtgttactaatatgctgaattctatttattttatttgactraaagcatattgagccttgctttagaaaataagttaccaaatttttttgcattgagttgtcacccagtttgtagtkctgtcttaattgaattgcccatgtaaattactagattaaattgaggacagaaaagttttttactcatcctaagctgtttttttctggaaagtaatgacaatttgaagaaatgagaacctccagatatatttggcaaattattaaagattcagcactaaaattgttgctcccttgagtgtatcatttgcataggtctcacatgggttttggctctcttatgcaaggtttgtggttaacatcattgatcagactgtgctttctaattctaaaaaattgagcagtgttggtattctttcagtatttttactctcacctggaaaactacctggaagttgtcaggcatttgcttactggtagtggaggttacagctgtacatgaagcatgtactgactgtacttttaaattggtttgtcaagtatactttgaatcatatacctgatggatgtccaaaaatatttaagactctttgaaaagaagatagttacttttaaattagttaccctaaatttcatatcttaatacatgtacataattatgacatcacttccttttaaaatgtgcagctgtagaatgttagtggtgttttaatgtggtagattaatattacttctastgagctgaactgtccctgtaattagtacttggttccttctgccatcagagtttttattgcccaaagtatagtgtttagggaatactacgaaaatcacctttgcagcctgagccacagaagaggaaatgagtttgcaggtcaagtaaactttggtctgagaattactttagtatctggaaagaatgagtgcaagtttaggtaaatctggtaataccctgtttttggaaatagtgcagtagttaatagtggttatataagtttgtattttaatttgaagttaatgctaaagtctgttatactttatcacgatttttgaaaattaaaaactttaaaaaacgcgattttaaaaacatttgattgatatttgtaaaatttctaagtatttaaaacaaagttytaatgatggacatacgagaagtataccatactttttatctgaataatttgcagcttggggataacttaagtaacatcaaagaatgaaaacgggactgtgtgcacacaaagagttcagtgtgttctccacggcaccacgttagcaatttatcttaagaattgaacgagtttattaaatttatctccaaatcgtctgcctttgagccagatttatttttataacctgaggtgcgggtaaatcctacaattttcaggggcgctttaccagatattctaaaaggctggggatgattagaaatggcataatgcagttacttgtgtactagaacaggcagtttaactggcagccattttatgacgctgataatacattaaaaaacgggattttggagaagactgaatctaaactaatagaaatctgaaayaccaaagcctatttccttcccmctctctgctcttctggggaactctggtgccgacataaaaggcagttcgatagggcacgcagcagctctttgagcccctggcatcttgatgcaggtccagctcagtcacaaaatggctgttcctttgtgccgcagcgctgacagacatactgcattgcactgtgtactcgccaaacagcaggaagttgccgtgccgagttcaaaggccggccggcgccggcgcggggtgctgattggctgtgcgcgcgcctggtaacagcagggtcaacggcggcgccttcggcagcctccgccccgtgacgtcagacggctcccckggggggcggggagagaacgcagtgacgtctggccgcgtgcgcatgtcgggcgctttctcctccccctacccagggagccgcacgccgaggggaaaaggaagggaactctagttgggactttccggtgggcggcttctttcctggacgcgtttgctcctggcagtcttgtccgcccttgcctgtagcggtccgcaccctgtagtgtgttcttttgcccatttccgggaatggtttatcctctttgagaagcggctgcttttggagaaaaagtgcaggcactatttataaattttaaaggcactatttggaaatcttaaaatagaaaatttgcccagttttacattttcccttttcataccttagcrtcccttctccccgcccccgttcagtgtgaagagatgagtgggtttaattttgttacaattgaccaaaacgtttgagtgtcagaggcggatacttttattttagtgaaaacctcttgacgggtgttaacagctgtttaatacatggctcataaacaaagggaagattatttgaacttgtccccatgcgtttttacttggtaccgtacattttctcagttggcatttgatggagaaaaactcaggtcagtatgtgctaagtactatatatttaagattcacagtgggatagtttagtagaaaatagaaaatttcacgttcaataacattaaaaagtggcagaatacagcgttaggcaaccattactatgtaagtaaatgtcagaaaactactcttttaagtgttaatagcacttgctaatgcagggtgactgacagcttggctgatagtggggtcacttggccaaatcttcgcaattatcttccctaggcctccatttcgggaattctgagtcccggtaaacggttgggtttatgctcactgatttgccttgtttggaaacctttacaaggatttctggttaaaacttcatcgttcagcaacgatgtcttaataattaaattacacatactgaatttaagcaagcaagaaattcagtggatttatctactgtggacaaagtttttttcctgccatactagagtttttttagcagttggagtaggctgtcctgtagttagccatagtttagagttattttagtaaagtgtgttacttcaaaggagatgttgacccttcagtgcaggtgatatttgcttgggcgtatgtcaagtttctgaatacagtctgtgaaagttagaattcactatgatagtgagttttgtaggttctcataatctaggttctttgggaagaattatttggatagtttgtgaaaactagctgaaattgctttttctgttacagagaagtgttcatcaaataatttgtacctgattttaaaattatatgctcaaatgtatattgcgtataaaatgctaacagagaattaagtgtttatagaacttgatraacgtttaactgtagcttccaacttaaagtatacctgccacaagaacgaaagtaataatctcacctccctttttgtgtagagactgaattctaattagttgtgttaatagtatttgctgaatacctttcaattcctaaaactggggtcaaagtagtcaacattgcagttaattatttttgaagaggatatgaactattctgttatttaagatattttaacctaaataccattatgagttaaaatgcataccatgatataacaatttacctattaactgttgacaatcttgcagccaattaagttttttawagaaccagtgttcttaggtatgtttgttgagccttctactttttttccctttgatgtggggaatagcatcaagcagcaagaaaagagtgttgatcgatttctctctctttctctctctctctctgtatccttgccgtttaaaatatgcactttccaactagtatttggccgttagggagttagtatctttgtaaagattaagtcagcagaggaaggtgggcaaataatatttttgataaagacttttggttgtgacagttgtagcaagttattgcttgaggagtgaatctggaagtttatttgaattttaactaaaactcacagattttatcattagtttactctcccttacccccaaataaaacaactgacagttatgagagacctcctgagaccacctggtatttccaaactcctatcatttctcccataaaatttgatacactaagtttgtttctggtataaaaattgagtgactgctctgtgtcagccattaaattttttcttgctatgagccatcttttttttttttttttttaagatcctttagtttttagctgcttcttggtaaccttagaactttgcttccttgragaacttggctttcttgatatggtgtcacttgaacaaagaaacttaaaaaaaaattcctctaagagtattttgtgtacaggtgaaagtaactttgtggcttggttacactgggtgtgtcacagctgagtaactccctcctgcacttcagcttgactaagcgttgagttcacatgtatacctttgcaaagctgccattcacaacttgttttggaactttagggttatcagtataaagcctgagtaacaaaacttagtcatccaatgtccaggctggattgtatttttattttgtgatcagtaattcagcacaatgctggaacacattactcacatttgtcttatgacccttttctgtaatcaatggaatctttaattgataaagcaagtctagggggwgagacmttttttaaaaaaagctcctatatactgaatatatttgagccctgattatgaagtgagggacaaggcttttctttttgaaataaatgatggaggacatagatatgtggtagccattcatgctacataatttagcattttattgttaatatgtttggttatgggtcttcttgtttggtatttcaacatgttctggactggatatcatactgaaaagtatttcagttctcattactgagtccctgtagtttggggaaaatgtgatcactgatcttgaaggagagaatgtttcagaagcatccggctaaggcaggattgtagagatagtcttgattttatactttggatttaattctgatgagtcattttgtcacttgtgtatgcttaactgttacctctgtgcctggcaagagctaggtatgagttcagcttttactttagtcctgaaaatttttgttcccagtttaggccagtgaagaagcacttatgattggacttgtaattttctcattttaaaaatgtagataatggtcatcttcattgggtcatgaagattaaataatatagtgcccataaaatgcttagcaaagagcccatcacattaaaagtgctcaataaatgtaagcttttagtaaggttattttattcttactgtttgtttcatcttactttcttgcacccctccttcatatcctaagttcttcttcaggagctaggttggccctgaggaactcgctggttgtcttggcctaccaggagagtttgtttaggccagttacaggagagatttgtgagaatgattttaggaggcaagtcctcatttagtcagcttgggtgcgttttacagttcatcctctcttagaattttttttttttttttttttttttgagaagagccagccttttgagagagcatatgactcttcctggactacaacagcttcttgtgtgaatcacagcccggcttttgccagttagtctgagtagataactacccacccccactcccccaagctgataattattaccctggtttatcctctgtctcatttcccctctcaagctgttagagaatgaatactgaatactgtggtgcactgctccatggatataaatgtaacagcagtaatatttacaaccaatgtctaattggctgtagcttgctttcagtgttcagtctaaaccataggactatatatttgtcttagcataatgccgaacatgcaagtctgcttaaactatagtcttaagatttgwgtgttttgggtttcctctacttcctctatttcctgtcttttttgggttataggtcagatgggttctactttttattcccatttcagactrtggagagcttctaaaaataccagtgtccatccctgcccctaggatctagttaatttttaaaagctctctgtgtttcaaatttgcatgtgtttctgtatgtttgcagtatctccgtgtgttttcaaatcttctgatggagcacttcgtgtactttaacccttggtctttccattgcctgtcccatttttaaattccctttttagtcttaatagctgcttgagttaggacctctggaagcaaaagtgggataggatgctgacggggaattgtaggcttgatggaagaggatgtttctatattaaatgtcatggcagatccagttctaggcatacctttaaaatgtatacacaggctgggcgtggtagctcactcctgtaatcccagcagtttgggaggcccaggcaggcggatcacttgaggtagggagttcgagaacagcctggccaacatggtgaaaccctgtctctactaaaaatacaaagattagctggacatgatggtgggtgcctgtagtcccagctgcttgggaggctgaggccggacaatctcctgaagctgggaggcggaggttgcagttagaygaactgacacaccactgcactccagcctgggagacagggtgaccaaaaaaaaaaaaagaaaaaagataaaaaatgtatatgcaggtgggctttctcccctcaagattctgaattccttgtaagtgtcttctagtcgctttaagctcttgtggtcgtctcttccttagtgtactctccttacatcctttggaagtttagattctagaattatttacttggaatgcagttacattccattctaaacttcctttcccttgggtttataaaaacattggtgggttgtgaattgtgaccgacattgaaaaaatacaaaagaatgtggtaataaactccagggtgtatcccatttgtatgggttgtttctaagtctagcagtgcctgctagctggtaatctttcactttggattttttgttgttgttgggacagagtctcactctgctgtgctgggattacaggtgtgaaccatcatacccagcctcgtggtggtattatagatgcctgaggctggataatttgttattgtggggagcgtctcatacacagtgcagtgctgcaatcccagtctcaggtgggattttcccacctctgcctcccaaggagctgggaccacaggtgtgtaccaccccacctgtctaatttttgtagagatgggtttggaccatgttgcccaggctggtctctaattcttgggctcacctagacctccgaaagtgctgggattacagatgtgagccaccgtacctggccttcactttggattttatcaggaaggaatattgtacatggtgaacattttgtagaaaaataccaaagtagatttatatttattgagtgcttactctgggtaagggactgttttaagggttttacgtgtgtgtgtgtgtgtgtatgtatatatgtatatatatacacatatatacatatatataaattttttcttttgagacagggtttcactcccayctctcacactggagtgcagtggtacaatttcggttcactgcaacctccaccctccaggctcaagcagttctyctgccttagcctccctagtagctgggactacaggcacatgccactgcacttggctaattttttgaattttttgtagagagggggtttcgccacgtttcccaggctggtgttgaactgggcatgaaccaccatgcctggctatatgtatattttatttaatatgaaagtcagtatagcaaaaatgttagtaaccctcctaaagttaaccaactcactaaatgaatgattacatagtcctcttcctttaaaggcctgtgggtgaccttaggtcctgctgatcttatttatttttttgagacggaatctcactgtgttgcctaggttggagtgcagtggcgccgtctcagctcattgcaacctccgcctcccaggttcaagcgattgttctgcatcagcctcccgagtggttgggatcacaggcgtttgccaccatacacccagctacttcttactatttttagtagagatgggatttcaccatgtcggtcaggctggtctcagactcctgacctcaaatgatcttgccacctccgcctcccaaagtgctgggattacaggggtgagccactgcgcctggtccctgccgagcatttactacccatgccgttctgttccttcagttccattgtgtgcttaccaaggattagtagatacatcttgaatttgtttatgctggttgtacggtcatgtgttgcttagcaatggagatacattctgagaagtatgtcgttaggtgatcttgtagttgtatgaacatctcacacaaacctaggtatagcctactgcacacttatgctgtagcctgttgctcctaggccacaactgtatagagcatgttacagtactgaatgctgtaggtgattgtaatacaatggtaaatatttgtgtatctaaacagaaaagrtacagttaaaatacagtattacagtcttatgggatcactgttgtatatgacaccagtcattgacctaaacttccttatgtggtgcatgatacttgtaactttgcattttaattaaatagcaagtcagtaggygaaatgattgtgagagattgtttcagtgaaaactaagttgaatgctttaggaagactaaataatagcatgtatactacctcctaagaatctagaacttgttctgattgctttgtatgtgttagtttatgtaattctcaccactcctgaggtacatatgcttatcgctatttgctagatgagaaaattgagtcacaaggagagtagatggtagaattgggattcaaacagtggcagtttgactccagcattgattaagcatcttgtgaaaagttgctgtcaaattaatgggtaagaggaaacttagccgggtgtagtggttgattcttgtaatcccagcactttcggaggctgaggctggcagatcacttgaggccaggagttcgagaccagcctggccaacatggtgaaaccctgtgtctactaaaaatacaaaaattagctggatgtggtggtgcactcctgtaataccggctattagggaggctgaggcagagacgcttgaacctgggaggcggaagttgcagtgagctcagatcgcaccactccactctagcctgggcagcagagtgagactgtgtccccccaacccctgcccaagaaaaaatcaacatcaacaaaaaaagaggaaactaatgtatatgagactgsggaaaatagtaaaaatcttgcataattctgtagtttgcttctttttaaacactttgcattttaaagaagcagactcaaaatcacagtgcactgtgggtgtgattgatgccagtcacacattctgctgttcaaaaggccatgactctacatcaaaagattctagttaaaatgttgccctgaagtgatgctcatggggatagtataagaaacaaatgtgcaaagatgggtagatgggaggtactggaggcctcggaacttcacctttgtgcagtttgtcgtccattggcacacatgaactttggatttggccacacgttttgaagatttgtgctttgcttcaagtttgtttttttttgttcgaaacttagttcccagacaggttttgcatgagaatcacttggagaattttaaaagccaagctccctgtctgattggatttrggagccatgtagtaggtttgaggaattgtccaaagctctgggtgggtctgtggcatagctaggcttgagaactgttgtgtttatctgccgtctcggggaatagttcttgagtgtgttgtgtgttgacaatcttgaggcggagtctcgctctgtcgcctgggctggagtgcagtggcgcagtctcggcttactgtaacctctgccccctgggttcaagtgattctcctgcctcagcctcccaagtagctgggattacaggtgtgcaccaccgtgcccagttaatttttgtatttttgttttgttttgttttgagacggagtctcgctttgttgcctgagctagagtgcaatggctcgatcttggctcactgcagcctccacctcctgggttcaagtgattctcctgcctcagccttctgagtagctgggaccacaggtgcccgccaccacgcctggctaattttttgtatttttagtagagacaggggtttcactatgttggccaggctggyctcaaactcctgacctcgtgatccgccmaccttgtgatccgcccgcctcggcctcccaaagtgctgggattacaggcgtgagccacygcgccaggccctgacaaactaaaatgatcagtgtgtcttccatttagatgcaggttggcattcaaatagaggcaatatatgactggtgaattgtaatttcaaaggaaagcagtaatggatcaaactcttgcactgttctctttcccttgcttaaaaaaaagtctgttccctctgaatctagctttatatagacgtttaaatccttaagtttacttgctaaaaatcacctggggtgcttgttcaacatattcccaggcttcttgcttgaaagttaaaaaattcagcaattctagggttgtgtccaagaatctgtatgttgaacagcaacctcagttgattcttgtactgaggcaagtttgggaataaggtcagtgtgggacggggtttcgatcttttctgttctgttctgctgctttttagctgtagaatcttgggcaggagtgtctgagcctgtttcttcatcttttaaaatagagtaagggtagtacttgtctcttagggaaggaagttcaaattaaataaaatgatacttctaggcagtggtctttaactagtggcaggtttgtccccttccattaccctggacatttttgcttgtcactctgggggtgggggtgttactggcctctagtgggtagaggccagagatgctccccaacatccaagagtgtgtatgagacagctccccacaataacaaattatccagcctcaggcatctataatgccaccactaggctgggcacggcggttcacgcctgtaatcccagcactttgggaggctgaggtgggatcccttgagctaggagttcgagaccagcttgggcaatttagggagatgccatttctacaaaaaatgtaaaaattagccgggtgtggcagtatgcacctatagtcccagctatttggaaggctgaggtgggaggattgcttgagtccaagagcttgcggctgcagtgagctgtgatcacattacgtgcwctccatcctgggcaactgagcaagaccctatccaaaaaaaacaaaaaccctatgattgagaaaccgtgcttgccttggtaaatgttggttgttagtaataaagttgagtccctttgcggtttcttctctggcctgatccagggacccctcttactcccatgacgttatgggcatacgtttcacatttattattgggattggtaatcagatcttttaatctcctttgaactttgggagttgctgaaagcaccatatattttataaaagtctaaagtttataacctaaacaatagctaactaaagacaagactcacagggctgaaaggaactcttggtcaaattggtccatctgtccttagggctttaatgggtgtaaatacattgcccgaggtggttaagtattcttttgttaatgaattctggggagaactccccttgtaactgcttttcacagcttggttatttacaaagacttttgattttacctgaatagaaagcttcttttgtcttttgtgtattagcacattgccagatcctgattaggtaggtatttgtgaagtgccttaactaatttgtaccttaaccaggcttcttgctagaayacatgtttctctaatgtatgcctgggtgctaatagtttggtgctatggaaactacttatatttggttattggggagcagaagtagtatgcatgatgaggctaaggtgatgcctgcctggcttcagctgtgaattttagaaatacactgattaaaggtaaatttttttttctgtccttactgctggatttcttaatctgggaggtacttgatggaatttagcctttttatcccttgaaattataagcagcattttgtgtgcactttttcttatacatgtacctttttctgctgtcaaaagacaacatttcaacacattgagtataaagatctaattggattttattattgattaacaaattaggtagcaccccatctataaaaaaataggtssccattgggcatggtggaacaatcggtttttataaggttgagcaggaacaggaaaacaacatagtacaaaaatgtgggttaacatcaggttacttgaggttattttccttataagggttaaagcagagggaacttccttatgccagctcacactgtctgtctggggatttgggtatcttctttcctgaaggtaaggtaaacaatttagaagtttaacatgagtgactctattttggtttggtctgttagggtctaggagctcggtccaaattagtggccttccatagattctgtttaacactggaaggagggtccgtagtgttgcgtgtgttagggtgactgctgagagcactgctgaatcctggggaggggcctgcaccttagaactgatcagttctacagtgttagaaacagacctcttttgtcagaaattaagaattcagaaaagttcaaaggatataattaaagtttttttttttttgagacagagtctcgctctgttgcccaggctggagtgcagtggtgcgatctcagctcactgcaagctccgcctcccgggttcacgccattctgctgcctcagcctcccgagtagctgggactacaggcatgtgtcaccatgcccggctaactttttgtatttttagtagagacagtgtttcaccgtgttagccaggatggtctccatctgaccttgtgatctgcctgcctcggcctcccaaagtgctgggattacaggcgtgagccaccacgcccggcctaataaagttttaaaataaaaaagttagacatagctagggtcacttttatgattttggcatataaagagttggcacttataaaatgtacatggttatgtaaatatgttttgtgttttaaaaatttaatagttttgaaattttctttttgatattgtgaaaggaaaataaatctcggtatctccaaattactaagccaaagggaaaagtcaagctgggaactgtgtcaggcaaacctgcctcccatttttttcctaaataagatagctagaaaaataaaaatgctacatacctccctaacaatttgcccacaaggaaattccttgtggacaaagaactcaaagccatcccctctgttcacctaagacaaatgcgtatctgattgcttcctctgccctgttgttttgctaagccagactgaggcataaatgactatgcctctactctcttctcacatggaacttgtgtattcagtgaaaggctaatcaagagacttaaaagaatgcaactgtttgtctattatctacctatgayctggaagccccctcccctgcttccagttgtccggcctttccaggccaaaccagtgtgcatcttacacatattgatgtctcatgtctccctaaaatgtgtgaaaaccaagctgtgccccatcaccctgggcacataccatcaggacctcctgaggatgtgtcacgggcacgtccttaaccttggcaaaataaactttctaaattgattgagctctgtttcagatacttttgggctcacagtatttacagacataattcagccctaatctagctgctgcatttagttgcatagtgtgaatatttcacattttacttttacattttcataaatgggtatatggattatttaggttttgttatgaacagagctctgaatatttatttgcctcgtcctatacaagtttgataatttgtctacgttacatgcccacaaattgaattacaggattcatacacttttttatttttttgagttggagtctcaccctgttgctcaggctggagtgcaatggtgcaacctcagttcactgcaacctccaactcccacgttcaagcgattctcctaccttggcctcccgagtaactgggactacaggcgcgtgccaccacgcccagctaatttttgtatttttagtagagacggggtttcaccatgtggtccaggattgtctcagtctcctgacctcctaatctgaccacctcggcctcccaaattgctgggattacaggcatgagctactgctcctggctgattcgtatacattttaagggttactggctattcttacaattatttaatactaagagactytaatttctgcaaagcagatgagtgcaaaataaccagttataatgtttcccaagttaacagaggtttagttatttttaaaaatgagtttattggccatttcagtttcttctccgtaattgcgtatccattttctttgtgcagtttttggttggatttttgataggtaattcttcatatgttgtgtatctatatactttgttatgtgtacattgaaattttgtttcccagtccgtctgggaaacaagttacttgtcttttaaccttgtttatagtaataacttattctgaagaagcacaggacttgaaccaaaggtggagagtttaaagaactacatccagtattctttaccaataagaaatgtgtggccaggcgcagtggctcatgcctgtaatcctagcactttgggaggccaaggcgggcagattacctgaggtccggagttcaagaccagcctggccgacatggtgaaaccctgtctctactaaaaatacaaaacaattagccaggtgcagtggggcatgcctgtaattccagctactctggagactgaggcaggagaatcgcatgaaccctggaggcggaggttacggtgagccgagatcacgccactgcactccagcctgggctacagagcgcgacttggtctcaaaaaacaaacaagcaaaaagaaaaaaaaggtgtgaccagtcagtcttctttgcttttccatcttaagacacatagaagtgactgagaaggaatagttatgcaatgacatcggtttaataatcagttcaactgaagaatgtatgtaaataagggcagtgatacctaacgctgatagttgatagtgtggattgcataattcagactgtggggtgatatcttacacacgcacatacacacacacactcttgggctttgtcttctttataggtaaggattaggagaattttgacatatgcctgacacaaaagtgctccgtaaatattagctattgtatcactggcaggaagttagcctggaaataagttttatggaattccagtgtagattgctttgtgattgttttgccagattttgctttcacccacaaaaacactaagctctgccaaccagttcggccattttgtaagttagsaaaataaacactaaagtgaaatggcggcttttgggcggggctcccacaggctggctccttttaagtggaatgttgctgtgctgccctcttgtggccatttgggaaacsgcgattaaaaatggaacagtaagtgttaatggcacttcgtttcaaagtccagttccaagaaggttaatcactccgtttttacctacttcagaaagtattttgaagagataccaaattctttttatccacaagcaaaaggaagtggtaaacctttttctcatcagcatttatttttgattggaatctgaattcccagttttgacttgtttttttatctgtgtgttgtattttccttttaattatttgttaagtaaaaaattataaaagttgtttgcaatttagatgttgaataattttcagatagttgtttttcgtgaagattctgtatatatgttggatagtcattcctgaaaatccaatgtttaattgccctgtaactagtaagccactggtagtcagctaattttattactttgttatttaggtgaaggcttaaaggactccactcactaactcagtttgaccctttctattagtcttgtgggctttctgcctcctctactaaaccagcactaaagctacagcttagtactaatagtatttactattataattattaggtattaatggcaattctacatagtcttttaggaaatgtcgtttttttaagggaataatatgaatatatatatacgtatatatacacatgtacgctatatatacacacatatatacacayatacatatatatacatacacacatatatatacatacatatatatatatattttttgagacagagttttgctgttgatgcttgggctggagtgcagtggtgtgatctcggctcactgaaacgtccacctcctgagttcaagcgattctcctgcctcagcctccaaagtagctgggattacaggtgcatgccaccatacctggctaattgtttttttagtacaggctgggtttcaccgtgttggccaggctggtcttgaactcctgacctcaggtgttccacccgcctgggcctcccagagtgctgggattacaggcttgagccaccatgctcggcccataattacactttttttttttttgagacggagtctggctgtgtcatccaggctggagtgcagtggcacgatctcattttccatttccagtttatttagtgattattcctcttacgagaagtatgaaaattaagtaatgactttgttaaggcttttttttttcttctttaagcagttcccctcattagtacttgtattcagtcttacatctgattctggttccaaaaacaatttaaaaacacttttttttttttggagacggagtcttgctttgttgcccaggctggagtgcaatggcacgattgcggctcactgcaacctctgcctcctgggttcaagtgattcttctgcctcagcctcccgagtagctgggactacaggcacactaccatgcccagctaattttttgtatttgtagtagagatggggtttcaccgtgttagccaggatggtctcccatctcctgacctcatgatcttcccatctcagcctcccaaagtgttgggattacaggcgtgagccaccgcgcctggcctaaaaacactttttaaaaacactcattcaaatctttgctggttttgtgtagggtgggatgtacttgccgcccttggtttggatttggctctcatgattagacttactttagacaattaactagtttagacattaaaaatacttaaggtatataatgaagtgctgtgaattcactattaagcttcactactaagtttcagtcataaaatgtcactagtatcattccctgagagcatctgcctccctcaacccctaaaggcaaatatagttgtgaacttggtgttaatcttttcttgggtttgattttcattgttgttatttttgaaattacacaagtaatccatggaactcacaagtatacttcaaataacccatccctaacagagtaaaccagtgttagcaatgtggtgattaaaatgcatttatacacatagatatatgctgacagaaaaacggcttttttttttccccagaaggtattgttgtgtgcattgttacatttctaggaatcactctcctacacaaactcaaaaacacatagctgcacaagaagatacgtagaaagaaagatatttatggttacagtcaacagtttccaaatacaaatactctactcagaaatatggaaagtgtatcagagatatttgcaacttattgattaagtgaaaaatctgaaaataacctaaatgtaccgttaataggggaatgttatataaaatgtagtgaatttatagtataaaccagttcaaagggaatgagatgggcatccatatagacatatcctgatgcgggcattggcattccattacatcctatctgcagtgcttcccacttttcaacacagaacactataaacatttctagttgggctgttctagttatcttcagtaaactaatgctgccttttgtgggtctctagttggtaaagattttcagtctttttgttgctgttggagttttctgtttcctagtagtgtgtagacctgttgtctgtgacagttttattggtggtgattgccaaaacatgattctattcttaaacttttgtctggagttaaacattatagtagttgaaaaactaaatacgttatttcaaaggggaggcaaattgcacattctagcaaatgaatgtgcaattgaatccttctctaatataccaggcacaaagaacatcaaaggagatatgcttagtttgcaagtttattggggaggttgacaagcggccagattactcgatagtatgggacaagtggaggcaaggtagtgtagatgttaacagctgccggagctttggagtgagtctttctaggtcagcatgtgtgtcattgctaaaagtatagagagccagcagggcatggtaattgaagctcagacttgagatgtggctgcctgttttccatctcggtggtggtaactgctgtgacatatgtcagtattgtggaagtatctgataggtattgagcttaggataggagaccaaaggatgttttctgggagaaggtgatacctaagcccacaaaattagagaggtatttaatttgctgtgtccgcagtgggtgcaggagctagaggggagcaatgctaggtctrgagtctggagcagtgggggtgagggaagaaatgattaagtcatgtgccttgagaaattgtcagaggccaggttttatagggcatgctgaaattggatgttatcagtgaccagaagacccggatgcctgggaggtgaacaagccttcagctgcctttgctatgggaatacagtttccaggtactgccttgcctaacatccctttcaagtagactgccctttctattaaataaatcccttccttacttacaaggaaattctggagctgtctctgtacctgtctgtccatgaacaaatagtggaggcaaaactaataaattccagctagtgtcatggattgtggggtaacgactcactaatgggtgttagctggggagaattttgtgttagaaggggaatctcagcttggatgtgatatgctcagatttcctgtttgggtagggctttggcatttatagggcactgctttcatagctgccattagatgttcttatgacactactggtagatgtcacataggttgacacaagttaaaagatgacacaggcctgaggtgagctaggactgaaatggaagctgcgatgccagagcccacagcttttaagtgttcctatcactatccagctctcctcttccttttttctttcctgttgacaacctgcctggtcacaggtataaartaaatgactcagatgctttagtcacctggactagtcagcttggactgtgcaaggggttaaggagtcagtaattgtaatgaggtcttgaaactgttgagtcacttgttacaaggaagcctgttttgggaccttgtgtaacagggataagagttaataatgttttctgagtctctaatcttttggccccctatggtaaaatagaaagaaatgagctttagatccacacttggattggaatcccggcccctcaccctcttcctcaatttctagttttgtccattggccaagttacataaaagaggtcagtttttttcgtcattcatatggtgataataatgcctaatagtattgtccttgggaataagcaaaataatacatataaagtacttagcctagtgtctgatacctgttaggtgatcaggaagttacatggtttttctcatctttccccacttcccagtattgagaacctcccctcgacccctgctctcccattttttctcattgcttcctcatggtaactgaaaggcctccgtattgtaatgtgctgtggatcgcatggtgttatttgcagcagtcccagtttgcagtgtactgccctgtgcacctctagaagatgcagtgatggtaaatatagaacttccccttaccctttcaggttttgtgccacgtgtcttatctcctggcttctgaactcagggacttttctgttaatgttactgtaggttctgggtttttcyttgcccccctcagagcaaagatgggtagtttttaagcaagagtaaacagtccacctcttgctgtagagtccatccgtttgaggtctttttgcttcagagtatcttcccctctaccagcatgcccctcagttgctttttcaccattagaggaagatgaggatattgttttctctgtgcttgagattgatactctatcacccctcagtctctgtggtttctgttttgttcctttagatgacatctacctacttaggttgctgctccctatgggatgtttggaatgaagaagggaagggagatgtgtggaggccagtagccgtctttattgggttgggtgttctcattagcatcagagtgccctttttgtttacttacttctgttaagtctaccacttctggatctcactgcagattataaggcagggcctctggattgaagttaatgtgtataaatttttataaagctcctcagatgagcctaatttgctcctattagtgagaaccacgattggataattgcaaccagtttgcattcttcctctttgggtgagatgctttgttttttttgtttttgttttttggagacagggtctcactgtgacacccaggctggagtacagtggcgtaatcatggctcactgcatcctcgacttcctaggctcaaatgatcctcccacctgagtttcccgagtagctgggatcgcaggcatgcaccatcatacccagctaatttaaacattttcttgaagagatgggttttgcatattgtccaggctggtcttgaactcctgggctcaagcaatcttcctgcctaggcttcccaaagtgttgggattataggcttgagccactgtgtccagcttgttttttttttttttttttttctggagaccaagtctcgctctgtctctaggctggagtgcagtggcgtgatcttggctcactacatcctttgcctcccaggttcaagcgatccttctgcctcagtctcccgagtagcttagactgcaggtgtgtgccaccacagccagctaatttttgtatttttaatagagatggggtttcaccgtgtggtccaggatgctctcgatctcctgacctcgtgatccgcccgcctcggcctcccaaagtgctgggattacaggcatgagccaccgcgcccggcctgcttggtttggttttgttctgtgttttgtttttttcttgttgagaggggaatgatacttaacagataagacttcgtggattcatatatatctggtttcaaatcttactgtgttaactaggtgtgagagttaaatacttatgagcctcagttcagcctcatttgaatgaaggggacagtaatatccatgttcagagtttctgtcaagagcctgtccatagaaataacctgttctgtagcatcatgtaaacattcaggaaakggtagctattggggattttgagaatggtagcaataangttatttggaatgtaaaagtataaatgtgaatttgaagattttggtcttatattactaaaattactatctgcaaatgttttaccatgagaatttttttttaagcagattcatgtgtcagttcttaaatatttttaaatctctctctctctcaaaataagtcactcagcctctgaagaagcttcgggttcagactcaggcagtcagtcggaaagtgagcagggaagtgatccaggaagtggacatggcagcgagtcgaacagcagctctgaatcttctgagagtcagtcggaatctgagagcgaatcagcaggttccaaatcccagccagtcctcccagaagccaaagagaagccagcctctaagaaggaacggatagctgatgtgaagaaggtatctactttgccctgcagtacaaatgtgctgctagcctaggacaagctagcagacctttgttgttcatgaaaactcattagtatatcttgatgatgaaacctacagccattttttctagtaatatacagtagtatatctgaggatacaaatgaagacttctttctgctctattaaggaaaataaatgacctgaaccatccaattatagggaggaaagacaaatttttatacgcttggtttttaactttatttatttatttttgcaacagagtcttgctctgttgcccagcctggagtgcgcagtggcacgatcttggctcactgcaatctccgcctcccaggttcaagtgattctcctgcctcagtcacccaagtagttgagattacaggtgtctgccaccacgcccagctaatttttgtatttttagcggagactgggtttcatcatgttggccattctggtcttgaacttctgacctcaggtgatccacgtgcctcggcctcccaaagtgctgggattatagacctgagccaccatgcccagcctaaaatatatttttaaggttaaagtgagcagttccggaaagttaataatatgtagttataggttggatggacctacaagccagtcagaatgattgcactgtgcctttgataatcattatcctaaaatgagaacttctaaggaaggctcttggttttctatgtacacctccttttcacatggtagctctctgtccccctccaaaagcttattactcatgtragagtactcagtagtgagtaactccacatagtagatttttcatggaggagttgacttagatatcggctctcaaaaggacaaataagaacacaagataattttaggatgtaaacattataatatatgctgtaataaagtcataatagttgagctagaatgcctggctggtatcttgaagtgataaaactagttgatgtagtaacactgaaatgattttgccctcccagttaataagggctccataaaaacctgtgttgagtaaaaactttcatagctctagcagagggccaggtgtgggcatggatagacaggctagagtaaagcgcactttccctccttcctttctctgccaggttttttcagagtgttttatgtttactgcctctacctatatttcctaccatttggttattcctaactccttctgtttggaccttttgtcctttaactccaaggtgatgctaaggccgttacagaatctgtggactttgggttatgtgattacattggattctagttgtaaaatgcctattctgggccatcttttcttttgaagccttgattttcttcagcttacttcatcatttttatgttgttgttgttgttgttaaagtcattgttgataatgtcctttcttagtgacattgttggatcatttttcataaagatgagacagggtcttgctctgtcccccaggctggagtgcagtggtgcaatcacagctcactgcagccttgatcttctgggttcaagtgatcctcccacctcagcctcccaagtagctgggactacaggcacgtattgacacacctgtctaatttttaaattttgttgtagagacaggatctccctacgtagcccaggctgatcttgagctcctgaactcaagccattcttctgcctggacctcccagggtggtgggattacatgcctggccctacacttttaaatacaaacatttcacaagtctcagctagtggcttcttttgtgcatgttctgaaccttacttttccaaatattctcatgacgttagctgtcacctgtaatttgataacccatatttctcatctcagcttttgctacttgcttaatttctgttacaccttttcatgtcagtgttccacaatccattcaaattccttttgcttatgtgtgattctgttaaaagaatacagaatatacttagtagtagttatctctggggaagaaagtgaaaatgatttttctcctcaactaatctgtcttttaaactttttaaatcactggtgaggattgttacaggtcttaaaggttgttacaggtctacaaaaatcaggtcttaaaggcaaagggctaattactgctacagaataaaaaatagatgtgttagagaaagggtggcagtggttctcattctgagaacttctagctaagtgttagcaatgcctcatctgcgtttatctgggatgttacatgacctgaggaacttaaagaaaaatacaaattcctgattcttacttaattagacttaatgggggctttgccgcttgtattttcagtttcacaggtgtgggttagtgcagtcaagactgaaactcaaagcagtagggaatttaaaatgtatcagtaaatactttgtctttagtggaagcagccgctgtcttacctttctgtattattcagctgtatgtttatattttaatgatgggtaagcggtgtaccatatagatttatagctgttaagtaatgaagacattgttaaactaatatttcctaggataatatgcctattttwaaaaaaatggcgctttattgtctcataaatagaactagcaaaacaacccttttgatacttggttacttgaattctcttcaattgcaataaacgtttgataataataatgggggtcaagaaaaaagattaatgcgtggtctcttaattttacagatgtgggaagaatatcctgatgtttatggggtcaggcggtcaaaccgaagcagacaagaaccatcgcgatttaatattaaggaagaggtaaggaaaaaatgttttaagggcatgcatttaaactccctatcttacttcattctttctgactctggtatgtattaccattaaaaagactgaacttcaggcatgagggttaagtgactctaatatgagctatctatgaccagatacagtaaggcaagaagttaataatcaaataaaagaatctaaccagaaagatcatataatagtgaattttttagtagagtattatacagaactgacctcaaaatggtttattttttaagttgtctctcatagtgaaaattgattatatatagcaagaagtttacctttttaagcccctaacttctaaatctcctagatatttattaaatgggtaacttgtttggtaaacaaacagagcaatagaaatagtttgggatttattcctgaaagaggagggagtgcttaattaatgtatctacttttatttaacttcttaaatttggtttccttgctcatttttagtgtgagatataataaaatgagtttcaaacatacttactctaattgtgagagattgatcagtgatttttttaaattggtattctataccaggcttggttgtctatagaatcagacttctttcacctttctcattttgtgtgatatttttgtggattcttattctgaattaggtttatagactagatcctgaagagagattcttttgtctcaatgaaatgtctactttctgctttcttgggaggactttgctagtcttagctatataacgtacttctgatgaaagttaaatattgatagccacaggtcagtgagttgggtgtgggtttttaaataaatgtaccttaaaaatctaattcaccctaacatctgcattacatttgtgatgttttattttgagtgacctctgagctgttttgcctttgcttttgttttccatagtgtctcgcactaggttactgagccatgtttgttaaaaccaatcacatagttgtagaaatctttccctcttttacatattaattaacacattctctgtagggtacaagattaacagcaataggaatagtttgccattttccttaattgtggagagaaagagctactgaaatgtctgtgactgtaagctttccttggcctagtgctgttagcagagcactgttggctcatgagtgaacatactcwtaaatgagtctaaaatgaatacatcagtagttggtgcctttaaggcacactgactaaatgttgtggcatttttatttgatagtctcaatctgcagtatccagtatggtccccactactcacatgtggcttttaaaattcgcattagttaaaaataaaacttccatttctcagtcacaccagtcacattttaagcgcttggtagtcacatgtggctgatgggtactgtattggacattgtagatacaggacatttacatcgttgcagaaagttattggatattgctgttctggaagtcaagctgagataaatatttcctggctttagagataactcagtgatagcagagagatattaattttcaaatcaaaagaagagggagttccaccaagcaagtgcttaggtttctttgtgtctaaaagctcatattgaataatggtatattgagtagactgttgatccaggagatagtgttgtcccgaagaactgtgaattaaagtctgtaatcatttttcccccctcacacactgaaggcaagtagcgggtctgagagtgggagcccaaaaagaagaggccagaggcagctgaaaaaacagtaagtctttcatgggggaaattattcaatctagtagtttcaaacttgtcagcatttctaggactgccttcgttgtgtctttagtctactccaggtcccttagtctgcttctgtctctcttactagctcgggtgactgtctaccttgacctgttgcaatagcagcagcagcattggaaactcaagattctcagtttaacacatggaaggggtccacrtatactcgagcttttgcttgggataaatctcagcttcttccatygggttaacccaattagcccattgatttttttcagaaaaatatgtataaataacaagtacacaggtatttggtattgtagtaagcaaggaacaaatgtagatttgctatttttatggcaaaattatattggctgaacatccattttggtaagaaattacatattgttgtttctgtataattttaatgttgcagttcataagccagaaaaatttaatttgtggacttaatgtggagtttctttataacatagatttatatgttgattttttaatttaaaaagttcgatttatatgatatgaaattatttgattttttttgagaaataatttttaaagtcattttttggagagggtgtggatcccgttgacaatctgaattctatagcttctctcaaaaatgtagatattcaaaactttgtataccagttcaggggttctcatgttaaacagttgtccatggcttctattaagagctctaggtacatatgctctgttgtaaaatattattactctttagtaagtggcctaaggcaagtcatttgagattttaaaacccatttcctcatctccaaaaaaaaaaataataccatctacccaacaggattattagaaactatgctaagattttgtgacattaaataaatgtagggtattacagagccttacagaaaantacttaattttgccctgctagagcgcattcagttttcatttgtgttttggagaaatagtaactgtaagcaaacctgcacttggcatcttagaaggcttttgttctgccccagtctcctggtctgcttgggagactattatctgcttactggtctaatggccttttgagtatctttcctgaaatgtccaccttgattacaccctgggaaatccatgcatgtaatcattacttcaccatctggctacattcctttggtctcttgactgcaagttaaatggtgctatgcttgaattcttgacttcctattttaatggccttatttgtgtgtgcagaagccagcgtttttttcagtcactgtataatacattgygcttactctggttactggctcatagtcttgtcagcctttttgttttgttttgttttgagacagggtctcactctgttgctcaggctggagtgcagtggcttgatctcagctcactgcagccttggctygctggacttaattgacccacctaagccactcgagtagctgggactacaggcatgtgctatcatgcccagctaagtttttaaaaatttattgtatagatggggtctcactatgtttctcaggctggtttcaacctcctgagctcaagcagtcctccagcctcggtctcctaggattacaggtgtgagccactgtgccccgccacttatcagtcttaagaattccccaaagttggcaaccttcagtagcatatatggacctttcttttcctgagtagaacctcttagttccttgcagagtgggatctgtcttctttttcatattgcttccctaccctagggctgttcataggaactgccttgggctgagatagttcccctcatgttcctgtgtttgggcactgggctagccttcgtttctgctattmtctggccagctggtgagtattgtggatttacagagagctcttctcctgagtcaccagttgagattcctgaaagattaattaggggaggtcttgtagctgctgacactcaagttgcaaggcactttaggagccttctgtgatccaagctgagcaagtgtaacataacctaatgtgtggtcacatgcatttcagaattcagactcactcagagagtgaaaggtttgaaatattggcacaaagaaatgcttttctgaaaccctgcagattttattcacacattttagagtttttaaaaagggaccattttgtaaaattggtttaaaaaaattaattccaaactttaggaaagttgcaagaataaaagtgcagtacaaaggacaccttatatactttacccagattaccatttttcctccatttgctttattattatgggtgctgtttatttaagagagagggtcttgctctgtcacctaggctagagtgcagtggtgcaaccttggctctctgcagcctcaatctcctgagctcaagtgatcctcctacctcagcctcccaagtagctgggacgacaggcgtgcaccaccatgcctgattttgtatttttgtagacatagaggtctcactacgttgccctggctgttctcaaactcctggcctcaagttatcctctcaccttgctctccaaaagtgttgggattagcatacgtgagccactgcacccagcctgtgtatatttatatatatacaaacataatgttttttatgaactatttgagactaaaattcataaaattttaccttttatccctttaccttaaatatgtaaggtgtatttcttaaaaataaggattttctcttttataagcacagtacagtacagattcaacttagatttaaaacattgctgacgtacttttttttttttttttttgagacgcagtctggctttgtcgccaggctggggtacagtggcgcaatctcggctcactgcagcctccgcctccggggttcaagcaattctcctgccttagcctcccgagtagctgggactacaggcgtgcgccaccacgtccagctaattttttctatttttaatagagacggggtttcaccatgttggccaggatggtctcagtctcttgacctcgttatcagcctgtcttggcctcccagagtgctgggattgcaggcttgagccaccgcacctggctgctgatgtacttttgtctgattcatatttcagttttgtcaattaacccaataaagtctttcataatatttttccatctctactacaggatctagtttagggtcagttacatacaattagttgcacatctttttttttttttttaattgtactttaagttctagggtatatgtgcacaatgtgcaggtttgttacatatgtatacatgtgtcatgttggtgtgctgcacccgttaactcgtcatttacattaggtatatctcctaatgctgacccttccccctcccccccaccccatgacaggccacagtgtgtgatgttccccaccctgtgtccaagtgttctcattgttcaattcccacctatgagtgagaacgtgcggtgtttggttttctgtccttgcgatagtttgctcagaatgatggtttctagcttcatccatgtccttacaaaggacatgtctgatttctttaattgggagcactttcacagccttcttttgcttttaggacattgatgtttttgaagaatgcagtcttgcaagggactgtgttctttgcagaattacgaagagaccaattaccccgtcacgatttgtattaggtttttattttttgggatggactctcgctctgtcgcccaggctggagtacgatggcgcaatctcagctcactgcaacctccgcctcctggactcaagtgattctcctgcctcatcctcctgagtagctgggattacaggcatgcgccactgtgcccagctgatttttgtatttttaatagacatggggtttcaccatgttgcccaggctggtcttgaactcctgacctcaggtgatccacccgcctcagcctccctaagtgctgggcttataagatgagccaccgcgcccggccctttttttttttttttttaagttaaagagacagggtcttcctctattggtgcacatgtgtggccatagctcactgcamccttgaactcctgagctcaagtgatcctcttgcttcagtctccccagtagctgggactgtaggcacgtacaaccacatccagctgtattcatacttttaaagcttagaagaagttatacagcacaatggacctgcacaatatttaaaatatttttaaattagttagcatcatttaattgagagtgcataacaatctgtgtttttagcttcttttgagaaaatttggtaatgctggcttatgtaacagtgatggaccaggagttctccattttgccttgtttgcagttctcatctggcccctgtgagtatttgagattgtaatctctgacttagagtcatacaaacaaacaaaacattgaactttttttaaccaactcagatgctgttttgattaaactctttttttcatgcattacctcttaatgttatccaaattgcgcagtgttgtataagatttttgttgacttctggtcctggtggttttgttttgtttttgtttttgagacggcgttttattcttaccaggtgggagtgcagtgcagtagcacattcacagctcactgcagctttgacctcctgggctcaagtgattctcccaccttagcctcctgagtagttgggactgcaggcgcacaccaccacaccaagctaatttcttaattttttgtaaaggctgggtctcactctgatgcccaggctggccttgaactccttggttcaagccatcctcccaccatggcctcccaaagtgttgggattacaggcatgagccactgtgcccggcccttttccagtgttttgaattggagattgtcacatacctgtaacacagtggaagggaatccctattagcctcagatttctgttgatcattggaatttttttttcaaaagcatgctttcttggggaaatctactgaagactgaggaaacaaaagtagctacttccctcttccagatgtcttctaagtggaggaaaaaggagttttcttttttacagacagttaatagcaagccttaccaactcttggtcaaagttctggctcattatatttaaaagtagcttttgttcatttcctactttacagttgattagatttgatttgtctgtcttaggatttgtgtctagccaaccaccttttcccaataaaggaagaaaactatacacatttaaattgcattttgactttttccatgtctatttacattgccttggggcctcttggctaaatcttggtatttttctccctagttctcaaaatttcgggaaaaatttagttgaattatgtgtttttacagtatctaggggggactctgttaatggcctctaaagctggatattgtaagtttcctttgatagacattttttgctcacgatctcatatcttaaactattctttattgtagactgacttacaatgtatggcttagtggtggagtcttgataagatttgcattttataagaggccagtaatgtaggagaggacagcagtttcacatgtgggagagccttatacatctgtagggttgggaagtaatttctttgtaacagctcagtcacttttttcacttcacccattcttcacagtgacttagtattgctggtccttactatcttttttctcgttcttgaaaatgaaaagaaaacgtgaaagaatccaaccaatttcaaatatacatacacacacacttaggccttttaaaccttgagtttttcaaatactcccaggacgtgtaagcctggctttaatgtttcctgattctttggtcctcagtgagttatgattgaaagtagcagggctgagggttggtgatatggccaagcaactcatttcctcactgcacttcagtttccttctctgggaggagaactttggactagttgatttgctaagttttttttttctttctttctttcttttttttttttttgagaacagagtctcgctttgtcacctaggctggagtgcagtggcccgatctcggcccactgtaagctccacctcccgggttcacgccattctcctgcctcagcctccagagtagctgggactacgggcgcccgccaccacgcctggctaattgttttgtatttttagtagatacggggtttcaccacgttagccaggatggtctcaatctactgacctcgtgatccgcccgcctcggcctcccaaagtgctgggattacaggcgtgagccaccgcgcccgaccttttttgcattcttatattgggagattctaagtcctcctggttgttcataagtctgtaaatctgtaatctaactggaaaactctagcctcaacacatccattctctgtgtttgctgtctgctatacttatagaagtggacctcattggtggccctggtttaggttctcaattcctgggggagatatggtaattagaatttattggtgaatctttcttatctgaaggactagctgttcatattccttcaagcatgcttctacttctctccagtttgactgtgtaagccccctctgaggggtaaactgttgtggacttggtctgagggagactgcagactcatgctggtctcccacttactgtaaacatcttcctttcttccttcctggtgatcaccttatattccttggattcttagcaaacatttattgtactatgctccggggaagcagaattagaccagtgtccagagtgtatatacgaaggtctttgttttaaagagactgaaggatattaggcaatactaacaggcctttctgtcttaccagaagcacccctacccgtctgactgatagactaattgcgcattctttcattgatttttttttttttaacctaacaaagaaacatctccatttgcctgactttggctaaactctggtacaaagacgaacaaaaagtcttggtgtacaaggacccatctactggggaaatgcatatggaaacaygcagtgctagtagaagttgaataatattcataaaattgctccactgaccgtccgtggaaggcctgaattgttgttttttccccctaaggtctccaccaattcaggtttagggtgaccgttgtagcttttaggaaggttctcaatctgcasatcagccacctcctttcaataagctttcaccattacttgacctgttctcccatgaagaatattgatttgacatttgtcttgttgtagctgttgtctttagtatgacctcattccctataaagtgacccataggcaaattggtaattgtttgatttacagagaagccccaggcacttgcctgtcagttttttcctrggtatttcatgcctagcagctattacatgtttcttccctcttctctgtaggtgagaaatgagtggggtccctgcaatatcttgttggattttcaagtaaactaaaactgtttgggatagtaggacgcctgtaggttatggctctttcaagccttctaagaaytcaaggagcaaaggaacatctactgtatctaataattattaaaaactacatctttagctgaacagattagttatatgataggtttattgttgaaaaataattttagggactgtttccttaaatgtattctagagacttaaaatatctagtatagtggttctcagagtttctacccagtatcagcattacttgaatttgttgaaattcatattttttaggcctcaactgagacctactgcatcaggagctctgactagggcccagaaatctttttttttttgatggaggaggggcagataggggcagggtttcactcttaaccgcctagggtggagtacagtggcaaaatcacagctgactgcaacctcaaactcctgggttcaagtgatccttccgcctcctcagcctccttagtaactaggactgtagacatgctccaccaggcctggctcaattttaaaattttaactttaatttttctggagaggtgtcttgtattgctcagcttggtcttgagctcctggactcaagtgaaactcccaccttggcctcccaaagtgctgagattacaggcatggaccatctcacttggcccagaaatcttttttaacaagccctttaggtggtcctgataacattttaaaattttggaagcactgatcttgtgcatgttatggtttcaatcttgtcaataagagtagtaaatgaaaaaagtacatatatatccatttttatttatttttgttactggagataaaataggaatcgatattatgtagtccaggaaggatcacaattcaagtttaaatggagctagaatctcttttagcatgtctaaaatgtgcatgttctgccctttggatagtaaaattgaaattggttttgtcggattatttatcttgaaggattcttttagaaaaaaattactttgttttgcttttgatcacagagaaaaatggaaacaggaaccctcagaagatgaacaggaacaaggcaccagtgcagagagtgagccagaacaaaaaaaagtaaaagccagaagacctgtccccagaaggtgcactgtttgcttaagatctctacttgggatgagcttaatctgctgtagattgggaaggataatgtcgtgctgaaatgagagctttaatgagatgcattgtgttttgattctgcgttttagatatctgtggttcactttcagccagcctrcattgcaggtcttactgcttctttcttcrcagactggctatcgtggggcaaacatgtcttccgcttttagtaaaactccttatatgtttggccagggtacagtctctttttgggagaacaaattgtttaaaacactgtttgcctggcttaaagcatacttgagtggtttattaccttgttcataaaatctatataacattaaacaaataatctgattgtgtagagaaggaggtaggctgaaatagcagcaaattatgctaatttttgataagacagatggcagcctaagatagtgatgacaggaaaagggagtcagaagacaggccccagggaaaattwcctccttgtagtattgcttagaatggactcagcaaactatgccctttgggccaaatttcatccaccacctattttcatatggcctgtgagctaagaatagtttttatagatgaacatttctaatttacagtttaaggatagagagcactaaatttgaactccaattaagtgaaatgttatcccctcaaaaacaattctgttctcattagtagatatatattgcagtaaatgtacctgattatttcattttgaattatttaaaaaaatttgtgaaaatttattttctttcattatgtaaggacctatacattggtccccattttgyctcttggctggcagagcctaaaatatttactctctggccatttacagaaaaagtttgccaacctctggcctaggacattgtacttaccccccaacaccagcaggggaatttgtcaactgaattttatcttattttatctcagcttaataagtttatctcagaactgtcacgccagttctgtcttttagaattttgctcattatttattacatcgttgatcatctgtttaggtttggttatgagaaaggtatgggaggtatgagagaaagagataataaatgtgatcatgagtatccatttctctccctctctgacttctttcacctttttatcactgatggaatatttggggatttccttaggtgagcttctagactgtggctttcaatcctggccatctccctggtctgtccaagttaattctgtgatagggcacacagtctctcaggtagtattccaggtatattttatacacatacagtaaaaacttatgtatagttacttcttgtgctttactttcttcacacagataatagcatcctctgctgcttgttctgtaggtttctttatcctggaaatcctttcgtattagtatacaaaaaactctttttttttttctatgagtacatggtactgtttagtttccagttgaagaatatttagagttttcttaatgttttgttgttgcaaataatgctatagtgaatactttattatgcctgtttaggtgtatatcaataggattaattcctacaagtaaaactgttaattcctacaagtaaaatagtttgatagctatttccagtttgcccaccaaagagatactatcatgaacaacatgctgtgtatgtgtttttatatcaggtaatcctgatgaacatttgtgaaacattcacgttctttcccataaatgattgaggattatcagcattagaatgaccttcctgttggaaatccagatttctagtgaattagaatttcaggragtagggcccaagaatatgcatgtttaacattccccaagtgaaatgttacattctgatgtatgaaccactgctctgggaaatactgttatataaagtagacaccaaatgataaagtgaagacttagcyttttgtttctcttctcattttagaacagtgcccaaacctcgtgttaaaaagcagccgaagactcagcgtggaaagagaaaaaagcaagattcttctgatgaggatgatgatgatgacgaagctcccaaaaggcagactcgtcgaagagcggctaaaaacgttaggtaagttgtaccccagaagtgtttcactggtgtgatgtgataaagtagttggttagattttggttctcataagtccggggttgtgcacttaatagataaaaataacagcctatgtcctgaagttgwtttcagaaatctggttagctttcttgcaaaaagagtggtattgagccaaggggaataggaaaagagtagcaatagctcatttgaagccttcattcctaaaaaacaccacaagttcgtgtcctgtccaatggtgacttagtggcattatcttcatttcataacatttttttccattaaagatatttggattatattcctacttctgaattgctctttgaatcacagacgtttttctgaggttcagcttaacgtattgctacttgaatctgattttatcaagtactaataggatatgaagcattaataggaattatcattagtgaaataggccaggctcagtggctcatgcctgtaattccaacactttgggaggccgaggcaggcagattgcttgagcccaggggtttgagaccagcctagacaacagggcgagaccctgtctctacaaaaaataagaaaaagccgagtgtggtggcggcatgcacctgcagtcccagctacttgggaggctgaggtgggagaatcctgggagatggaggttgcagtgagttgagatcacgccactgcactccactccaggcaaaaaagctagatcctgtctcaaaaagaaaaaggaaaatgaaataaaggaacagatatatgcaaacactagtagtttactttatagaaatcaagtatttttttttttagattttacagatttgttcttcatagagatggtgaaaatgaatcctagagatattcataacttattcaatgtatccagttaataattccaaagctaggactgggctttgagtatgctagtgtatagcctagcactttttcttactgtaactgtactacatccaggattgtttttctttcttgtgactcaatcattcattgttaatatgtgataggaagttacatatataaaaatatatataaaaaatataaaaaatatataaatatataaataaatataaatatatataaatattataaatatataaaaatatatataaatatataaatatataaaaatatacatataaatatatataaaaatatatataaatatatatataaatatacatataaatatatataaaatatatataaatataaatatatataaatataaatataaatataaatatatatataaatatatatatataatttttttttttgagacggagtcttgctgtgttgcccaggctagagtgcagtggcgcgatcttggatcactgcaacctctgcctcccggattcaagtgattctgctgcctcagcctccagagtagctgggattacaggcgcccaccatgccggctaatttttgtatttttaatmgatacggtcaccatgttggccaggctggtttctaactcctgacctcgtgattcacctgtgtcagcctcccaaagtgctgggattacaggtgtgagcctccgcgcctagccaatatgtttctttttttaaaccaggaagtatttgtgttgaagcttccagcagtctgggaatacttaaatttcatattcttattactgggagacaacatacagggttgacatttttaattttagaaatattgcttctctttttgcctgatgaaatagtagcaaatttttycttccattatggtttttctttttttgtgtggtagtctacttgtttacataataatctgatactaaaaaatgaaaaaaatagaagtgtccttatagttttctatatcttgcttatacaaatcagtataaatatagaatttttattttcaaattgagttagactccctacagttgtttaggagcattcatcagcactttaggaaaaaaaagtaagctttgagcctactgtaaatggcagatctataaaacaacatgcttttggaaccaaaagggtatggtttcttattctagtgacggttatgtgtggcagtttaattctgaagagatcatttctcatttattcagcattattcctcttgcagttacaaagaagatgatgactttgagactgactcagatgatctcattgaaatgactggagaaggagttgatgaacagcaagataatagtgaaactattgaaaaggtcttagattcaagactgggaaagaaaggaggtatgtgtatttggggagcaaattacattttatgtatgcttagtaagacttagattttaggtattttaactctaatgtgatgaattttagtctactgctgtatttgttgtgataygtagaagtctttctgacccagtgtttcagagctgaggacaaaggtatgtgtacactatgtctttaagattttaaattaagctagtatagataagtgtcaatgttttataaagcagtgatatagcagagatacctgctaattaacattaarcaaatscacctttggttatttgtttcttaagctccttgtgaaaatatcaaactggttaaataaatattgtggtaatattgaagatttttaaatatctaatttagatatctcataactaagttgcattaaagtaaactttctgtaaaggaaataccaaaataatacttaatgctttttcttttggcttttttttttttttctttttttcattctggcttcgattgaggttaagaaagttaaccggggacttcgagtaggggaggttggaggaggatattttggtgttctatccttagtcttggagagagggatttgttttccgagttagtaagggaccaaaacaaaaggatgttgctgctctgtttttattgtttttgaataagggatttctttgatttcacctgcaaatttaggaatatgtaaaaagtggtttacatttttaaaatacttgaaatttttgattgagtccgttctgtgttgtttgtgagtttgtacttatttcaagttgaagtattttggtgcttcatccacaaagggagtcttcagataattgcattcttgggaagctttttaatatctggtgtaatatactctctttcaagtgtacttaatccttttgcagccactggagcatctactactgtatatgcgattgaagctaatggcgaccctagtggtgactttgacactgaaaaggatgaaggtgaaatccagtacctcatcaagtggaagggttggtcttacatccacagcacatgggagagtgaagaatccttacagcaacagaaagtgaagggcctaaaaaaactagagaacttcaagaaaaaagaggacgaaatcaaacaatggtatattttccatcatggattaaagaaatgtatttgcagcctgaaagaagggaaggttttaaaataatgcatggagatcacagctatctagaatctcagattttgctttgatcatctaaacatggagccatttacaattctattttataagattgtgaccttcagatactatatttttatatgtggctaccaagtttttggagttaactagcttatggagcgttattcacacattctttagttttcacaataagtgcatgagatttgtactgttattacccattttgtagatggggagaatacggcacacagcaattctgcargtggactcaggttttgaattctgatgccctgaatccagagcttattctcttaagcaccttgttattttcctgtagttaggctggggtggcttagatgtagagagttaatattctggaactctctgggttatgatatacttaaaacaaattctggttttatacaatttgcagaaatgatgtgaaggaaattattaggttaactactgaaactgtgatagtcctcgtgtgtttagtttacttacagccttgaatgtctgggtgttgtatatgggaaatatgtggagctatagcacacaaaaacctaaactgggtaataatggtatcaagctcagcctgaagacatacctgtctgtgtggtgtgattagcctatttttgtgtctggaatgtgcatagatttttgtgtctggaatgtggacagtaattctggttttactactgtgcaaaatgtgctactttagtaaattacatgttttttctttgactcaaaactgaaaatatgtaccccttagatggtgaggtaggcttgtaaagcagttagaaatttgaaatcctctgaaatataataattctaatattaagttgctgctgttgtcatctgaaaggttttggtaataagaataactagttttccaagtcatgtttaatcaatcctaaaacccatatatatataagaaaaggcgtacagttttattatcctgatttgttgagatgtatgaatttgccacatgaatctatcacataaaagagttatttttgggtctctttttagacaggacacatcagaggcaggtaactggtatatccttctatgagtgtaaggttttcagtgttctctaaaagtgttttttttgtttgtttgttttgttttgtaaaatctctggcgtaattactagtaaagattacttaaggggcagatgggagtaaaaaataggttttcttttccacctttgacttttgctttgatgtatgtggatccccagactttagtttatgtgtactttttctgtctgtctgccattcaggttagggaaagtttctcctgaagatgtagaatatttcaattgccaacaggagctggcttcagagttgaataaacagtatcagatagtagaaagagtaataggtaagtacatggtaactcacttcagccatatttgaacttgaggaatagtggcttttgcttttggaagtaatgtaaattttaaaaatgcactttggagactagacacgtsctaggtttattttaaaggaaaagctaagaagatttgctggtaaatttggatgtgggggatgagagaaagaggtgttaagtatgacctcaagatttgtggcctaaacatgtagaagtttagaggtaccatttaccgaagtggaaagatgaagggaagagctgatcattggagtggagaccaagagcttagtttgatatttgtaagtttgatttacttcttagtcatctaagtggagaatatagtgaaggctggagcatatgtgaacctggagcttaggactctttagtctgggctggagatttaaatttggaaatttatcagtatttagtatttaaaggccaagattgaacaggaccatcagaaatagagtatcacgtggtaagaagaagtagtctgagagcatttcagcttttggaagtcagaaagaagctagcaaaggagactgagaaagaacagtcggwgagacaggaggagagctgagagagagtggtgtactggaagccaagtgattcacatagccaggagagaggaaatgctgtcagtcaaggacgattaggactgagacttgatctgtgaatttggcactggcaaaacgcatccatggagtggtgagggtgcggcctgattagggtaggttcaagagaaaatgagaggggatagcaagtataaacaactcgttgggggagttttcttacaaaggggaacagagaagtggagtgtcagcctgagagagagatgagaaaaagaatttttttcttcttcttcttcttcttttttttttttttgagatggtgtcttgctctgttgcccaggctggagtgcagtggcgtgatctcagctcactgcaacctctgcctcccgggttcaagtgattctcctgcctcagccttcccagtagctgggattacaggcaccccccacccccaccacgcccggctaatttctatatttttagtagagacagagtttcaccatgttggccaggttggtcttgaactgctggcctcaagcaatctgcctgccttggcctcccaaagtgctgggattacaggcgtgagccactataatcccattttttttttttcttttttaaggtgtgaggtagtagaatatatttacattttattcatagaacccaaaatctttcattcttcattgtgtttataacttttctgtcttattttttatttgtttagctgtgaagacaagtaaatctacattgggtcaaacagattttccaggtaagcaagaaattttatttataaatgttcttcaacatttcagaacagtgtatgttttgcagattattttgttttgccacatgatgttttattgattatgcataaaacagaatgtcatttttcacttttaattgacagttgctaatctataaattttttttatatgaaatagctcatagtcggaagccggcaccctcaaatgagcccgaatatctatgtaaatggatgggactcccctattcagagtgtagctgggaagatgaagccctcattggaaagaaattccagaattgcattgacagcttccacagtaggaacaactcaaaaaccatcccaacaagagaatgcaaggtatggtgatggttggcttttgttttttcagggagaagatatactgataaagaggattggacacatatgtgctgagaaaatattacaaaatgaaatgatgattgccattttgaagtgaaagaaggtgatttaaatatgacattaaagcaawaggagagaatgaattatttcatggctttgctgacttgtttaatcttgcaatttacataattagaaatagagatatttgagagaatacttgaaaggatttaggcacttttattttattttattttattattttattttgagacagagtttygctgtgtcgcccaggctggagtgcactggcactatcttggctaactgcaacctctgcctcctgggtttaagtgattctcctgcctcagcctcctgagcagctgggattacaggcacgcaccaccacttccagctaattttttgtatttttagcagagatggggtttcaccatgttggtcaggctggtctcaaactcctgacctcaaatgatccacccaccttggcctcccaaagtgctgggattacaggcgtgagccaccatgcccagttgcatttaggcactttaaaagagaagtgaagccagttgcagtggctcacacctgtggttccagctacttgggaggctgaggcggcaggattgcttgagcacaggagtttgaggccaacctggggaagattgtgatacccgttctctaaaaaaaaaaaaaaatagagagcgggmagtgatagaaaaggcgagtgtctttgaattctaagttagaaattaaatatataggcttatttgctagattggctgaataaatcctttccttggaatttattccatcaggaaactgatgtgcttgggtcctcagtaatgaaatatcagacaagtgatacgtctctgagaagttgacattcatgttaatggcactagaattctatctgtgaaaaccagtatttaattgccaaagagtgtgatagggaaaatgtggtcagagaagcaccaatgtagaagtctctgagctccagtggtcattgaatgggttttaagaggaagttgtggttgttgaactgcatctggcccttgtataatggattggtgctgctggctatacagacaagagggggcccagggtattgccctcctgtgaaaggtatcaagagaaagattcttatagttcaataggagaactactagaccccagsggtgaggagaagaggaatgatgttgacaagtacatcaaggtcaaagtgtgtgtgtcttggctacctcgaagggtattttgactttatctcctaggtattcgtacagctgagtacagtggcattatgaaatagttttatttagaaagcttcatgtaatagcagtatataggagactctggagtaagtaattattaaagccagaaggtccagccagtaagatgtcattgaagtccacgaatgaagaagtagtgtgaggacaagggaagtaacagtggcgtggaaggagtggatgggagaacagttatggggtaggtttggtaggagtggatggatggctgggttttggagttgagagtaagcagtcggattccattcactgccagccgccctcatagagaactgaacacatcaataaccttatcaaatattcttattagaatgatacttctcataatgtgtgctatagagcactaatcttcagagaaaagtcccctgaaaaaagactttttggccatgtaactttgagatacatccctgaatgaatttctcctgtaaattcacgctatggacacacatttcagactttgaaaagtcatgagtaaagaaattgtataactttttgatcggttgtttcctaaactgatttggccacagaatccacattttatgcaaaccatagagactgacctcactagaatgctatcctttaagcttctgggggtgaaaacaaccttcccttcagaagcttgtttctgaagggaaaaccaaattcacgcaattaaagggtttaaggtagatgggcggcatttctgaatttacaaatcctgttatggtgaagatcaattgtatttagcatatgacagctggaggcaatgttttgtactctttagaatcagataacagaaagatagttgtttctgaaaaataggagactctgactgccatataatagacaagacctaaagtgctatttaatgatgttcatagatttatttcaggaaaggggcaagttaactaaaaatattttatttgaggatgaactaactctggcttatggaatattaaccatgaagaaaggggtgatggagtgaggtggtgattcacacacatgaaatttaagtttttggccaggcgcggtggctcacgcctgtaatcccagcactctgggaggccgaggtgggcagatcacgaggtcaggagatcgagaccatcctggctagcatggtgaaaccccatctctactaaaaatacaaaaatagccaggcgtgggtggtggcgggcgcctgtatgtagtcccagctacttgggaggctgaggcaggagaatggcgtgaacccgggaggcagagcttgcagtgagccgagattgggccactgcactccagcctgggtgacagagcaagactccgtctcaaaaaaagaaatttgagtttttatgctttgatgccgaatatgtgaattgtggctagcgttttaacatagtagcagtaagaacattttctcagacttgggcttttgtttttcaggccctgaagcagagaccacgatttgtagctttaaagaaacaacctgcatatttaggaggggagaatctggaacttcgagattatcagctagaaggtctaaactggctagctcattcctggtgcaagtaggtagaaaaatatgagtgcaattttccttactgtttctggcttctttattgttagatgtcaagaattttttttttcttttttcacacccttattgtatctcaaccaagaaatctttatgctgcatattacagaaataaaagatgattgagagaaatgcttcctgggagtttttatgtatgtgtaataccattttattctgatctaaagaatactttatttcattatttggtgggtaatttgtcatagccagaaacctgtatcatcatatgttactcatgagtgtatatagcaagttaagtcactcaaatctttaatgtggaaggagttactcagaagaaagaagaagatgtctttttcacatgtattttctttctaggccagggaagcctttaaattaatttcctacagtagtgctgtagagagtgtgattcccctcccttcactccactccctacctatatagtctgtaggattatcctgttcagaggaaggttgaacctgtgaaagtatcctttttataagaccacgttaatcttgggggggtgaaaaaaagatgagacagtgatagcactggaggtttaaaggtacttttgggaagtacttacaaatttccttcaccaatttcaagtagttcctaattactaagtgctaggtgttagaaacaaatgcttgttcctcggtgctgaaaagaactagtgctcaaggaattttctcagcaaggcaattttactttctgcagaaagggtgcttcttggaagcctaattgtcatgagagcacaccgaacaaagaaaagcagaggtttttatccctgactcattgggttcttactgctgcgtcctgtctccattggctggagctggaccgcacaatctagactgattccgattggctaaaagcttaaaactttcctaaatagataaacgcgcagtggaaaacaaaggaagggggttgtttacaggaaattaggagaataataacatttccaaataaggaaggggtgtaggctgtaagctgggaaatgcctgggcacgttcggacatgtctgagcaggttatagtccagaacaaataacctggttaaagtacaaggacatagaatgtacttattcccttactatatttaacagccacatagggcttaacaaagagttattagcaaaaagcaagggagcttgaaggaagttaatttctaaaagaaactgttatttctaacacttgttatttattctttaacaaaaagggaaactttgaagaggaactttttacttttcacatgcggatccattagtcctcgagaatttaacagtgaacctatatagatgtattttgctgtccttacagaacatgcagtgtaagaagtacctttaatgccaacctacacacttctttcccgaagtacccaattaagtgcaaatgcttaatgtctttagtgttttatagtaaagcaaaaaatccttatttagaattagaagtacaggcctgtgcaacatggcrraaccccatctttaccaaaaaatacaaaaattagctggacatggtggcatgcttatgtagtctcagctacttgggggctgaggtgggaggatcgcttgagtccrggaggccaaggttgcagtgagccattttcgcaccattgcactccagcctgggtgacaaagtgaaacttcaccttaaaaaaaaaaaaaaggacagcttaaaaaatatttttcccctcattgctgaaaggaagctttctagttatagagatgcatttacagtgactttttcccaagtgaaccatctcctactttttatctgataaaatctagtacaatatttaatactcagttgtgaaaattaggtgtcttgagaagattgagaatgtgggtttgatataatgattctgarttgcttaaaaatgatttttccttttagaggttagtgggacctaattcatctaaatgacagttaataaaagttagatgaactttaattgtgatctaatcctctcattttataattgaagactcttaggaacaaaggtgccgtgtacccatccagagtcacatggtgttttgtgtacagtccttggccagcattttttagactttttattttttagtttttttgagactgagttttgctctgttgcccaggctggagcgcagtggcatgatcttggctcactgcaacctccgattcccaggttcacgtgattctcctgcctcaggctcttgagtagctgggattacacgcacgcaccaccatgcctggctaatttttgtatttttagtagagacggggtttcaccatgttggccaagctggtcttgaactcctgacctcaagtgatctgcctgccttggcctcccaaagtgctgggattacagccatgagccaccgtgcctggccagcatttttttactttaaaccaaaggaataaaaatcagttgaaaagggctcaagcacctgttaagccctggtcacaggaatgttactacattacataatgtgctattttggtctggttccagaaaaacaggtgaatcaattcaaacctactgtagtctgtatatgtagacaatggcattttctaggggcaggaaatactggagaaacttaactgtgcttcctcctgaatagtattgaaaagtgagggaaataagaaggaaattactcaaaggaatatrctacatcgtttaaactgtgtagaaaattaggtgtacctgagatgtataggggtatggcttcatcattctccctttcccaagtgtgatcttctttgtttctgtattttaccctttaaactagctagtttgtagaacacagaaggtatttttagaaattatgtctttttggtgaattaaatgtcttgttttttgaatcagttaggttgcctttaactcataaattacttttagttctttctgatttgctgattaagcacatattatatatacgtgcaaactttcagtgtccttattttccagaacctttttataatgtttgcaatctgatgtcttacatgtaatcctaatttcctgccaaaatgactgtattctgtttcccaaatatattttcctaactctggctgtttcttcaattttaaatgtttttcttagatattctttttccattaatatcctgttgaaatctagcccattttgtagagtagtgtttctcaaactgtggttttaaggtagtgcttcccaacctttttggcactagggactggtttcgtggaagacaatttttccacaggctggggaggagggagggggatggtttctggatgattcaagcacattacatttattgtgcactttatttctattattattacattatactatataatgtagaatcagtgggagccctgagtttgtttttctgcaactggacggtcccatctgggggtgatgggagacagcaacagatcaccaggcattaggttctcataaggagtgtgcaacgtagatccctcacatgtgtagttcatagtggggttcatgctcctatgagaatctaatgccgttgctgatctgacaggaggcggagctcaggcactaatgccagcaatggggagcggctgaaaatacatatgaagcttccctccctcacccgctgctcaccttctgctgtgcagctgggttcccgagtggggaatcctggtctggtctaaggcatacctgagtcagaatctccaaaggtgtttgtcagcccttttccatatattgtttagtatatctagggtggggtccacaagtatgatctgtagcctacccctgctttagaccaaagtgtatttaaaacaagccccatgcacctatacatgtaggtctaggaaatagtgtgggtggcattaaacaacccagtggcctgcagtggaatggggtgggccagccacaggattcaccagcggtgctgatagctttctctattgatggagtctaaggttacatgcttgtcttcactttttacaaagcctgtcttctctgtgataaaagatagcctatggaaggtgatgtgaaaagcctaaaggtaaagagtctgacaaggctgtcatagtaatccaagtctaggtaggccacttgttattctgctttttatggtttctactttcttccttatgttgaaagctgaagtaattgcagatgagaagaaatacatttgaggcttatgaatgacaccttgcttggctgttattgtgaagcattggtgtcgttgctgtttatgcacattctgtgttttggtgaactaatgatttttttgtttttatttattttttctttctgcagaaataatagtgtaatccttgctgatgaaatgggcctaggaaagaccatccagaccatatcattcctctcctacctgttccaccaacaccagctgtatggcccctttcttatagtcgtccctttatccaccctcacctcatggcagagagagtttgaaatctgggcaccagagattaacgtagtggtttacataggtgacctgatgagcagaaatacggtgtgtaaacaaaaagagctgggttagaatctgtgttataaatgtaatttagaaattcacttaaagccttyagtagatcatcagtaaaatttgtggttattattctgatactgtgctgtgttctcaatattaggaggtttatctatcacaaaagtgcaactcagatgttctttaacaaatatgcttactagttaaaaagcaacagcagtatgtgagtgggaatctcttttagctrggttgcaatattaaatttttcttctctctgccctttttacttctaagattgctttatatgagataatatggagttaatactttgtgtaatattaatattatttttgctttctcaatagacatattactgaaaataatcaytcttcgaatttcttaatttcttaaacagtgaggttgcataacttataaaaaaggaataaaagtaaaggaaaacaagctattttaggactgtagaaataagaattatcctaaactgttaccaaactttatttgggcatcatgaatttagaacacagtgacttaagtttatctttgtttagcagatcttttctttatagtaactttttttaaagcacctactgtgtgctagatgttgcgctgggtgctttacgtataatacctgtaatcttcatgatagtcttcaaagctgatggcattctttyctgctactgatgaagaattgactcagagagtcttaacacgcgaccctagcgagcaagaatgtggcagagctcagattcggayacaggtgtttctatctagtctagagctttgctctttcatcactgtatataaactatttctgggaaattgcttgtaataagagcaagccattagcaatgtttaaatatttgagttgcatgttgtaaccatatattttcatacaaattcaaatttatttttggtaaatactttcattaaaattgtgtaacttaaacactggctgatttcattggcctaattttgagtttctaagaatatagttttagctttgttaaatcattagttaaccgttaaagacgaaaaaagagaaatttataggtttacaaaatagcgtaaagcactacattccaaaaatgattgcaaacaaagaaaatgaactctaaaaaattgtagtcagagaagttttccttgctatctccagttctccttttctttgttctttttacccccacttgggggcgatcacctgcaggcacttactgtcttgttctccagttcctaacttgacagccaaactgcaagagcgttgtcatgagtcttcgtgcttgctgagtgtccagttayacttcagtatgaatgtgctcatctttgtgttcttttacattgacgttattatacgtattgcattatattttcatcttacaagcctccctttttgttgggggacatatctctttggtctatggttgatgaagttccaaaggttggaatttgttttacttgttaatatatgtattttcctattcaaaaagtaaataaattgcatttttaaaagaaatttctaaggatctgggagatcccttgttgagttccaatcaccagggttcagtagctgatgaagtgcattttcttcagtagatgtatttctgggggccagtttcttctgattctggcaataaagcttttgctgttcggtggtcagtgttttaattctaactcttactgctttatagtttggttgcttaggtcattttagaatgtgagatattcattgaattctaatcagatttattttttatttggcatgtttctattacatcartcacaaaacttatgtgatatagaaaggtagaagtagaaattatgtcttaattatgtttttttcttatagatacgggaatatgaatggattcattcccaaaccaaaagattgaagttcaacgcacttataacaacatatgagatcctcttgaaagataaggtgtgtaattaatatctaaaaggctaaatcttttccagtgcgacttgtccagatggtagggtctgttactgttctgtggagcatgttagaaataaatacttgaaagttaaaaataaaaaacaaatggtagggtctgtacctcctacttgccatgttacttttcttctcttatttcaaaaagcaagcaaatgaacaaccagaaaaattacttttcaaaggatattaacgttataaatagaaaacagaaccctatagatgaggggaccttaggtcaccaagtccagttgaattaaacagaatgaaagggtattgaataggtcagtaacttacctgagattattgtcagtcattggatgccatctcaggtatttcccttgaatgtcatcttaggcatttcctattgtatcattgttaaggcatttctccagaaaagatgatgtgaatggtctttgtgaggaggacaaaaataagaagctctttaaataccgcctttctgctaagaaatatatgtggtaggtagatcccattggtattaagtgcaaacaagttgagtttggtggctcttggtgtttgtgtgcttcagggttggggtggagaataggcaagagaaggaccataattaaggggagaatacagaatcatgtggtttttttgttttatttttgcccagcatagcaatttttgtgttcttgctgtggggcatgcagtaatagctggtataagaggcccacctataccttttagatgatgatactctcttttgaatagctaccaatctggcaactaacagaataaacagaagaggcctaatatatattgtcagtgaagaataaatgtgtcaatttatacctttgtaatggtatttatacagagataattaacacttgaaagcacttgtgggttcccttctgacctggtggctcgttctgttttgtttttactttagactgtgctgggcagtattaactgggcctttctgggagtggatgaagcccatcggttgaagaatgatgactctttattgtataaaactctgattgatttcaagtccaaccataggctcctgattacggggacccctcttcagaattccctcaaagagctctggtccttgctgcactttattatgccggagaagtaagctccttcctgtgtatttcaaaagatgctagaatgtctgaaatgccaatgctttttaactttcttagtagaccttagggaaaacagatggcatggtttggggaaagcaaagcgtcaaatggaggcagggatggcggtagtaaaatgtttcataatcaatgaaagaaggcacagaaattagcctgttaaggaggaaagcagtattgtctgctgaaaggctgaattagttaatgcacttgggaaataattgttaaatagataacatcagaccttttcactgttggtataagataatcaatataagtaaaatgaaatatacaaggtacacaagcactgaaaagtatgttatactcaaatatctgataaccgaagcatcaattttacatcttattcacgtattattaaagaactatggaatgtgtttattgaaaagatttttatgggagagatgatatgcacatttcataaaacttaaaattatccaatggtattcagcgatacttagaataacatctatattcattaatttggaggactccactcagtctggccccttgacaatagtctgattcctctcatccactttctccattactcattatgcttcagccattctggctatctttctgtcccttaaacatgccaagccattactattccttcttgactagaattatatttcttcttgtcttcacatggccaaccaccttaatgtttcagctcatcttaaacgaccacctcctttcagaaatcttttgcagattgcctaacctaaagtagccctttagacatcttatccctaacctgttttagtgtctatatagcatctctttttacatttatgttctcattcatctcatgtcattaaattatgtatgaaaatcgcagggattttgtttgcttgattcattgctggttcccattgtctagaatagcacctggtgcacagtaaacaattcagttaatagttgttcagttgatagatatatgctctacaatctttttttttttaattcaggattaaattttattttttacttttatttttatttttaaattttaaatttaaatttgtttagtaactttatagtttgcaaccatcatcattgtccagttttggaacattttcctcatcccaaaaagttccccctttcttgtttgcagttaacctctgcttccacatatagccttaggcaaccagtaatcagcttttgtctctagagatttaccttttctagaagttttatataagtggaatcctaatatgtaggcttttgtttccggcttccttcacttagcatattttttttgagattcattcatgtcagagtctgtcagtaggtgttctctttcattgggtaatatttcattgcatccagttaccggttgatggacatttggattgctttgttttggggttattatatctttgtgtggacatatgtttttctttctcttgcttagagacttaggaatagaattgctggattgtttggaaagtttatgtttaacattwtagaaactaccacgctgttttctaaagtgactaccattgtgcagtcctaccaaaaatgtttgaaggttctagtttccctgcgtcatcaccaggacttggtgcattgtcagtctttttgattctagccgttctggcgaatgtgtgtcattgtggttttgacttgcatttccctaatgactaatgatgttgaacgtcttttcatgtgttcattagccatttgtatgtctttggtgaaatttctattcaaatgttttggcattttaactcaggcgtcgtgttccgtcattggaactctaagcatgtgggaattatttatatcctactgctcaaggtcattgccaaggtctgattgcaaaaaattcaaaaaattgcaacctctatcataaatgggttaaaaaaattggattgtttgtcttattatgagttgaagaggttttttatttcttttaaaaaaattctaaagacaagtgctttatcagtacagtccccaactttctatagtttgatgtaaaatgttttgacttttcagtggtatgaaagcaatacactttcagtagaaagtatactttgaatgaacacaaccattytgtttttcattttcagtgtaatattcrataaattacatgagatattcaactctttattataaagttggctttgcgttaggtgattttgctcaatatcctcatgataagcgttctgagcacattcagggtaggctacggtgtgatgttctgtaggttaagtgcattaaatgcatttttgatttaacaatgttttaaacttacgatgggtttctcaggacataaccctgttgtaagttgaggagcatctgtatataatttgaacatattttatcccaatctgtggcttcttttcactttttgaatgttgtctttcaaagagaaaaagttattgattttgatgaagtttaatttatggatttctttgtatggattgtgctttagatatcatatctgacacagatttgcctaacctatggacacgaagacttgcttctttatttccttctagaagttctagcttttgtattaagtcagagttacattttgtttatagtgtgaagtgtgagtgccttagttcatgtttttgtagtagaatttgggaaattgttctagtatcacttgttgaaaagaatatctgttcttcattgaattgccttgacactgttgttgaaactcagttgacaccataaatgtcatgctttgtttctggactgtcagttctgttttattaatacatatttctgtccttctgccaatgtcacactgtcttgattaatgtagctttcgactgtttttttattttttattttttttgagatggagccttgctctgtcacccaggctggaagggaagtggcgcaatctcagctcactgcaacgtctgcctcccgggctcaagtgattctcctgcctcagcctcccaagtagctgggattacaggcacgcaccaccatgctcaactaattttttgtattttagtagaaatggggttttgccatgttggccaggctggtctcgaactcctgacctcaagtgatccaccgtccttggcctcccaaagtactggtattataggcgtgagccactgcacccggcctagactgctttttaaaaatggagaagtacaagttccatttycttctttttcaaaattgttttggttattctagaattcttgatacttccatgtacattttaggatcaggttgttaatttctgcaagaaaaatatggaattttgatagaaattgtgttgaatcatatatcagttaaagcaaaattattaatattgagtcttctaatccataatcatggaaagtttttctccatttatttagatcttctataatttttctcagtgtttagtggtttttagtttagaaatcttatacattcaaaatattcttttaattctgactatatttggagtggaatttttaaaaatataacctattatagaactacaattgggttttgtatattgatcttacatcctgcaaacttgataaacttactgttttctactgtgtgtgtatgtgtgtgtatattgttctgtatttcttagtatttttctatagacaggattatgttttctgtacctaaagatttcttttccaaaatggatgctttttatttcttcttcttgccttattgtattggcaggaacctccatcttaaatagaaatggtgggagcaggatgttggctatagatgttttttgtagataacctttattgggttgaggaggttttcttttcttcctagtttgtgaggttttaataaagaatggatattaggttttgtcaaatgcttattttctgtgtctgttgagatraccatgtggttttgtcctttaacaatatagtatattacattaattgctttttagacattaggccaactktttttttcctagcataaatctgacttgttaacagtgtttgatactttctatgcattgctagattcagttggctaatattttgttaaagatttttgcatctgtttggtgtttttttttttttttttttttttttttaagacagagtttccgtctgttgcccaggctagagtacaatggcaccatctcggctcactgcaacctccacctcccaggttcaagcatttctcatgcctcagccttccaggtagctgggattacaagcatgcaccaccatgcccggctaatttttgtatttttcgtagagacagtggggttttgccatgtcagccaggttggtctcgaactcctggccgtaagtgatctgcatctgcctgtctccgccgcctaaagtgctgggattacaggcgtgagccactgtgcctggccgcatttgtgttttttattttaattaggattttagtctatagctttttgttttgttttgatgtttacgttgctttggttttgggatcataaaatgaattggagagcgtttcccttctgttttctgaaggagtttgtgtaagtttagtgttatttcttctttaaatatttactagaattcaccagtgtagccatgtcaaccttcactttgtgggaaaatttttaatgactaacctggtttccagttacaagttcacttaagttttctatttcttcttgacttagttttgttaatttgtgtctttctaagagttagtctgtttcatctaacttgtcctaatttgttggcataaagttatagtactctcttagccttttaattttagttttcttttttaagagacatggtctttctctgtcacccacgctgagtgcagtggtacgatcatagttcactgtaacctcgaactcctgggctcaagggatcctcccacttctgtctcttgagtagctggggctgcagatgtgcaccacaatgcccagctaatttttaaaatttattttttgttatttgtagagatgggttcttgctgagttgtccaggttggtctcgaacttctgggctcaagtgatcctcccgcctctgtttcctaaaatgctgagataataggcatgaaccactgtgcctggtagattcttttaaggatcaatagtgattaaagttaattttcttgattatggtaatttgtatcttagctctttttcttggtcagttctagctaagggcttaacaattttgatgctctcaaagaagcaacttttgacatcattggtttcttcctctgttttttcttctctttttttttttttttttttttttttttgagactgagttttgcatttgttgcccaggctggagtgcagggtgcgatctcggctcactgcaacctccgccttccagtttcaagtgattatcctgcctcagcctcttgagtagctgggattacaggcacctgccaccacgcttggctaatttttgtatttttagtagagacgaggtttcaccaagttggccaggctggtcttgaactcctgaccttgtgatttgcctgccttggcctgccaaagtgctgggattgcaggcgtgagcccccgtgcccggaccctctgtttttctgtttatttccactctcaaaggttgccgtcctttgcttgcttttcatttaattttctctttttctcttaagatacagtttagattactgatgtaaaacttttttcttttctagttgtttaaaggtatgtttacttctatgcactgctttagctgcatcctgtaaatactgataattttgtgtttttgttttcatttgatttcatctattttctaaattctctgtgatttattctttgaagcatgggtttttcagaaggatggtgtttaatatccatatatttagggattttccaaatgtcttataattcggttttgtcttagagaacatgctttaaatgaatttattatgacttattaaatagtcttagtatgctttctttcctggagactgtccgataagtgcttgtaaagaataatctgtattctgcctttgtttgagtagtgttttgtaaatgtccgttcagtgtggtgttaatggtgttgttcaagacttttatatcttttctaactgccagtttagttgtgctttgaattattgagaatgaaatattttaatttttaactgtagttgagtttttgtcttctagtcattttttgcttcattattttggggttgttctgttaggtatgtatccattcataacttttgtatgttcctgagrtattgacctttttctggtcaataycagaatgtcccatttgacctctaatgatatttattgttttgtaaatccattttgtgtgattttattatagctcctcagctctcttctgattcctgtttgcatgatatattgttttccatcattcgaactggttaccatttgcatggtatactgttttccatcattttactttcaacttacttctttctgtaagtctaaaatgtgtcttatagacaacctgtacttggatgtaccttttttatccaggcaaataatccttgccttttgattggaatatttagttcatttacatttaacagaattaataatatggttggatttatttctgctattttactatttgttttccatatgtcttacatcttttttgttccactttctcctttattgccctcttctgtttcagcaagtatttttcagtgtgtcattttaattcctgttaattttttgctattaaaaaaattgtaattggttgctgtagggattgtatgcatcagtcttcttcaggttagtactgactcagttctggtaaaatagggcaactttgccccgctgtagctccatyttcacttccttatgttataaatccaagaatacaaggaaataattattgctttccacaggtttgtcttttaaggacatatagaaaagagaaaaaaaatatatactatctttcatatttayccatatatttgatcattttcagtgatcttcatttcttcctgtgtattcaggtcgctgttgggtattgctttcttttagtctgaagggcttcctttatttacatattgcaaataagaatatgctggcttagatgattaaaagatgtcccgtatgacacagtcaataagtagatagacgaagatcaatagcaaatcttctgtgaccaaggccagtgtcctttgaacttcaagttctaggagaaaaaaatacatccttcataaaaccattgagacgaagtaaggtcaccctacgtagtaagagttatgagacacagtgggaacatctgtgcttgtttttatagaaaaagaattgtggtatgtagtttctaccagtgaatacttagccatgatttgcttttgtgtacctacctgctgaagtggatggtagggattttgctcctaagtggtcataattagctttttcctgccattaagtagctgtggcattccactcagcatgggctatgtttggaaaaatgtcatatatccttcttttgtaattggagagaggaactttcaattactttatcattcagggagtctcttccaaaattttcctttggccagttgaatcaattatggaatgataggttagagttagagatgcaagtttttttctgtgaaagagatcttttttctttgaaaattttgtgtttaaagcattgtcattttcaaataaagtttcaaaattgttgttcacaaagatatgtatatgaaaaggaaaccaattagttaaggagttcagatttgcccttatttctgcctgagcttgctggatgggtaactatagtcttgtgaagtattttgcctcatcctcagcagaagttcctgaggtaccttaggactctacagagcttttgaagaaaggatccactgaagaaaaactattgtaaaggagagaattaggtttagtcaaatagctttggaacttccccactcaaatgttacaggctattgtttcaaaatccaaaagttagtcctctttttaaccaactgaaattctgtttccttagtatagagtctaagtgcctttcctgcagggtggctctgacagggagtacacatgactaaccatattgggaatacttatcaatcaatagcttcattttgtacatactgtttgcaaagcatggaacttggtattaagggtagaaaaagatatgacaagattgaaaaattcggcttataaagaccatcatgtgcaaatatatacttcagacttaccgcagaaaacaagtcagtttgatagcatgtatttcagagattacatcttttagtgttgggatgattttttaaatttttacttctgtcgtctaggccaatctcttaattttttttgcacttttccttttacatatttactgtgtgacttttagcataccattttcactgctttggtttaatttccgttgttggtccttattaaagtaacctatttttctaaaattccgtgttctgcaaagctataaagatcagaattttttctagttctgtgagagacaaatattaaatacagaagttgatagcagggatttatctaaaatatgaatctttagatgtaacatggtgtctttatacatcaccactatgaccttataccttttctatatctaatattataaattaataattgttttcagggcagcagactttttytaaagaatctgatagtatgccgggcgtggtggctcacgcctgtaatcccagcactttgggaggctgaggtgggcagatcacgaggtcaggagatcgagaccatcctggctaacacggtgaaaccctgtctctactaaaaatacaaaaaattagccgggtgtgatggtgggcgcctgtagttccagctgctcaggaggctgatgcaggagaatggcgtcaacccaggagcccaggaggcagagcttgcagtgagccgagatcgcaccactgcactccagcctgggcgacagagccgagactctttctccaaaaaaaaaaaaaaaccaactcagaatctgatggtaaatatttttggttcatagcccacacagtcattgttagccactcatctctgctgtttagaggaaaagcagccatagagaattcataaacaaataaatgatacttatatctcctcagtgtgtgtagatcaagaactagtgtctcatattaactcccttaatataataagagtacagtaggcaggtgaaaatatttgttgcttaaaacatagaggaagtaaatcttggaaataaactttacatttaattttttagattagtaaagttttaatttattataacatgtgttaggtaaattagcttattgaaattgtctctcaggtattcagaaaatagcctgatacagtgatatttctacttctactgatttccggtcacttcacacatttagtgtgtgaggtatcatctccagcattgagatagttcagttttctttctttcttttttcttttctttttttttttttttttgagacagagtctcactgtcacccaggctggagtgcaatggcatgatcttggctcactgcaaccttcatctcctgggttccagtgattctcctgcctcagcctcctgagtagctgggattataggcacttgccaccatgcccagctaatttttgtatttttagtagagatggggtttcaccatgttggccaggctggtctcgaactcctgacctcaggtgatccgcccgcctcagcctcccaaagtgctgggattacaggtgtgagctacttcgcccagccagagatagttcaattttcattgtgcatttgaattattagttttaattcctcacctattttatgttcttggagtatttgcttaatagcatagcagtgtgagaaaatacagtttaccttaggtttatcaggctgtaggctttaatgacgactttagatgtctaccccaaaagatcatataatctgcttccctgtagattgtttcaggccataccgggtgttactaaggctgatgttgattcacttaacaatacctgataaaatgtatggctggatatggtggctcaaacttgtaattccagcactttgggaggccgaggcaggcggatcacttgaggtcaggagtttgagaccagcctggccaacatgatgaaaccctgtctctactaaaaatacaaaaattagttgggtgtggtggtggcacctgtaatcccagctacttgggaggctgaggcaggagaatcacttgagcctgggaggtggaggttgcagtgagctgagattgtgccactgcattccagcctgggcgacggagcgagactctgtctcaaaaaaaaaaaaaaaggaatgactatttatgagttcagaaatgacggtgactttcttgaggctgttgtatccattggcagtactggcaccagctatatctgacsttccatcttaccagagggcatgtgctttgagtagttactgagtagttctagatgatgttggttacatgatagactgaagtattttattaactctgaattcagtctgagaattggaaacgtgctattatccagtgtagactgatggagwtgatttcattttacttttcccctttttgttttcccttctatttaagagctctagtgattgataatgtctttccttatgggaaagattcatttttttacagttttttttcctattcttcttttcctcaatgtggctaaataacactatactgtttcttccctaggtttgaattttgggaagattttgaagaagaccatgggaaggggagagaraatggctaccagagtcttcataaggtgctagagcctttccttctccggagagtcaaaaaagatgtggagaaatcccttcctgctaaagtggaacagattctcagggtggagatgtcagcccttcagaaacagtattacaagtaagttcttgtttgggttaggcctgaaggggttgagatcagtaccatgaaactattagataggagatatatatatatacttttgttttttttttttttggagacagagtctcgcgattctgctgcctcagcctaccgagtagctgggattacagggatgcgccaccacgcccagctaattttttttgtatttttagtagagatgggatttttccatgttggtcaggctggtcttgaactcccgacctcakgtgatccgcccacctcggcctcccaacgttttgttgttattaagcaaaatttcaatactgttgttatgtctaaaaaattttaataattccttaacagtttcgtaatatctagtgtttacattttcctggttgtcatatacatgtatgtatatctccgtttgtgcatgtgccattttgcttgttttgggatcgatgtaagctccgtgcattttgcttgttttgggatcgatgtaagctccgtgcattttgcttattttgggatcaacgtaagctccatgcattttgcttgtttggggatcgatataagctccatgcattttgattggttggtatgtctcttaagtatawtttaatcaatttatttttctttgccttataaattttttgagtcaggaaactgaatttatgttttgtagacttttctcacagtctggattttgctgattctagctccatggcattctttaatattttcagccaggtgtggtggctcacgcctataatcccagcactttgggaggctgaggcaggaggatcgcttgagcccagtagtttgagaccagcctgggcaacacagtgagactccatctctataaaaataaaaaaatttttaaaaaccacttttcctctgaactgtgttttctgtatactcataagtaagtgtaaaggcttgattagactcagattcagtgtgactttagaggcagaggaatattgtttcacaggataaatgtccttttttgtgatgttagtgactaacgatgagcattgcctagatctgttaattcattagagagtacaaaagggtgatattcaaattttatcactcacttgtttattaggtggaatacttttataaaaagaaactttcccatgtcagctgaggaacagttcatgtaggaaaggcagaataagattcttttttacttttgccattttcaaaggaaaagatctacttttcttcaaaggttttgaccaatgagatttactttgatatgattatgaactcatcaattacacctatttatgtttaattctgttggagttaatatccatattcatgctctaacagtcccatttttagctagtgggaactcattcaagttggttgttgtagtccttttgacataaccgtaatagtagttgatagtttctttgctatctggaatgattaagtgttccacatccatcttgtacatttcctgccccagaactagagtcagccatttatccaagaagttctgcatactcctttactaggaaatgatatttgtttgtttctgtttttcctctgaaaatagtttaatactgtaaaatgtaaaaggggaaatagtgttaccttagtaacaacatgaatgtgtcagttggtcagtgctattttgggtgttgattgatcatatgatttttctggcaactctagatacttccagtttacttaagttgatttagttgagtttttatcacttgcaatttaagagtcctggctaatattctgttgccttcaggctgcacaacatgcaggattggggaaagcactagagagccaaagaaagtgagcagagttacttcagggccaccagcgttccccgcaatccctgtcctcaggcataggcccttctgctcttcccactgtagagcagcacccatccccaccaaacctcacttctgggtgtgacttcatagactgtcgtgttctgcagtaccctcgagtccgaggctgttgagtctgaaggatcctcagaagactggcctctttctgatggtttatggactatggcaaagatgaggaaatggtatttggagaccacatactgggccctaggggtgctctttgcaactgcaacaaacatggacagaattgggaaatttgtttttaatggtaaaaatacatgatgaacagtaccacagagattttatttgatcttactgatcttatgccatactaaaaatctcacttcccaaccacaccaagctaattcattctatacatacaacaaagctaatactaccaccaacaataagaatagtaaaaacaggttaagattttctttttttttttttttttgagacggagtctcactctgttacccaggctggagtgtagtggcacgatctcagcttactgcaacaggattttctttttacaggttttgtttttacttttttttttgctttttaaggttatataccacaagaagtggaaaagagttttaaagtactcaagatagtttttcttctgtgtctttaggcaactaatggttacatagatttatttatttcattttagttttgatttttagggattgctttaattttgtttttaaattatagtatttgtagatttccaaaggcaaagctacaaagcctggtatgttcaaagaaatgtagcttcagtccctcttccctccattctagtccatctttccccataggtaattattattattattttttgagatggagtttcgctcttgttgcccaggctggagtgtgattgtgtgatctcagctcacctcaacctccgcctcccaggttcaagtgattctcctgcctcagcctcccgactagctgggattacaggcatgcaccagtacgcccagctaattttgtagttttagtagagatggagtttcatcatgttggtcaggctggtctcgaactcccaacctcaggtgatctgcccccttcggcctcccaaagtgctgggattaacaggtgtgagccaccgcacctggcccataattattattattttttaacattttaatgcttatccttcctttaacttttaattattaaataaaagcaaatgcattttaactttgaatatcctcctttctcttaggtaagtggtagcataccgtatacacttttctctgccttccttttttccttaatgatacatggctgaagagcaccccatagtagcttatagagataggcctttatgatgcatagtgttccattgaggttatatagtatggtttattcaaccagtttccttgtggtaggcacttagattgttttacctacttttataaatagttctggagtgaagaccttgagatagattcctaaagtgtgatttctaagagaagcatgaagaaattgcgccactcaggaaaaaatgtacttttactattttggagtttgtggttaaggaatatacatgggtatacatgaatatatctgtatttctcctccaaatttgggtagaaaacatactgataagttattttgtcagataaaatactcttttacaatgttaaaatgggtatgtagcctctattttatggtatatttacatttatttaacctcataatgttagcttatttccaatttttatatttcagtgaagagtgtttcagtgacagtcattttccattcacacatgcacacacaggttgagtctcttatcaaaaatgcytggggaccagaagtatttcagattttgggatatttgctttatacttactagttaagcattccaaatctggaaatcagaactgtaaaatgctctaatgagaatttcctttgagcgtcatactggcactcagaaagttttgagtgccattttggaacattttagattttcacatttaggattctcagcctttgtgtacacacacacacttaaatatgtataaagtacatgtgtgtaaatatgtaaaatgtatgtatgtatgtgtgtgtgtgtatatatgtaaagcatatgtgtgtgttgtgtatatgtagagagagttgttttcttctagtattcctgtgttcagtgaggttgaaatatccagcagaatctttaacattcctaattctgactggagatgtgaaagatgtatgattagatggcaggagatacaaaagaaaatattctttgctwcttaaacttttttaggcctctttttttctccrcaatactactactatctcttatactcttctgktacctacaactttctgtttttttgtatctagtagtatcattatcattttaatttgcaggtggattctgaccaggaattacaaggctcttgccaaaggaacaagaggcagcacatctggttttcttaatattgtgatggaactgaaaaaatgttgcaaccactgctatctgattaaaccccctgaagaaaatgaaagggaaaatggacaggagattcttctggtaggtagttcctcataattactttctcaaaaaaaacgcttagtttctctaggtgcttttcatcagaatgctctatttccttgttggtgacctatcaaggatcatcaaaggaagctttaaaaatgggagagaaaaggtaactaagaatgatttggaaagtaaagtatagtatcaacagatactgggaaaaagaacatttcgggaattgctggtcaagcaggttgctaagggcttcagaaagctttaagatgatttttaaaatatggatttgtagagattagrgaagattaaaatttgtgtttcaacataattattggaatgtcttttaaatcttcagtccctcataaggagcagtgggaagttgattttattagacaaactgttgacaagacttcgagaaagggggaatcgagtgcttatcttctctcagatggtgagaatgttggatatcctggctgaatacctaactattaaacactatcctttccaggtaaggtgatttcagtaattgctgtggggggaatcaatctctctctccgcctcccctccccaaccttcctacactgggttgtatgctttgcttgttaaagtaggaagtaagagttttcttgtttcaaagaagttaaggttaagattccaggagggtcttaatttttacttgcatgcctttaggctaccatatgaaagtggtcatgaggagacgattctttttttgaaggtgggtggggaggattagagaaagtcaaacggggcaagataaaaaaaggatgtcagatggcatcttattgcatgtgtatggtgaaagtagagaggaagtaagtgtgagctcaattccaggagcccaaatcctagaaggagagggcagtatcagacattccccccaaaagttgaccctggctgtgaggctgggaacatagcagaacactgctacttaaaaccttgctactccctgaagtragtgatgatggcttcccctattttctgtggagttccttaactggagttactgtcttcacacagttatctcctatggggaaaatttcttccgcatagtaacatttttctaggtgtatataatctagtagaaacttattctctgatctatttatagacacatagacatatacgcaatttaccttgtctcttggcatgtttatagtgctttgatttttaagatttattacattttttttaaaactttgaatggatgaactcttctaccaactcacataattatgttgggattgaagaaacttggaccaatgattatctcctaagaaggcccacctttgagactatcagattgattatctttcaaaataccctgaaaggcattgttatatccataatatcttatatggtctttcagttgctgtcttagaatatagcttaaggctgtgcttgttatcaagaaacagcctattgcaaaaagtcacttctstgtcagtgaatcgaatccctatgagctttcattcctaggaaatcccgtgataccaagtaaatcaagaatgcatcgtttttctctctagggaatagataagcttggtcagtgacttttagataattaatgccctctactaatgggaatattaaaaggcggcattaggttttctgatttcaagtaaaggctctgaatctcccattgaatacgtcttcggtttaaggctctgagtagagtagtcagtgagaaagaagtaagggactcctcacctgtcagttgacttgagttaggtctggtgggcaragttctgggtatgtaggcccttccacagagtctgctgccagccaagtcacctttcaggttagttttgccttctgtaaaatgaagtattttgttcatctcaagtggtgattgtgaggggatgaaatgcaaaaatgattttaaagagtaagaaatgctttataaaatgtacagcatgcaggtgataattctttagtattttatgtgtcaatggtttctctatggtgacattgtattgcatgtagaactgacatatgttctaataaaggaattgtgtatgctaataaatgccaggggctttcttgaattctcatgtagtttagctgcttgaacactttactatgatttcagagtgtaatttttggcaaagctgggatatatgatcaattttaacattttcaatgattcagcaaaatgtttttcaaacaaaattattatataaataaatttttggtttgtgtgacactttaagtgatagtttyagccacattagctaagaagcatcatttttctgcaggagcttattattgggtgacccgtggtcctatttcctaatctctgcagtacctacagaaacagaagtaaacccagcctccaagcacaggttgggttttcgtctttctccttttaggtcctggcagccattctgatccttggctaaacctggacagccctttgaatcagaagcttgtaaccttgagtctgtaactggagagctcaggtcgagtagggtagggtgtgcttcttaagcacagcttcttcatagcgctttgccagtgctttgcagttatttttactcagtgggtgttcaggtgataaaggttccaagtctgctgttctattctgagtgtagctgatcttcctatcttacagttttcttgtggtttatttttacagcgtctggatggttccatcaagggagaaatccgaaaacaggcactggaccacttcaatgcagatgggtctgaggtatactatgcatggctttgttatttgagcaacttgggctctgcatcaaggggaaagtctctctcgcttaatgtattctgtttcagaaacaatttatagtgcaattcttttgccttgagaagaaaatgagaaatctctcatataaaagatggtgttttgttgtcactccagaaaaataaatatgtgcttatttatctcccctgttctgggttgacaacagagtggttctcctggtagcttccagataccaaatccttgggcgtggaagagcagtaaggcaggagtaggggagagttgggcaatagaattaatataagaaggttctgatctctgtactcttttggtgactaagtcctgaaaaatatatttgccatgtctcaaatttgttggacttctgatacagtgtggcttaatgttcttgctctcgctaacagcaacattttacaatcagtgtcgagcttggatttggcattatgaagtattttgtttggggggcacatatagaagagctacttaggatgaaatagaaggtatgacaacattgtagtttgtgcatatcaaatcatcagatgccatgggatttgagagaagtgggagagaaaagttttggtgtgaataaaactgtaataatgtgtagagctaaaggaagcagtggagacaacctgaagtagaagtgtttcacagagaatgctaatttctggagcctgagccactacttttttttttttttaaacagatagaacagacttagctttctgaagagctttaaaaactcttgatgcctgtgcctgttactacagaatgctctgctgtctgcctttagagtgtagaaatcctagttagactagtattctggctacttctgtagtctaaacatttacttcttgaggggcttggggcatttattcagagccaaggctctggttcattaaggataagaggaatggaataattaaagacatcggtcatcaactaattcccattcctcctttccttgctccttgtttcctcagctgtaaaatcacaatgattctgataccccacttcataatattgctctgaggattaaatttggtaatcaacataaagcactgatcacattgcccagtgcatagtaagcgctctaaatatctgctatttttatcatgtagtgttggttgaaattggttttgtgttctccactcttagtttaaaaaatwgtatgagtcgaatgtttcatattgccctgtctcaggggaaaaaaaaaattgctttttgcatagctctcagttgattcccactcactatgatggctatatagaacacaagttctctaccatttctgcagtattttaaaaattcctttaaaaaactaaatatttattgtgggacaaaatattatatgcttacttagaatattgggaagatggtaaagaatacaaagaaaaaaacaattgtacccctcattctagacacaacttgctgttcacgtctttggggtgtatttccattcctactagatggaaccatttatatgtttacctaattcggatcatgttgcatacagttttgttcccttcaaaattatactttgaggctaggcgcgcatagtggctcacacctgtaatcttagcactttgggaggccaagatgggggaggatcacttgagaccaggagtttgagaccagcctggtcaacatagtgagacctgtctctaccaaaaaaaaaaaaaaagtttccccatgttattaaagattttacaaaatttaatttctaggcccatagcaagaccctatctctacaaaaaattaaaaaatgagccgtgcatagtattgtgtgcttgtagttccagctgttcaggagacaggcaggaggatcccttgagaccaggagtttgaggctgcagtgagccaggattgccccactgcactccagcctgggtgacagaatgagaccctgtctcaaaaaaaaaaaaaaattttttttttaaatttctaaatttttcttatgcttgtaccatttatttatttaactaccttaccgttagtggcattgagttttataattttttaacctttttcaacttgatcatagatgcagacgacatattataatccacgttatccttgctaaagagtgatatagcagattgttggttgataggatctttttgactccagatttcatttgttttagatatctcatcttaaattgtccactgtttatctttagacttctctttggagtgtggtggtgcttaatatttctcttaagaatcacagattatgtgcctggacactcctgttgatcacttctttattggaattgtttaattaaaattcttgtgaagcagctgtctccatttttatttctatggcataatgttgttgaatgtgactattagaacatggagaccttttcattgcatctctatgtgtatgctaaatatacccatttatcaagatggaactcaggactaccagtttttcaatgctgcttctctctgctacaaaggcatcagcttttgacatatatgattaaattccctgaaaatagaaatatttcaccttttccccccggcttatatattttattctttttctcctgcccccatatttttctgagcactcagacgcaggcaggtgtgctgtgcttgcccagtgtctactgtcaytgctgtggatactgcagtgtcagtgcctgggtggttccacacatcgctctccagccaaacctgttttgatttttttataattttggcatgttttgtggtaattgaggatcctgtggttctcaacacttaccatatatgatctctttagtgcagtgtttctatatttctcgccagcctaacaaacataaatatttatataataaagtatctctgtttatactaactgacttacatggcataatctaccttttccctaaaaataattatacaggtgacttcctggagttaatgatctccatgataattgtttgtctgtttttattattgttgctgttaacttcttgtatattagttgtagccgggaggtagcactaattctctcactcccattgccttattagagtctactctactcctgttcatggcactgactttgcctcttaatcaaatgaaaattcattctaccatcaagtccctgacattcttttagcctccataaagtttgtccatcatatctcacttttcttcacacctgcaggggtttccaggtgtaagggcttattggactgtgaaactgtttctgagaaggccactgcataaagtagtatattgcattgtgtacaggacttctgtttcctgctctcgacaagggctggtggcctgggaatcaatttggcttcagcggacacagtcgtcatctttgactctgactggaacccccagaatgacttgcaggcacaagcccgagcgcatagaattggtcaraagaagcaggtcagtatggagaggcttctggaaattgctttagggtggggggccagggggcttgttcagccctttcaggatgttaataaaatgctttttccctgttttgcttttatttcccctgaagcattgatttctgtttgttaactagcacagagatgttgtctttgggcccaagatgaacctattaaggaacttttctttttctctgtttgaaaagtacaacatcagcgaccttctatgtgtttatcttgagagagatatatgatgaatagacttagaactgaacattttctctattttagtatggaaaagttaaatatcctattgttcaagatggtttgtttttattatacatgacagtgttagctttaaaggtactttggaaaaccacacacttttttgtttatgaatcttaaagtctgttctatattggataacccgtaagtttcattcttggccaaagattctgtttttgtggaactttccatcactgaagcacgatttttattgatggaacaggccataacgacagatctttagaggcaattttatttaagactgtaacctgctgcacatagtaaaagtattgcatctacttaagctgcctgcttggatggcttacagtcttctatggttagagaataaattctgttaaaattttcccctcttgggttttgacagagctaatccttctctctttttttnggggggttggggggtggttcaggcataagcataacagttccttttcctayaggtaaatatttaccgcttagttacaaaggggactgtggaggaggagatcatagaacgggccaaaaagaagatggtattagatcatctggtgattcagcgcatggacaccactggccggacgatcctggaaaacaactcaggaaggtccaagtaagtgccaggaagattgggaggtaggcagaatcaaaytgattctacatcactgttggatataataggattttctaccacagacattagtctgttcattacctggaagatgccaggccagaaccacaaataggatagcattttcactttgagtttcttggttcctttttttgcccatcaccccccttcttatgtgttttcctctctttcttgccctctcccttacctttgcttttggctgctcatgtgacatatgacacagcaacagcagtggagttgtgtgttgggtgtcagcctagcataatgtcacctttgacttttctgcagtgagaatccagattggattggcagctgttttttttttttactattggcaaaaatgtttgtgtggagattgttgtgcttccagaagggtgtaaaaagaaagtaatgaagttttaattggctttgggaagaggcacagctacatctcctataaagtttaattagccaggcatggtggcaggcgcctgtagtctcagctacttgggaggctgaggcaggagaatggcgtgaacccgggaagtggagcttacagtgagccgagattgtgccactgcagtccagcctgggcgaccgataataataataataatatcaaaataataatatcaatattatcaagataataatgatatcaaaataataataaaaataagtttacattttgagcagattgttgagtgtcttctgtggtggtgtttcagctatgttttttgtttgtttgtttgtttgtttttgagatggagtctcgctcggtcgcccaggttggagtgcgctggcacgatcttggctcattgcaacctctgtctcctaggttgaagtgattcttgtgcctcagcctcccgagtagctgggactacaggtgtgcaccaccacacctagctaattttttttttcttttttttttttttttttagtagagacagggtttttccatgttggccagactggtctcaaactcctgacctcaagtgataggcccacctcagcccctcaaagtgctgggattataggtgtgagccattgtgcccgctgcagctatgttaaaggtgtattcaaattagcccttcctaaatraaatgttttcagatagttttctgtttaagaggaagctagatgagaaaagcctagctcttttattttggaccggggttgagaaggttgaaaattcttggtgaattataactttctgagtaaaaggccaaaggaaagagctccattctataacattgctagtcacctttctggcttacccatgcaataggtgaaccagtaggactgtaactaattttctattctgctggtttagggttaccatcacagactcatcctgtagatagaaaatgcgatgtttgagaaatcatttttcttgaggcagagtttatattttcagcagttaacttgacctctttctgaaggatagttattctgaagtagaacactttagaggttatttgatgtttctaacaactacattttacttccacagctcaaatccttttaataaagaagagctgacagctattttgaaatttggagcagaggatctcttcaaagaactggaaggggaggaatcagaacctcaggtaattaacaatgaggagagggaaatttttttgagaagtatgatctgtgagagtctaacttttctgtaagaagattctgttagaggcttttgtaaagaaaaagtaattacttgaaggacagtgtgtttttctttcgtaggaatctcatagctcttaccaaattgagtaggaaggaattaataaagcattcgagtatacttttttgggttgtttttttctcccatttctgttcgttttaatttttgaagtttcaccttgtcatttgtataaattatagtttgagacattagatgtaaaagatgtagagttgaaactgaaagtaaatgaaatatcagaaaggagaattggtttatttgcaccaaacatttttagtaaatacgaataatttctgggcaactaggcaactcatctgttgccattttattctattcgtgttggcttttgttcttttaggaaatggatatagatgaaattttgcggttggctgaaacgagagagaatgaagtgtcaacaagtgcaacagatgaacttctatcacagtttaaggtatgaagatctttgtgggagagagttctcagcattgattcattaatgatgactaatgtttatgaacgctttctttgtgctaggcgctctgcttttctctttacctgaattgagtcatatcctcaatattgttctctgaattgtgagtatgttgtgaatgtasgttctacagtccgcacraaggtaatcactgaagtgggctatcctatgtagagtcagtgtgtggcggaaaagaaatcactgaagagagggctaggtagagagccaggacagagtgtagaaccaggacgtgtggagcactgtgggacacgtcaatagatcagatgccaaagagaggtcaaagataggaaaagagtagatgacaattagaaggttctgatgacttggtgagattttagtttgttttttgtttggtaagtgagagaaagaggtgtcagtggtgtctcatataacagaaaattacatgaaatgaggactaaacacaaaagttgggcaccagacgaataggaggtggcagcacagagtatcaatgttattaaaaagcttagtgaaagagtacagggatgctaaattatatggctagaaggttgaagcaagacaaggtttttgaaagatgttaccatgtttctagtttgaggaaagaacttgagtatagggagatattgaaggttctcaggaaggaaatgatttgatggcacattgccccagaggagactggaagggatacagtcaaaagcacagatggaagacttggccttggaaagaaaaaggacaagtacactttagggaagaggaggaaagagatgctgtgggagtttaatttatgctcttaatgactagtaaagtaagtgaggtgtttgcttgagaagtggaaaagatttgggacagccatggatgaggcagaaagttgttgggaggaacctgatagggagtcagctgaattgagatgatacagctttgccgtggagccagtcagcagggtcatatgactttctccagcaatacttttgaggtcagagaaattggatcagttggctatcccaaggtgggagattggcttgggaggcacaggaaagtcaaaatagcaaaggttttcaagattcatgtgacagcttggaaggaaggattgaccatgggttgattccatggaggtagagaagcaagagagacctgatgattacaatgatggctaagtgtagtatgcccattaggattgaattgaattaggggaaattgtgtgaagtgtttggaaggaagcaatattgtgtgattagctccaaagctggccactggtagaagttgtttcaatggaagarcaaggatggaattgagtgggccagagagccctagattaatgggttaggatgcagaggatggggtagagaagggggaaggtgatttattagtgttcgtcatagtcggtttgggctcctgcagtaaaataccgtagactgggtggtttataaacaatagaaatgtatttctcacagttctgaagatttgaagtttgagatcagggtgccaacatggtcaggttctggtggaggctctcaggttgcagactgctgacttttcttatcttcccatggtagagagagagaagctagagagctctctgggggtcccttttataagggcagtaatcctattatgagggctctaccctcatgacctcctaacaccttacattgggagttaggatttcatcctatgacttttgggaagaacataaacattcagtccattgcactgtttcagctcagttccacctctgtgactgctgctcctttcttcagcaataaaaacctgcacttgtgtaactcttactgtgtttcaagcactatcttaagttaagggccagagtctggcctttaaccacgatgtcccttttggaaaagttaaattccttactgcatgaaccactaacgtatgtgcatatttacatcaatcttaattttagttaattttagccaaaagtcataaagtaagagtcttaacttgacttcactgttggctccaaggaatggagcctccagaagctcatttataccttatgactgtctcaaaggctaggagggagggaataagaagaatgcggagccaggctgggggctgcctgccactgctcagatgctgtccagaggtggtagatgtttctgtgtactcctcctctggttctttgaaatggatacacttagatggcttkctttctgggatacctactgttttagtacaaatacatatcggatattaaataatatttgataagaaatgaagagagtattcttctagatttatttaaattttttctgttttatgttttcattttatttcctaagactaaagtgcacttgtgagcatatgaaatcaccacacatctttaactttcatatttttgataaaaatgaataaagcaaccagttggctagatgataatgagtgctttgagttatgcattgtttcaaatgaactctatacaacttatagaaatgtaagttcatcatggagtattaggtattaagcattttaaaatctaaataaatctaaattttatcattagtattatatttattagaacatgtatatgatttataacagctcattcaataaaacttataaaaacaatttgtatctttgtagctgtttctctgcttttcagtaaaatttatgatgtgatgaacttgaggacttgacaagttgatttttgggggtataaaggaaaaattaatagaaaattgattatctgattatgtaatatcacaaaagtcctattattcacagtgtctacttagataaaaacactggataaattgttttagtagatggtgtttagaaatagggaaatgtcagacaatgggttgtctgttttaaggttgccaactttgcaacaatggaagatgaagaagagctagaagagcgtcctcacaaggactgggatgagatcattccagaggaacaaaggaaaaaagtagaggaggaagagcggcagaaggagctagaagaaatttatatgctgcctcgaattcggagttccactaaaaaggtgatcaagtgagatgaaagatatgaaattatttcttatgttgtgaatgctacagaagtgttgwttattcaaagaagaggccttgcattgttcccctgacacagaggcttcargagcagagttgatactgtaggaaacttaacaaaggaragtggagaaatctgcagagctcctgagcacacctgtgagacatcggatttggtctttgcaaattggctctttgtgaagctgataaacagggtctgaaatttccagaastttgcattttgcctttgagtagtcctyacagtttggctgttaattgccactgccttcaactttcagaaagtcacacctctgtttgtccataacagttcacagcacttgatataaatacttagtaaaggattatataactataaataagaaacatataccaacttgacagttcacaaagctccatcacagacactatctaatttgatttttgtaacaacattgaaataggtagaacaagtttttttacccattttgttggaggtaatagacacagatttgttcaaggtcacagtaaatcagtatgaggtaacactagctaccatttattgagcccttacaatgtgctaggcatacttctaagtgctttaacttactgaaaaccatctgttataggtactattgtcttcatttttcaaatgagaaaataaaggcacaaagagtaaaattacttgcccaaaggagtaaacatgaacctgttttataacgggatattgtaaaaatattcatatatttttaatccagttcacttatcgttatattacaatgtctctgaaagtatgactgtcctaagtgggtatttctccaagacctgtctccccttatttgtcaaaggaaaattgacttgtctgatatggtgagaagttctgaatactaaagaattaagatggccttctcttagtcctttcaccacttgaacttcgcacttgttacagtgtgactttgcctcgatctttctcaggctcagacaaatgacagtgactctgacactgagtctaagaggcaggcccagagatcctctgcttctgagagtgaaacggaagactctgatgatgacaagaagccaaagcgcagagggcgtccgaggagtgtgcggaaggacctcgtggagggatttactgatgcagagatccgaaggttggtggaggctctrttctcactgagcttgtttgaaagtgcrtactgtaagtcttgggttgactggatcctggacatcgtgacagggtaggcagaggctaatacctacaaaaaaggaaagagaagctgggtcctgtcccagatctgtaggatgatccttccttctccaaggtttctttctgttgagatcacttttatttgttgttcatctctctatttctctcttattctctggttattcagaacattttcacaaagttcagctcggggaaggagataattgacatacatgtatatacagacttatgtatctgtatataaaagaaatatcaaaaataaaaatggtacaaataagtctaccctcactacctctcccctccgccacaatcccacttccacctgtgttagtactgacatcagtttgctagtggtttgctttgatttataagtagtatgtacagcatgttgttcagcaccttgctttccccgatcccatttaaaatccattttagacatctttctatgtgagtgattactatacatttcttggtatctgattcaaatgtctctatcctccataaaaaaatctaaaattgttgcttacaaattattttttttccagtttccatcttttttttttaagcctgaagaaaatagaaagtataaagatggttttaaggcctaatccatattataattatattaaatagtcctttaagtttcatgtatttgaaactgtgaggtgtttcttttcacttaaaggtcacacctattcttctttctttgtttaatttactatggaaaaatagaaatatttcaaaatactgacagaatagyatgtaacacatcccctcttgtgcttatcatcttaacaattttgaatttgtagccaaaattgtatgtatatatacacaccccacctcttcttgctccctattcccagtattattttgagaagaatgtgttttctgctatggggcagtatgttctatagctgtatttggcttagtgtttttcaggtctttaatttcttcattgattttctgtatagttgtggttattttggtagagtcagaatcttgctctcttgcacaggctggagtatgatcctatctcactgtaacctcacactcctgggctcaagtgatcctcctgcctgagtgcctttttcactcagcctcccaggtagccaggtctacaggcatgtgccaccatgtctggctaattaaaaatttttttttttggtagagacaaggtttcattatgttgcccaggctggtctcagactcctggcctcaagtatcctcctgcttcagcctcccaaagtgttgggattataggcctgagccaccgtgcccagcctagttgttctacccattattgaaaatgggatgttgacatctctgttactcttatatgatccatttgttcttcaattgttagtttttgcttcatgtgtttttggactcttattaattgtatatattttttataatcgataggtcttgattagcctttttattgtaacatgtatttctgtctgtagtaacaatttttgttttaattcctattttcagtttgatattagtatagccactccagctttctttttgggtatttgaaattttaaaaaatggtatttggccaggcatggtggttcacgcctgtaatcccagcactttgggaggccaaggcaggcagatcgctggagcctaggagtttgagaccagcatggtctcaacatggcgaaaccctctctctactaaaaatacaaaaaattagccaggtgtggtggtacacacctgcagtcccaggtacttgggaggctgaggctgaggcacgagaattgcttgaacccaggaggccaaggtttgcagtgagccgagatggcaccactaaactccagcctgggtgacagagcaaaactctctaaaagaagaaggaaaaaaaaaaaagatggtatcttaaaattttttaaaaatattttttctgccaatctcttttttttgattgcagtatttaatctatttacatttaatgcagttattataaagtaggaattatgtctgcattttgctatttgtcttctatatgtcatgttttttttgtttatttccccattactactttcctttgtgttaaatatataatataccattttaattaccttaaaaaaaaaactatttttttcacttattttcttagtggttgccctagaaattacaagtaacatcttagaacaatttactttgaattaacatcaatttaatttcaatggcattataaaaactttgccccagttatagctcaccatccccatttgtgctgttgtcgcacattacatctttacacattttaaacccatcaatgcagttttataattcatactttatatagttagttgtctcttttttttttttcttttgagacggagttttgctcttctcaccaaggctggggtacagtggtgcaatctcggcccactgcaacctccacttcccaggttcaagtgactgtcctgccttagcctcccaagtagctgagattactggctcctgccaccacgctggytaattatttttgtatttttagtagagatgggatttcaccatgttggccaggctggtcttgaacttctgacctcaggtgatcggtgtgcctcggcctcccaaagggctgggattagaagcgtgagccacccacacccagcctagttagttgtcttttaaaatcagatagaaggaaaagagttacaaaaatgcatgtatactgtttttatatttacttactctattattccatgggtgctyttatttcttcatgtgatttgagttactattttatgtcctttcatgtctgcccaaaggactctcttttagcattttattttgaggcaggtctgctaacaatggattctctattttggcttagctcgcactgttaatttcatcttcatttttgaaggaaagtcttaatttctttttttctgtttctcacgtgggataatctcaattggcctatcttcagatttggcagttctctcttcttcaggctaatatctgctgctgagcctcaccagtgattttttttttcatttccgttattgtagttttcaactctagaatttctatttcactctttaaaaaatgtccgtttttaaacagcatttctgtttctattgatatcattttcgacctttctttttaattctctaggcagactttttttaactcttgtaaatatttataatagctgattagcatccttgtcttataagcctacatgctagacttccttagggatggtttctattacctgctttttttcctatgtatacttcatacttcatactttttttttttttttttttttttgagatggagttttgctcctatcacccaggctggagtgcaatggcgcgattttggctcactgcaacctccgcctcctgggttcaagtgattctcctgcctcagcctcccgagtagctgggattacaggtgcccaccacaatgcccagctaatttttatatttttagtagagacagggtttcaccatgttggccaggctggtctcgaacgcctgacctcaggtgatccacccgcctcggcctcccaaagtgctcggattacaggcgtgagccaccatgcccagcttactttttggttttctatatgtcccgtaatttttcccgtgaaaaactggacattttaaatcatatggcaactctggaaatcagatctcccctcccagccatgtgttgtgtttgccgctgctgttgtatttgcttgtttagtgactttcctgtactagttatctgaagtctgtattctttgtcatgttatgtgatccttgtcatgctatgtgtagtctctactcctttagcttagtggtcagctaatgattgaacagagatttccttaaatgctttgagcctgtaagtctaccagcctttgttgaagggctgggtatgtgttgttggggcacgtttcaatgctctggaaggcaattgacaactctgccttaactttcagttcctgcttgcacagttgctcaaggtctttctcaggctcagacaaatgacagtgactctgacagtgagtccaagaggcaggcccagagatcctctgcttctgagagtgagacagaagagtctgatgatgacaagaagccaaagcgcagagggtgtcccaggagcgtgcggaaggaccctttgagatctttcctctgcatggacacagacctgcacatgtcagagcttttcagagtatctatcctatgaacatctttcctcccagtttttctttttgtctttgttcaaccttttgttatttccagttggtaatgttgcctcaggccgtcatggtgttaaatctttgcatctaattgtttttgaccaatgaattttggacagggctattcacacagtgagttctgggtcagtccaataaagacaagcctgagaatggagcttcttagggtgctgttagccaggtccagtcattctgggggaatagggcttttggagaactctcaacctcttctttaccctccagtggctgctgtgctgctggttacacagctattgtagttgcagaagtgttagttttgaaggctgtcatgcagctggggttaaggggtgggaatagtgcaagttaaaaaatgccttgaagcttgctgagccattttcttgaataaatttcttagatggctgcacgcatttggttaatttccagagttgtgacaatactgattgtgaccgtttatgccagcattcctattgcttttatgggggagcagattttcacagacccttagtctgtcatttcggaagtgttgttatttagacataaaatatttcagtgtctgtcaagaaggagaaatgcagttaaggagtaatcctcaggttttgttcatatataatactttcctaacctttgtatctgcgctgttcctttaatgttgtttttagctattgtcatattcagtcccattttattctgtagccatgtcttctcatttccatttttcccttagcatctgtccttacatggttatataacccaattatcatagtaatttggcatattacatgatgcccttaatgtgtcatgaagtcctggtttttagtggaaagtactggtgaccagcctgtaggaatggggatgatggcatgagttggtatgtagcatagtttagggtagagacttgcaggaagatagattggatttttgggaggagaggtcagtagagtttccaaaattgtttgcctaagaagttttaaatcatattttactgtgccttattccaaaaactatttgagacagtcaaaaaaatcttaacagctgaaaaatcattggttttctaataacgaaaaatatggtattgaaggtaacagtggtgaactgaatacgctgatgaaacgatataagggtttgtcacaatagagtcgtgatgattgaatcctttatgacacagtgaagtctataaacttgtatcttctaaaaaggatattagagctaagtcacagttctctagcatgttatytaagcaggtttatgtacagtcactgagaataaagttgatctttaatttgaatagatttttagcagtcattattttaagttgactagtttcaaagacattcaacatttattcatttttttggtagtgcaaggattgagtccactctatttttgacaatttgcatggctcatatgtcatcacaggatatgctagcatcaacataactaaagtaagtctctgtttttttaatatgttttattgatcctattcttaggttcatcaaggcttataagaagtttggtctccctcttgaacggtaagttcagtgtaatagtcccttatcttcctcttttttgcttttattatatagtacgttcttttttggtaaatttttccatttaatactaatgctgggaacatttttttttctggaaacatttatttacaaacatttatatattgggtgcctgttcattcatgtctctctgcagagggatgacaragatgataaagacaggccatccataaaaagactttcaccttcgtgagggagataaagcaagtatattcaaaaccatagtgcgtgaaataatttccagagagatgttcatgtaactccagttgaaaagaatgtatgtagttattatttgtatcctagttcttagatttaataatgtcaaaggtaaaaggctctttatgattttataatcttctgctaattagcaggattttatgaggattaaatacaaaggacttaacatagccttgactataaaaacttccaaaagggtagctgttgttactattctataagcatttagaaaataattcagaagttagattttaacagaagactctatttgaaatggttcggtactttacttcctataaaatctaaaaagccctaatttaaaggaaatactgggctcccttctctttcttctgataaacttcttgagtgggtgaaaattacaagcctgtttttgtttggtcctctccatttggcgaggaggtagtgatgtgtagcattaagccacagcaaggccaagaaggtcagttgcatctttccaggactattgctgaccacccaggggtagactgtctgtttttgggccagttaccgtaaaagccaatagaatgtggaaaagggggcttgacaccttttgacagcctgttttttagctgttaatgtagttgtgtgcttcatatgacatggagatcaactaaacatatagtagaagtagctatactctgcttctaggagcattgcagtgaatgaaagtaggctggagaaaggaaagtgaacacaaaagaagcaagctagtacggatggtgttcaggcacttcacctgctgccactaacagcctatttatttaataaactttgctttgcttgtttctttctttcctctctgttttttggaattattttgttttgtggaatattcaagacacaattctttatgatggaaaatgaatgtgttagccttcagtcaatgtccaggggttcttgttggagccttagaatgaccactaaaggaacgcaaagaaaagtgtctttgcaggagaagattatgtgaggcctastggcatctcatgacacttaagaagagtgggcacagggtcctaaagtgtccccatatttgttcctcctcaggctggagtgcatagcacgtgatgctgagctggtagataagtcggtggcagatctgaagcgcctgggtgaactgatccacaacagctgtgtgtcagcaatgcaggaataygaagagcagctgaaagaaaatgccagcgagggtaagcgaagttggctttagtgagtcttcgcaacctggcactcttggactggatttctgttgctaaagggcgttttaaggacaggcttgaggaccacacatgcctagtgatttcaggtgtttattctgagctgcgtttctgtgagcttaatattctactctcctacaggtctactyacaaatgaagttgatttgcagaaggtgtagagtgaagaaaaagatgaaatggtttttttttgtgttgctgtagaaagtttaaattcgtcggagtgatgtaaaaacccaggggcagagcttggtggacacctctgtattttggctgcaaataagaggtgttatagatcacaagcattgttaattatcttggatatatattgtgcgttatggcaaacacaaagkatttagagaattaattggaataaataaaatattggatgaatatcgtaaacatttttgggttacgttgagattttcatgccactagaatttgttctcattggattggacatgcagtgtgttttctctttgataccagaaagtgattttgcctgtcctgtgtgatatctttaaaagcaagaggtataggaatgcttgtgaggagagaactctgaagtagttattggtaaggacaccctcayagtgaactttaaagaaacgaagagaggccaggcgcagtggctcasgcctgtaatcccagcagtttgggaggctgaggccagaggatcacttgagcccaggagttcaagtccagtctgggcaatatgtaagtgagaccttgtctctacaaacagtttaaaaattagccgaaagtagtaggatgcacacctgtaatcccagctacatgggaggctgaggtgggaggttcgattgagaccaggaggcagaggctgcagtgagttgagatcatgccgctgcagtgagttgagatcatgccactgcacttcagcctgggtgacagagcgaaaccctgtctcaaaatataaataaattaattaaaaaataaagaaatgaagttattatcattctacttctccagactgtggtttatctgtgccatttctgcattttttggggacagcctttacttaggtaaggctacccttctgcagctttgttgagctgtggttaaatcttcaggctccagagaaagaggcagtcagttatctggaattttggttctaccacttctagttataagactttgggcaagttatatcccttcaactgtctcatttgcaaaatagagtaatagtatctacttcaaaggatttggataattgaataattccatacttgtaaattgtttagcaatggcgtctggcttgcaatgttagctgttattaagaagtgagtatttgtgctttgaaattttctttttttctttttaagattttaataataaaaaattattttattattcaataataaccttaatattattgaatttgatataatttaaaaatatcttcaagagagtcaaaacttattttaagataatgttcttttttgtaaaagacaaataacttgtatggtttgcaaaatgatctgaatatgtgcttttataacattcagaatacacccaaaagtaaactttaggtttaatgtacagtatgttttctatgtaattgttttgaataagtaatacatctacatggcttaaaactgaaaaacgtattcctgttacttcttgatgcttttgagaaatgaataatgttttctcccttttaaatrgtagtacagcatgcacacttttctgtgcttgcttttttatctcatagtatcttgtggagctgttttcttaacagtcccttctccccaaagtctcccttttttttgtgcatgtccacattctggatctggctgattgcttcttcctggtattaacttatttcctcacacctgtatttcctgtaaactggtattcagcatattctgaatccaggctgacatttctagatcaaatggaagattattgataccttttttcccttaggttgaaatttttgtttctaaaaatgttaacataattacatatttgctttatcccaaacatatgtttccaaataccaataccaatcttactgttaacaaaagaatgctgaaatgcgaagtgtgatttctttgcatttctttttgatcttagaatatatcacactaacaatataaagtcaaaatatatgtttaaattattcaaagttattcstttctctgtgtggttaatgccaccaccttaatatatagttagactcttttgttttcatttattttcagtacttagggactgcttttctcatttagattcgatttaatttttttaattatgtaaaaacatttacatggttcaaagtcacaactataaaacaaggtacatttggagcatcttgttttcgttttttgttccccagctgccttctcttcctcctyaataggtcactgtttctattagttgtaagtttatctttgattgtttcttttaaaatttaagtgtgtgtgcgtattttccttcttacacagaagagaacatactcttttgcacctgcttattttcatgactgagataaattcatatcattatgtagagatcatcctctttccttttacagttgcagagtattctaccatgtagatagatgtcaattcacacttcccccctagtatttaatatttgggttgttttcggtcttttgttattataaagaaagtcacaatgaataatgatctaatgaatataccatttcatatctctgccagcatatctttgggataaatttctagaagtgggattgctgggtcctgggaaaatgcgtatatactttgcttcgatattcccaaatccttctgcataagtctggtgccacaatgtttgtcacaagcctcacaaacagaatatattgttaaacgtttggagttttgccagtttgataggtgagaaacggtatttcatttttcttttaacgaacaaggttgtacatctctaagggtcacttgcattttgttctataaagtgtctattcatgtgtgctgcccattttctattgaaaggagttttcctctcacaggtagcattatctcatggatttcaagttggactatttggttggggcttcatttttacttctgtgatcattttaatttgaaatttgggttagggtaagtttctttttttttttttttttgagatggagtctcgctccatctccaaggctggagcacagtggtgtgatctcggctcactgcaagctctgcctcctgggttcacaccattctcctgcctcagcctcacgagtggctgggactacaggcgcccaccaccacacctggctaatttttttgtatttttagtagagaaggggtttcactgtgttagccagtatggtctcgatctcctgacctygtgatctgcctgcctcagcctcccaaagtgctaggattacwggtgtgagccaccgcgcccgcctgggttagtgtaattttcttaagccaccacttgttcatcatttcacatgtgttagatgtgaacttaagctcatgtgttttcagtaatagtgttgtgaagatcaagttcatttttaaaacacttgagagttttttgaccttcgctagtgggatgggtaggaaaacaaaaagagaaaccttcagcactaatattataccctcagaatctacttttgttcatttggaaacaaagtagtataaaacaagcaggaagattaaaatacaactataaacatcagtgaattaaaaaagaattccaaatcttaaaagactgaatgttcagaggttattttacagacattagttgagaaaaaaatttgtcttatagattatatcttcaaaataacaataagccagagatayattcagagagactaagaggtcagggttcgttgatacatgttttctgtggaacttctgcagattttcatttaactaatrtgaaactggtatttttcaggaaaaggaccagggaaaaggagaggtccaacaatcaagatatccggagttcaggttaatgtgaaatccattatccaacatgaagaggagtttgagatgctgcataaatctatccctgtggaccctgaagaaaaaaaaaagtgagtatattttgtgtacatgcttagatggtcgtaccgtaagaaaatagatttgaagttagactttgtgtagttccatagtatttttactgtctcttctttaacataccaaaaaggcccctcttctaatgtcttcctgtttttaaactttctttagatactgcttaacctgtcgtgtcaaagctgcacattttgatgtagagtggggggtggaagatgattctcgcctgttgctggggatttatgaacatggctatggaaactgggagttaattaaaacagacccagagcttaaattaactgacaaagtaagtaaccctaccatgctagagatttctagaagatttgttgtgtaatatttttatatcgattacttatttctaactattttcgagggggcatcaaattagaaattagtatagtcattcttrgaaatacttccrtctttagcagattgtggcactgtttcacggatgaagataaagggaaaagacagtagccaggtgaaattttggggaaactgtaggagaaatcttaaaattctggtatttaattataggtcagatttcattacaataaatacccaggtgagtttgttaatgataaaagcattccttggccttagttattggccctttgtttaaaagtacatttgaaacaaccatatttcayttcctcacgtaaagattgaatgtcaccttggtattctttgtaatggaattaaacattggctgttcttctcccacaaaatcgagcctcccaccctatctgttgcaagtagcaaggccatggttggagctataagcagggaaggctgactggctcaaattttggtaggatttgctccatgttgtgctcctggcacgttcaacagtgctcatcccatctggttttaggagggtgacagcaccctgccttaagcactgagaccagattcagtctggcaagagacccagttgttgtagcaaggaacagatcatgtcctggcgtagctcagtgctctccggcaatgctctaagaagcattttcaatctaaaacgaagctttaacctagctccagggattccctgctcctggaaggaggaaatccacgacggctgggatgctctagcagatgaagccacaagcccctcctacctgagttgttctaccctgttaacagcacaggtaggagccattgggagagctggatttctccatcccattttgtaaaatgagaacggctcgtgagggattttcagtgactgggagccatggacatgagataggatctgaggctttatctatattttgggtggttggggagggaaaggactgtgctcagtttttgttgtctctgtttatcctgatccactaaccaggatgtgggtggtggcgggtgcttctcttcctttcttgttgaagattctgccggtggagacagataaaaagcctcaggggaagcagctacagacccgagcggattacttgttgaagctgctcagaaagggtctggagaagaagggggctgtgacaggtggggaagaggtgagtacgctgccagctggttgtttttcaggggcctgaggctcctaccctgcagaattaggtaggaagagagaggccctctctgagcactgcacagaatgtcaccttctcatgggcatattttgtttttgaggttccagtaatgatggtttgcttggtaataatagaaatgttcatttaggcctggcgcagtggctcatgcctgtaatcccagcactttgggaggccgaggcgggyggatcacaaggtcaggagattgagaccatcctggctaatatggtgaaaccccgtctctactaaaaatacaaaaaaattagccgggcgtggtggcacacgcctgtaatcccagctacttaggaggctgaggcaggagaatggtgtgaacccgggaggcggagcttgcagtgagccgagttcgggccactgcacyccggcctgggcaacagagcgagactccgtctcaaaaaaaaaaaaaaaaaaaaaaaaaaaaaaaaaattcatttaagaccacggcatcttggcagctttcttacaaacccatccttctgaaatgttgcttcaaattcatcctctgctccccagtcccactattccacacatactgttactgtttctttatcctactttctcaattttggaacatagttgcagttactgcattgaatacctgtgggtttgcctgttgttctgtctgtctctgtggttcttgtaatagtggatcccagagataaaatggacagttgtaatgcacagttaattcagaaactagaccttacttgctgtgtgaaataccaactaaattctcagtgaactcagctgagctttatctccttttgtttccccaatttataatttcagttcaggcccagaaagatggaatcccagctaagaaatacaagttacaccctgtactagcagcccatgtgtgcatgttctttaagtgctcttgcagctatgtcatttatattgatttccctgtattattataagcaaagcaaatttgaggaaaaaaacccataataccacacctcatttttttcaagtaatagggtcataagtctcattcttcatataatatgttgaktatgcaatatattatgtgttaggctctggaaaggcagaggttagatcatgttacagatcatatctgattaggcagataaacagtattttaaccttttccttattatatgtaacttgctttcaggttttttaatgttactattatgtctttaatatattatctttatttgtacttttgtatacagagtgattttccttttttaaaaaaaattgtgtctttaggatggattccaaagatgtggaatcagtaggtttaaggaatatggatattttggctggcaaggtggctcacacctgtaatcccagcactttgggaggctgaggtgggtggatcacctgaagtcaggagttcgagaccagcctgaccaacatggcgaaaccctgtttctactaaagacacacaaaaaattagccagtggtggtggcatgtgcttgtagtcccacttagctactcgagaggctgaggcaggagaatcgcttgaacccgggaggcagaggttgcagtgaggcaagatggcacctctacactccagcctgggtgacagtgcaagactccatctcggaaaaaaaaacgaaaaaggaatatggacattttawtgtggtataggccatgtataaggcctataggtttttatttgttttggtttggtcttgtgaggtaaaatgagttgcactcttttgatttctttggaattttcttgtttgaattatatggctgctactgctttaaagagtcatcatgttgtttggttatgcttttgagtgtcttgatttgtattttaatcatcattttctctccttttccaggccaaattaaagaagcggaagcctcgggtaaagaaggaaaacaaagtgcccaggctgaaagaggagcatggaattgagctttcatctcctaggcattcagataatccatcagaagagggagaagtgaaagtatgaagtggggtttcggttgagggttatttatttattttagctatacttatcatgccagctggaataaaatcatctgaaatgtrtttggtttacgagtggattaaatggaaatagaatatgtaagtcttcgcttaatctgtcagcgaggatagtttaagtcagcaactgcaaatttgtacrtaatggaagtaaatgaaggggactatgacatttttgttgttgttgtttgtttgtttgtttttgagatgaagtctcgctcttgtccgcgaggctggagtgcaatggcacaatcctggctcgctgcaatctctgcctcccaggttcaagcaattctcctgcttcaacctcccaagtagctgggattacaggcacctgccaccacgccaggctcatttttgtattgtaagtagagatggggtttcaccatgttggccaggctggtctcaaaactcctgacctcaggtgatcttcctgcctcggcctcccaaagtgctgggattacaggcgtgagtcaccgcgcccgtcctaaagttttaatgataaatggcgattgacacgtagcctcattcttgcaaatgacggggagtggtcaggactgtggttaaccagagagctcatgcctaatgtaaagggggcagctgctatggagttctgttaacaaaactcctgtgggtcaggtttggcttgccagtttgtaacctctggtctaagtaaagtgaatagtaagttggtatcatttagtgtgctatttcagtgacaactttatggaatttctgagagtgtaattgtacttggatattagctscaagaggatcagcagtgtgtacaggaactagcatggatttgagtcatacatacagatatttatttatttattatgagttgctttttgagatggagtcttgctttgtcacccagggtagagtgcagtggcgcgatctgggctcacagcagcttccacctcctgggttcaagtgattctcctgccgcagcctcccaaatagctaggattacaggcacctgccaccacacctggctagtttttgtatttttagaagagacagggtttcaccatgttggccaggctggtgtcaaactcctgacctcaggtgacaggtctgcctcagcctcccaaagtgctggaattatgagcatgagccactgtgcctggccaatacatacgtacatttaaatactagcaacctaatcagttattagctgactttgtataggtatataatctctttggtactcagtttccatccgtgaaatgagaataataaacttacgttgaagggttgctatgagaattaaatgagaggatatcagtaaagagcttctgcctctacagttgtaactggttattactggaaagtttagacttctctgagtcccttgaggctatttgcttgaaaacaagcttctaagtatagacagtgatgaaccactgggggcagtgcttctttttccagaaagtacataagtagatataaaatttgtagcaaaaattcatagccctgttttgtttcctaggatgatggcttggaaaaaagtccaatgaaaaaaaaacagaagaagaaagagaacaaggagaacaaggagaaacaaatgagttctaggaaagacaaagaaggggacaaggaaagaaagaagtcaaaagataagaaagagaaggtaatgatgcccttctgttcatgcagrtatccacagcctttgcaattcgccrtttggatttagaagtagaatgagatttgagggccctggaataattgtctttttatgggtatgttcaagaaggatgggtggggccgttgatgggatacctgcacctgtccttgcagagagaggggaacctgcaagtttggggtgttctttaaaaaagaaggcctttacttggtcttttatgacatatttcagggggaaatgtttgaatgagataggacaggtgagagaaatckgcatttacatgtaaatacgaaatacgttctcagattcatattagaggagcacaatccacaactgaatttgaatacttgaagagtttgagtcaaaaacaaataytagcaagagttattggaatataaatggatgaaaagccttgctattataacctttacattaggggttttatgaagttcattctaaaccaaagaatttggtacagtgttgcagtgtatacttgctgacctctgaacacagtaaaatcattgccaaaacacaaacaactgctgtaattctaatatccagttgataactctaatagatttcttgataagtgcctttgaaacttttactttgaaattttatattaaatataaaataaacttctatttaagaacaaatataaaaatcagattaggctgtttgggtagtttttcctcctcacttagcagtatatcacaactttccaagtgattaaatgttaaagtcatttttacagccttggcaacgtagggagacctcgtctctacaaaataaaaacaagcaaaaatctagctgggcattgcggcatgtgcctacgggcccagttgcatgggaggcagaggtgagaggattgcttaggcccaggagctcgaggctgcagtgagccatggttgtgtsacacttcactccagcttgggcaacagaggaagaccttgtctcaaaaaaaaaaaaaaaaaaatcatttttaatagttggggaggattctgtttgggtgtaacatgttagaagcaatttgaatttcccattttgaaatactttctaatttttgatgttaatagaccatactgtgataaataacctgtgcatttgtgctcccacagaaagacattatttttcttaaagtaaaatattaaaaaaataaaaaaagagcaattttagcaaacatctgtttatccactctccagataccacaactgttgttaatattttttcatgtttactttaagtggctttttttttttttttggcggggccaggcggggggagacgctgatatcttttgtatttcatgaacatatgactgatactgttgaagctgccccctgttccctttccctgattttattactcttcctctgttttccccataaccactactgtgaagtgggtccgaaaccttcctgttcatgtttttatatttgtagtacatattatagtgtatatccatataactataaacaaagcatactgtatgcttaaaaatgtacatgaagtcaagctaggcgcagtggctcacacttgtaatcccagcactttgggaggccgaggtggacagatcacaaggtcaggagtttgagacctgcctggacaacatggtgaaaccccgtctgtactaaaaatacaaaaaatagctgggtgtggtggcgtgcgcctgtaatctgagctacttgggaggctgaggcagaagaatctcttgaacccaggaggcagaggttgcagtgagccgagatcatgacgctgcactccggccaggatgacagagcgagaatctgtctcaaaaaaaaaaaaaaaaaaagtacctgaagtcattttatatattcttctgcaacctttccttcaatgtaattgagatttgtatagagttcatttacaataatgtagttaatacagattcctaaaccaaagggtatgctgttaataaaggttgctacatgatactctagagagttctgccaatttacaagcttaacctcttgatgacatttctgtgcattttacggataaaggagtaagaagcccaaaaatagcactgatgaaattgaagttataattgggtacatttagagatggaaatgggaataatgtgtgagtaagctgctaatcagacaggtttgtcttcatgatgtttcaggattttattttactttttaaaaaataaactgagaccatcatatttacccattttaataacacaacataggtaagaaacytaaatcgcacggtaggattgcacaaatgacaatgactccttgtaactcttttttaaaagcctaaragtggtgatgccaaatcttcgagtaaatcaaagcgatctcagggtcctgtccatattacagcaggaagtgaacctgtccccattggagaggatgaggatgatgatctggaccaggagacattcagcatagtaagtcttgaaatcggggggtgccagtgtctgcagccgcggtacttgctgtggctctgccttttataggtccagccagagcttcagttgagctaagcaatagtacattacttgggaaacacattgcttacagtatcggaagaccatgtgctcttcagcaggctggcaggaagagattttcttgtcttttattgaggggaagtttaaggagtggatttcatgtcttgtgctcctagttaagagaggctctcagggcccttagaggcatttgggaaagagaagtgttcactgagcaagtatttattgaatgttttctgtgttccagcccccagagttaccatgttgaatagataaccatttctatcatcgtaaactgtacattggagtaggggagttagataactacacaaatcatgttggtgcccctgtgacagggctctggaggagagagagtgcatactgtggagatcctgtgagaagggaatttgacctagtcaggggttgccaggagggcttgtgtaaggaagtgatgtttgagttgggttctgaaggaagaataaaaggtaacaggagaagaggggagggcaaggcgatggggagcgagtgcatggaccaggtcttgcacgggattggatacaggccagtgtgtcctcaaggtccctttgcccctggctggagctgcaggtatagatttcactgtgccaccatcccttccccacctctctgtggtctcttctccccatacttccacaaatccattaatcaaacggctcattcaggctgaaagaaaaagcggttttctttcaaatttgaaaatacttccatcctgtggcagcaaaggaccctgttgaccctgtcctgtaacctctctctgacttctttctctgagttctctaaaacctatacacgtatgtatatagatattgttttctttgcacttaactctgttttcttaagtctcttttttgcctgtgagctctctgaggacaagtattgttttatataaaggtcatttagatgctagaagtatatcaataaatgagtaaattgaataaatgaataaactaattacatagccagctaaccaatctgtttcctagtctttcttttccgagtgtttataagagaaaatgatatctaatgttctatggtaccatgatatttaaaaaatgctcttacaaatgactcatttaatcttgtttttatattatgaaatctttaaaagatgcagagaaatttcagggatataatagtcattgataaatataccatgaagttttgtcaaatctgaatttttttaagactcaaaatataaagctgaatcccttggtgttcctccctctcaacctatgctttttctgtctctctctctcttttttttttttttttttttgaggcagagtcttgctctgttgcccaggctggattgcagtggctcaatctcggctcagtgcagcctctgcctctccggttcaagcagttctcctgcctcagcctcctgagtagctgggattacagatgcgcaccaccacacccggctaacttttgtatttttagtagatatgaggtttcaccatgttggtcaggctggtctagaactcctgacctcatgatctgcccacctcagcctcctaaaatgctgggattacaggcgtgagccaccgcacccggccttttctctctctcttacctcccagacgtaaccatgattctgaattcgatgtttatacttaacgtgtggttctagagttttactgcttaagtctgtaaagatgataatagctcacattaatagccagttactgtttatgtgctttatatatattttttccacaacactcctgtgaggtacgttagtgtttccattttacatatttaaaaataaggtgaagagagttaagtgatttgccctgtgtcacacagctaagacatagaacacagttttgacccaggcagttcggcatgagaggttgggtccataaccattgtcctacgtagcctcccacatataaacaacatagaggattgatttccatgtcttaaaactgtaattggcacttgtgtatcctgtaacttgcttttcctctcacagcagtcacatttgttgagatttatctatattaataattgtggctgtcatttaagtttcatgttattctacaatttattcttccacagtttaattttttcccgtattggtggacatcaggatttttccaaatgtttgctactacaaataggctacagtgaaattgttgcccatattttcttgcactacacaagtgagaacttctctagggtgtatggcttgagcaaaaatggtgggtcattcattaggtgtacacatctgccactttattagatactcgagttcctcttgaaagcagttgtagagattgcatgaattatagcaatgaattcaagttctgattgctgaccagccttagaaacagttgttaatttctgactcagttaacagttgttaatttttgctaatctgaggactatgaaatactgactgaaggtcgttggacatttattttcatattttagtggtcattcatgttccttgtgaattgcctattcagttattcaaaattgacatatttggaataatttatctttcttaccttttctgtaggaattctttttacattcttaatactaatcttttattttttatagtcattacaggtgtcttttagtttttggtatattttttattttatgtcctttttaaaaattgaagtataacacagaaaaatccacaaataataagtatgtagctgtggaaatgaccacaaagtgatggggaatttgtagagttttcattatttgaaaatttcatgaccatgtgtcttacttagttcattgtgccagatactcagtggctgacaaccatgtccctacaccattctgtgaaattttcttgaattatatggtggtaattttctctaagttcccagttttacctttatggaatttcttgtgtttggatatcgaattctggatattggtccctaattttactttttaagttgttcatttctgctttttactctactttctgggagattgcttcaactttgtttcacattatttctttccaagatctttttcctccacygctctcgaatatctttatacttctctttgctttccattgttcacgttacacactttgcttcggtggctttgctgaccctcagttgtcagctcatgtttaagagtggaggacgaaacatgtgattggaagtttgagcatgtgggtggtggggcttgatctcctttgaaagttttcattataggatgatgtagcagaaacttctgacagatagtcaggatcatttggtgtttcctctggsgcggtcacattttgtgaagaatgccccagtttcctgactctccagagcgtgaaggcctggctccatccactctggaatgtgagaggcagagacctgggtgtgggtcatcctgtgtgactgtgctcatgtgctcaggtaatcctgttttcagtgtggtgggctcagccctcatctgtgcctgtgcagtcccgctcagaggtycttttatccttttctggagaataagtctttatatttgctgctggttggagttagagatctgggtatcttatgaatctggatatgtgttacttcttaagcagtttttaaaccgctccccattttagccctcatccttccttctgaagacacctcgccgttgggggaattttgccgtgtaagtcaggttagttctaggctgtcttccctcctggcttcgaatttcattttctcaggtctgttttgtcatttcccrtgctgccaatattttgttgccattatcctctctcttgttttctcttgtctttgtgggcttgtctcttttaaggacagtccctttaccattgttttagtgggattggggaggcagagaaaagatgcttgtgttctgtttaccatcttatctggaagcctttctcttgctttctttcaagcctgaaggatttgcaaatattatatcccgtatttttagacagtttctggtgggagaatttcagattaggtctgtaatactgctgctcattagatcttcaaaatgggcttgtgaggcatgccatgcctctcttgcagatgaggaagcagtatttagagaggttaagtaaggcgtgaagggttatcacataactctaagcgatggtgctggcactgcacttcagggttttctgacttgaatacttacacttactccactgcactagctttacccactcttcctctagcaattatatggcataggggtgggctgtgttttcatcgagagcacagtaagcaaaggacaagacttaytttctgcagattgtttatrtctttactctgttgtcctgttgcagtgtaaggagaggatgaggcccgtgaaaaaggcactgaaacagctcgacaaacctgacaaggggctcaacgtgcaagaacagctggaacacacccggaactgcctgctgaaaatyggagaccggatagccgagtgccttaaagcctactcagatcaggagcacatcaaactctggaggaggtaaccactttggcctcgtctgcccagtttgatttgactgagtgtgggagtggattctgttttcttttaataaaaggtggcatagccacctaagaaatctttytcccagcacaactcatctattggcaatatacctgcaggctttaactccctttccatgaaataggccattccactragaccagccttttgaaggggtaggacgatgtcattaatttattttatgagagaaagatagtgttactggatttgctggtctattctcagaaataaattttctttaagcctacaaggggcaaaaatcatctggtcttaactactttacccatctcaggttgatatccagatattcagatattactgtatctaatacaactaattggttggttctgtaccaacacatggtgacacaaagattaaaaccgcaagaactatgagttctctattctcatatgcttttttagtaattaaagtagtaatttggattaagttaatctagaacttcagtgtttaaggcatcatggtttataaatgttcctttatatagccactgaaacttttttaaaagatttcaatagttttagggaaacaggtggtgtttggtgacatggataagctctttagtggtgatttccgagattttggtgcacccatcacccgagcagtgcacactgcacccagtgtgtcatcttctatccctcagcccccttccccccagagtccgttatatcatttttatgcctttgcatccaatgtttggttttccattcctgagttatttcacttagaataatggtctccaattccattgaggttgctgcaaatgccattattttattcctttttatggctgagtagtattccatggtatgtatgtaccacattttctttatatacttgttggttgatgggcatttaggctggttccatgtttttgcaattgcagattatgctgctataaacatgtaagtgcaagtgcctttttcatataatgacttcttttcccctgggtggatacccagtagtgggattgctggatatatatccactgtccactttggatattttaagaaaacatgactggaaatttttttttttttttttttttaaatgagacagagtctgactctttcactctrtcgcccaggctgaagtgcagtggcacaatcttggcactgcaacctccacctccctggttcaagagattctcctgcttcagcctcctaagtagctgggattacaggtgcctgccatcacgcctggctaatttttgtatttttagtagagatggggtttcatcatgttgaccaggctggtctcgagctcctgaccttaggtgatccgcccgccttgacctcccgaaatgctgggattacaggcatgagccactgcgcccagccatggctggaaattctaaaaggcaattgtaacattaaatctctttccattaatcacagttacttcgtttttattttattttagactcagagggtacatgtgcttgtttgtacataaccacagttactttgaacttgtatatagttcatggataatgtgattatctttgtataatatgtccaatctcagaggactggtttttgagtgaaaagtggatttaagaaaacttctgcatgatggtgtccacagcatgcttcacacctataaagaaaagatttaattttcaaaatggtacttttttttccgcttaacactgttaccaacttctttctttacctagcggcatctggccttttttttttttcttctttttaaatttaacactgattagaagatagcaaaaggtcatcccagtgaacagacccatttttaaatgtgccaggcactgtgatcttggctagcagtagtttataaggtcctcgccctttacaagtcaaaaaagtagtacaaggtaagccctcggagaaactgttcgtcatgaggcagcaaatgcaagcccagatagagtggaagtgttgagaaggaagtgcgtgaagagtagtcaggaaggaaggtcttctgagaggcaggcaggtgcacttgaactgagcatacatgagctgagtcgaattgctgagatgaacagagttctcaggcttcagcaaaggcttgaaagtgggacagggaggggactgggtggtgttcaggatttaaagacagtttgctaaaaagactgaagctctttataggaggctttagacaggaaggtaaatggctcttcacctgatgcagcaggcttactagttagggagcctgtacaggtggtcctgtcagcagcaagccatggtgaaactacctgttaggaagtttgagaagatatgagactcctttatctggctcactctgactacctgtgcttactctttctaaacacctgtctcatcatatcattcccctgttgcgcagtaacaccatgctagggtgaacataatggaattggagggaaaaagccactgagagttttaaggaagaaatgaaaggttgtggtggcgacaactgggaggaaggaggggcagcaacacagagatgaccaactgaatggaggccacaacctgggagatggtggtgctgatggatttgtggtagagtccagaaagtgaaggaaaacttaaaaggactggagtctggggtgtcattgatagaaatttggaggagttctaggtattgatagagccttagtctctaaatccctctgtcagrctcttttggcagaaccatgtaaaggtgtacggtaagtcctcacataacgttgtttccttcagctttstttcattataacattgatgagaaaaaaaattgattttgtttccyttaaagttgcaatttccaagaacctatcgacaacattaagttaggacttactgtattattaatgcaaatacctgaaataatatttctgtagcttaatttctrtgcttagggagtataccacagcaaaatttaatagcttgccatccatgaagatcataaaaaattgcttttctaattctataattcaccagaactgttcatttttctttttaggaacctatggatttttgtttccaagtttacagaatttgatgctcgaaaactgcataagttatacaagatggctcataagaaaaggtctcaagaagaagaggtaaagtacaaattcagtcctaattcatacaaacaaataccarttccacagaaaaatctcttaatttttgtttttccatggggagatgatcacagaatcatgggttattgctggtgctaatagtcaaacaataagaccagatgggtgaaatagccaatgtattggagcctaacatggttgaaattctgacaaagagtgtttaccctgtgtttttaggtcctaaaatcatttgttcaccaggttttttcttccatttgcatttttcttctgtacatgtcagtagcttataaatgtggctcctaggaagtaatagggtggtgggcagaaaatactttttctcttcttttctggaccatctatttggtgtccttccagcttttgtatggaaggggtcctgctactcacttgtgagaggtgctcagaagttgcctctcctttggaatagggggatgggtgcagaagtgacatggaggaggctgcagaggcagtgctccttgtgtgggtgtgcccatttgcagatctgctgacttgccacatgggctgtacccaagttggacattgagttcaatctgtgagcattaaataccacctccactaatgcgtcagctccatgaagacagagattttatgtctctcatctactgctgtgttctcagcacatagaatggaatagaatggtgctggggacagggaagcactcaggagtatttgttatgctgtgcccagtgctgtgttggcctgtgaagcagcaccctcaagtagttgatratttaattttacatggaagaatatgttatagcagtaacatacaggaatcatatactaataagcattataaaaagtctataaatggatagtccggaaaggccccaggagggaatgaaatagttaggaaaggccctttagaagggagtgaaaattaggaagagggtctgaagttggacacataatcatgaaagacttcattcatttagggatcagaatgaataacaaaacagtataagctgaataacaaaaacagtggtatcctactagtgggagtatacattgtcacaacctttctggaggagaattcagcaagatttattaaaagactaaagcatgcagttttgcttccaggaatttagttttgagaaggagatagagatttaaacatgtttataatggaaatggcttggaagcccaacagtaagaaatacattcaatgtggctaggcgcggtggctcgtgcctgtaatcccagcactttgggaggctgaggcgggtggatcacttgaggccgagagttcgagaccagcctggscaacgtgatgaagcctcatctctacataaactacaaatattagctgggtgtggtggcacatgcctgtagccccagcccctcaggaggctgaagtgggaggatcgcatgagaccaggaggtggaggtagcagtgagctgagatggcatcactgaatgcctgcgacagagtgagactctgtctcaaaaaaaaaaaaaaaaaaaaaaaaaaatacagaaaacaaaaacattcagtagttcatgatatatccatattggggagtattaatcagttattaaacataatattgtagaaataagtatttacatggaaagattttcacaatacatgaagtgaaaaatgaataccaaatatttttgtttaaaatataactacaaaaaaaagcttagaaaaatacgtgccaaattattaacagtaattcccttgctggttaggatttgggtcactttattttttttattgtgtgattttttttatatcaaacatttgacttgtgtgataaggagtaatgttactccaacattcagatatttagcttgatgacttgggcataggagttagttcccactggacagtcgagggttgtttgttgtggttagccttggaaagttggtagtcttggttttacatggtccaggatgatcctctgagagtgccgccagcctgggcgcctacaccataccctgtacagtgacatctagcagtctatgcatgtgttcttgcaggtacttagcagtaatggtcaaactcagcataaattccactgagttcccccagcaaatagcctaacagtggaatttatgagccttttttttgttaggaggtagtaaacgccagttcagaagtttaagaaggacaagaaggagctgtttagaggtgatagcctttattcttctctggggaattaagcctgggatcttgagcttctttggtttccttttactctttaggagcaaaagaagaaagacgacgtgactgsgggtaagaaaccatttcgtccagaggcctcaggctccagccgggactctctgatatctcagtcccatacctcacacaaccttcaccctcagaagcctcatttgcctgcctcccatggcccacagatgcatggacacccaagagataactacaatcaccccaacaagagacacttcagtaatgcaggtaggtcattaagtggagtttttaaaagaggtgccaaaagataaaaaattcacacagccrtttcattttccaaagacactggctagacttctgtgctttattatcttctaacactttattgtcctctcttttcttaatgagagaaagcatgaaataaagatcccccaatttttttttttgtttgtttgagactgagtcttgctctgtcacccaggctggagtgcagtggcacaatctcggctcactgcaacctccacctcctgggttcaggcgattctcgtccctcagcctcccgagtagctgggattacagatgtgcaccaccacgctgagctaatttttaaatttttagtagagacagggttttgccatgttggccaggctggtctcaaactcccggcgccatgtgatctgcccacctcagcctcccaaaatgttgggattacaggtgtgaaccactgcgtctggcccccaggactattatttcaacttccgattaagaagaacccagctaacatgaacaaacgaaaaagactgagggagaagtttacattctgtatgacagtgaaatggttaaaactgctaatcttgaaagagctcttgtaaattgagaacaaaacaataactgaatagaaaaatgggcaatcaacagagtgaagagacagtttatgtaaggggagaaaatattaccaaccgtacatctgataaggggataatatccaaactgtgtaaggaactcagctccttatgtagcaggaaggcaaatgctcgattaaaaagtgggtaaaggacctgaatagacatttctcaaaagaagacatacagattgccaacaggtatatgaaaaaatgctcagcatgactgatcatcagggaaatgcaaattaaaagcacgatgagatatcacttcacacttgttaggatggctagtaccaaaaagtcaaaagataagggttgccaaggatgtggaggaaagggaacccagcgcattgttgctgggaatgtaagttagtgcagccattatggaaaacaatgcagagatgcctcaaaaaaatcacaaacagaactaccatatgatgcagcagtccctttaccaggtatatattcaacgaaaatgaaatcagttatgttgaagaaatgcctgcacttacatattcattgcagcattatttacgatagccaagatacgtaatcatcytaagtgcccatcagcaggtgagtggataaagaaaatgtgtatatacacaatygaatagtattcagctttaaaaagaaggaaatcctgtcgttcgcaacaacatggttgaatctggagggcatttatgttaagtgaaataagtgaggcacagaaagagaaaaactgcatattctcacttatgtatggaatctgaaaaagtcaaactcatagaagcagggagtagaacagtagttaccagggtcggagggcaggggagaattgggaagatattaacarcggagataaaatttcagttagatatgaggaataagttgagaaatctgttgtacagcatggtgactgtagttaataacaatgtattatataagtgaggtagtgcatatgttaattaggctgattgagccattccataatgtatatgtattttaaaacattgcattgtaatcaataaatacatacaatttttaattgtctattaaaaaatttgtacagtctgggcaacatagactcagtctctacaaaagtgtgaaaattagctaggcgtagtggcgtagtagtcccagctacttgggaggctgaggtgggagaatttcttaggcctgggaggtggaggttgcggtgagccaggattgcaccactgcgctccagtctgggcaatagagtgagaccgtctcaaaaaaaaaaaaaaaaaaaaaaaaattgcagttttgaaacaaaactcaaaggaatccagattgaattaaaattttggaaatttgattagaaaaaaactctgtggagcttatccattgttttaaaacaaaatgagcaaaagttatgaattagacagttcatgtaaaagagaaaattcaaatggccaatatgacgagatgaccaaccttgctactaggaaaatataaattaaagcaacaataggttaatcaatttttttacccattcagatcatcaaaaattaaaaagggaaatacacaccgattgctaagagtgtgaattgctataatctttkcagaaaataatctgaaaacccactctgcgggttgtctgttcctccagcagtggtccctgcctgggaaagacccagatccttagcctgttgcaggtgctcaggatcactgatctcttcagtggtgacagaagtcatctcttaactctttgaggttttctgctctgtggaatcttagtccttctagtcctcattgctttagctgctctttgatgcctttaaacacttctttctttttttgggagatggagcctcgctctgtcacccaggctggagtgtagcggcggcacgatcttggctcactgcaacctccacctcccgggttcaagcgattctcctgcctcaacctcccaagtagctgggattacaggcacacaccaccatgccgggctaatttttttttttttttttttttttttttgtatttttgtacagacagggtctcaccatgttggccaaggtggtcttgaactcctgacctcaggtgatccattcgcctcagcctcccaaagtgttgggatwacaggcgtgagccactgcgcctggcctaaacgcattctttttaatcttccctttctcattgtttttggcaggatgtaattctgctacaagctaccctgcctggaagcattacgttctatgttctgtaatcttaaaaatctgagttcaaaattatttcatcaccattttgttgagggaaagaaagctaatgattttgcagaatgattgggaaatgtttccctgttcttagatgtagttgcatcagttatactggcttttttctagtattaggctgtttttgtgttttgtatacgatgtcacttattttatattctgaatcctttacaataacttcttactaaatacattcttttatttaaaccttggattcctcacccatctttttaatagctcaatactttgtaacctgtgatttacctcacagagggtttaagaagaaagaaaatctctttgatttactccagaaaaaatgaactagcttgagttttaagcacctctacaaaaccacagacattgacaccctgttagaaatctcactttccatttgatatgaagccatcctcaagtgatccttcgcatatttagaaggtgtctctttttgttgttatttgttaattcttagggtgaatagtcaaaagttttttactttgtggtgctctcatctgatctacccaggtcagccatgaatttaagccactggtggactgtacatcatattaatgctatcagtttctgagctcagcacttccttaatggtgttgttcttcagctctgtagaaaaaagctggaagkccagtaaaatgagtagagacacttatttggtggcatgtctttgatcttcacataattatagacagaagatggatttttccatgaggtcataggttccttttggttagtcctctgtattagtttcctagggctgtatataacaaagtatcacagactaggtggcttcaaacatcaaacatttattttctcacatttctggagaccaggaagtctgatatcaaggtgtcagcagggttggttccttctggaggctccgagggaaaagctgttccatgcctctcttctgccttctggtggctgscagcagttcttggcgttcttgastcacgccgatttctgcctccatctttgcatagccttctcctatgcatagcctgtcatagctccctctgcctttattttgaaaggatgcctgtcctggaatttgtagcccaacctaaattcaggatgatgtcatctagagatttttaacttaattacatctgcaaagacctaggtaaaatcacactcacaggctctgggtggacatgacattttggtagccacagtttaactctccatccctggacttctgtgtcttcactacattttctgattcaagtgagtatgattcttttccttaggagaaaaggaaggctacagaagttaaaaggattgtagtttggccttaatccgtaagagacagagcactgatccaagctcaaagttagagaaattacttttttataggaggaggtccatttttgtgtgtgtgtgcagaatagggaagaataatagaatcggtgagtgtagtctggagagattttcagagaccaggcacagcaggtaccagcaggtgaaataaacgttagatgtgtaaccggaggatattactcgcagcygtgaaactcagcggtatcattttctgaattagtttggttttgttgttaagagtctgccacagattggaaggttaaacaggtatggagagtgaaaagcggtagttgttaagatttcagaaggagaggagtagtaaattttgccttaaaattttgttggaaagaatgtttaggagtcattactgatacgttagccagcagcaacaagaccaagaagaaagaaatttaatgtctgtttgtaacatgtgtcaggctttcagtttgaacttcagcaaagtagtgcttacttcagcagcatacctacaagaattggaacaatacagagaagattggtgtggaagaaaacaaaaataaaaaataaggctgggcgtggtggctcacagctgtaatcccagcaccttgggaagctgaggcgggcggatcacctgaggtcaggagtttgagaccagcctagccaacatggtgaaaccctgtctctactaaaaattcaaaaattgggcaggcatggtggcgggtgcctgtagtcccatctacttgggaggctgaggcacgagaatcgcttgacccaagagatggagattgcagtgatctaagatcgtgccactgcactccagcctgggcaaacagagcacgactccatctccaaaaaaaaaaaaattgtagtgaaagtgaaattcatccatttcttgcagtcatcagatcattctttcttttcctgcagatcgaggagactggcagagggaaagaaagttcaactatggtggtggcaacaacaatccaccatggggaagcgacaggcaccatcagtatgagcagcactggtacaaggaccaccattatggggaccggcgacatatggatgcccaccgttccggaagctatcgacccaacaacatgtccagaaagaggccttatgaccagtacagcagtgaccgagaccaccggggacacagagattattatgacaggtatgcaaaaggctgtgagacaccaggtgccaacctttgccaggagctgtttctagggagaaagtgacgyatacatgaatgtatttatctatcaaattactgaagatstcatcatgcatgtgtcagccacagcgaatcccatgtcttggttataggttttatgttttgttttstgggtcatagggagcacatttcacctgtgcaggaaaagagttttctgccgtcttttgaggaaatctagtgaagaggtcgccataaaatattagagtcaacaaccaaaattattaagctctgtgcgaggctgtcagccacactaggtatcagggatcccgagatgggtaccagcccacagtccttacctgccacgagcccataattgaagagtcaaagtcttctgaagctgcaccctctttacttcagtacaatgccaccagtagtacgatgagccraagctttacattgtgagagtagcaagtccagggagagctaaagaggttttatctgtatttcctaatttcaaatcttggataatttaacctcatagcagctttggttttccctgggctgatgatgtgcgtcatttgcactgtaccttgaatttacagtgggaaaatttcatataaacgtgtcaaagtcgtgctttgtttttggaagatctggtaacagcagcccgcattagcagagagctgtagctgagtagctgccacctcgttgggagactgcccctcgctcccacccttctctattgtctggacccagtgggcatcttgccctgcgttcttctagtaggtctgtatttctatttgatgtcactttccttttgcctgaaggactttttctgctggtgataaactctttcagtgtttgtatatatgcctgaaaaagtattttgccttcatttttgaaagtagtttttgctgagtgtatacatttttggctttacagtttctttcagtgctttaaagatgtacctctgctatttacttgcattgttttgtgatgaaaaatctgtcatccttatctttgttcctctttacataatgttccttttaaaaaaaatcactgattatgatgtgccttggtgtatttttccttggtttcttgtgcttggaaatttttgaacttcttggatctgtgggtttattgtttccataaaatttggaaatttttacaatcttcttcaaatattttttctgatcccccactctctcttcttctttggagattctcattacacctatattagcttgcttgaagttgtctcacagctcacttgtatyctgttgacttttaaaaaattatgctttctgtttcactgtggatagtttctattgctacctcttcaagttcactaatactttccttttcaatgtcaagactgctgtgaggcccatccagtgtactttgcattttatacattgtagttctaaaagttcggaaagttgtttttgggtctttttatatatgttctgtgtctaaccttytaaaacctggaacacagatataacaatggttttgatgtccttgtctgcgaatcttatcacttgggtcagtttcagttgatacctcctcactgtgggtcttgctcccctggtgctttctgtgcctagtaatttttgtcagatgccagatgtaacatttaccttgttgggtgctggatatttctgtattcctgtaagtattctggagctttgttatgagttgcaggttatttggaagcagtttcctttttcaggtcttgctgttaagattcgttaggtagaaccagagcagtgctcagtcaagggctaatgattgcccacccccaaggtaaagagcctcattgcactctacccaattgcgttagtctgttttgcaggaatacctgaggctgggtaatttatagagaaaagagttttatttggcgcacagttccgcaggctgtacaagcatagcaccagcatctggttggcttctggagaggcctcagggagcttttactcatggtggaaggtgaagtggsagtaggcgtcccatggcaagagagggagcaagagagagaggaggaggtgccagcctcttttaaagcaccagctctcacrtgaactcagagaactcactcattatcacaaggacagcaccaagccatttatgagggatctgcccaaacacctcccactacaacattggaggtcacatttcaacatgagatttggaggggacacatacccaaaccgtatcaccatctggaggtctttggtgtggctggtgagaacaggcacgatgccagttctttgtgagcacagggcactgttaccttcagtcttttcgggtggtcctttccctggccttgggtagtttccccacatgcacatcctaagcagtattcagctgtatacctgggaaccctctgtagatcttcaaacttctttctctgcagcactgtcttctctcatgccatgccctgtgaactctggccaccttggttccccatccctcaccttgggaagccaactggtgtctttctgggtttccttcttcctgtgtcacagcctgagggactatctcatgatagtgaacaggagccgttaaaaggctcatttcattagtgtccattcctcagggatcactgttcttcattgcctgatgtctggtgtcttgaaaaccactgttctatrcattttgtcccttttggctgtttcaggcaggatggtaaatctagtccctgttattccattttgactggaacttgagattgctcacttcttcctccctctttctttcattgaggtgaaattcatattacataaaggaactattttaaagcgaacaactgaatgaccttagtgcatttataatattgggcagccaccacttctatctagttccaaaacactttcatcagtcagagaaaaccctataaccattaaataatccttccccmttattccctctccccagcctctggcagccaccagtttgcattctgtctctctggatttgcctgttctagacatttcatatagaaagagtcatacaatatgtgaccttttgtgtctggcttctttcacttagcataatgttttcaaggttcattcatcagtactcattccatccttatggctgaataatatttcgttgtgtggatatataccacattttgtttatccattcatctgttgatggacatttgagttgtttccatctttgggctrttgtgaataatgctgcagtgaagattggtgtacaggtacttgactacctgttttcagttttggatatgtgcctgggagtggaattattagtcatattctttacgtttttaggaaacaccaaaatgtttctacgatggctgaaccattttacattcctaccagcaatgtgtaagagttgaaggttttccttatctttgccaacacttatttcctgggttttttttttgtgtttttttttaatgagtatctccatcttcgtgggtgtgaagtagtctcattgtggcttgaacatgcatttccctagtgattaatgacatggagcatcttctcatggttttttttggccatttgtatagcttctttggagaaatgtctgttcaaatcctttgcctgtttttgagttgggttgtttttgttgttgagttttagtaattctttttttaatggtatcatgagcagtttaccatggtccaagctaaaaattttaatactcttcacactgagttggtttttaagataattttattaactagtcactcacttgttgcatatttaggttgatggtgttattaataacttacaaaataatttctgtggctctttttctcatgggctgggtccaggaatatggtaatgtttatggatcttaccagatttttcctaaagggagtgagtttgcaaaagccatcagtaatttttcaagtgtntacttgtgtcactgcacacttgagccttatttcataggatgtattttgctaataagtgtaaaatgactctgttattaatttttttgattcctaataatgtgagcatttgtccttgaatatgagtatatgaggaagaryyaagtgggtagtgaagagaagtggatgggaatctggcttcagtctttcgactaatccttgcatctctatttcaggcaccatcatgactccaagcggaggagatccgatgaatttaggcctcaaaattaccaccagcaggatttccgacgaatgtctgatcaccgccccgctatgggctaccatggccagggaccctcagaccattaccgctctttccacacagataaactgggggaatataaacagcctctacccccattgcaccctgcagtctcagatcctcgctcacccccttctcagaaatctcctcacgattccaagtcacccctggatcataggtctcctttggagagatcactagaacagaaaaacaacccagattataactggaatgttcggaaaacataaaggacagctcgtaaaggagagagtaagagtcaccaaacacgtggatatttttggtctgatcctacagtagccggttatctagaccagtaagtggagttttggacatgctgctgctgtcaactcactggctgaaggagcacttcaaggaatgggaggcctttcactgggtccagctctgattcgggtcaccactcctgcactttggcaccccatcccattccagcctagttctggcctcccactttgacgggcacttggaggaggagctgactgtgtgtgtaccagcttcactgggatgtgtttccccagtcaaggaacaggggatcttcagagtcatgaatgttttcttgccagggtcagtgttcccaggaccttagtgcatggtcggggcaggaactggtgcatggaggctgctgggacctggtgaacagtgtgtgatttggttgatttggttcactctgacatgatggatgctgctgatggggagtggcgagttggggcaagcgggtggggacaagcataggacttgaaggggagcaggtacacccctcaaatgtgttcttgggagaagtgatacactcggcctcattatgtgaaacctgtgggtggggttggggtggagaagtagagagagggcaacagcttccacaactgcttcatctctgccaacactaatttttcccacactgtctttgtacatttcagagctttggtctcctgagtgggcctccttttcccactgtgccagggaaggtaggtttctctggctgactgagtactgtgagtgaggcaacactgatgccagcatgggtcttacttgactggggagtaggctgagtgaggggtagggtggggtaggtggggagtagtgtggccagggaactggaatccctggtggatttctgattcctgtggtgagaaggaaagctacaggacctggagaaggggatgcagaggcaggcctgctgaccaacttgttgcaatcacaaaggtgggggtcctggtgcaggcagtgaacaggcttctaatgtggggttcagtagtgccagcaagtgggggaaactttcagtattgcgctaggtcaacacttcctgctgcatttccttccctttgcacagcttgaagaaatagagtagacagaatcacacatcatgtggtgggcagatggaaataagtacctgtggtgaacaagtttctactgtagttggagatcattagaattgaattcagtttctcttagaatataatcaggtataaacctaagttaaactttttcccaaacaaggagcatccaaagacacagtgacttgagctatagatagtaaaaatcatacgagagttgaactgagtcaggtttaggaagcaagtttggttgcatcaattaagcaggctcttttcaattgactgatgctggggccttcagttttattctcagtatagattgccagtattgttaagagtatccaaaggcctttctagatggagacagaataactgacttgaacatacagtgtgcctgtaagtgtccaggctcagagctggtgaaaacccttctgttgggcgtgtgcagggttaaactcctgaagtaacttgtgaggacttcagtgcttgctggtgtcctgggcagcaccatgaatgcctttaccaagacatgccaagttggatcccccgaatgaagcagatgtggctgtggtgtgacccttgctccctgctacacagagcatcgcagggctggcctgtgtggtttccagatgagggtctgggtcccggaagcttgtgttgagagctcagtggacccaccccgcttgctgaaccctcacagttcttggggttgtccagcctggacttgtagcacacatgtcctgaagcaaagctccggtgactgcatgagccacctggccacagtcctcccatggagggcctgccgtgacgctcagtggagagggcagggcctgtgtctccacttaggccacacagtgatgaggaaaccacagatggagcttcttgccgataatactgactctagcccatgattgccttgcccaagccaaagaggaaggttaggttggcttgtcgagcccttgagcgttgggagatggggtgggaaggaggtgagcccctgcagagagttgggtagtgtccttcaggaatgaaaggaggggcaaaggagtcaccagaggtcctgcatttccatcagggtttccacagtcatcagggcttctctcttgagttgctgataggagatgtgagttatgcccagagatgtcttatcgtgaggaaaaagaaacttccttttgttcacattcaggactctcagtgccatatgaagtagcaaaaggcagtatcggccagatcagtgttacattgattctaaaattacagtgtccccattagacaactattttaggtgctggagtatgtttgaagagtgtgctgggaaaaaggaagcatttcttcattgatttaaatcagtatgaatattatatgcctaaataaaaaatttgcacaggtaaattctctcacttgtgaatgggagaagctgccccaggaatctgtgaggatggtattccctggagtctggctttgaaagatttcattgttggtagaaataacaggttgagaaagagggagttagcatcacctaaaacctgcacgtgaacaagggttgacatgatacactatggccttagaaaagggccaggtgaaaccccaagctaatcactgcggtctttcagagccggacagacaggtgccagcagagcccggggctcactctcctttcagtcactcctcagcccttcgaagggaagcccaaacactttgcacgctgtgctgcagacattctggcctggtgtgtctgaaagttgcatcagtcctcacggtgcaaacacagttgatttaggaagtcacacaatgacactgaaatcctacagaccaaaatccacttgtcagcaggagcagcagcccaggcccagcaccagcggtcttccggctcctctgagggctgccacgttgggcgaggggagccatgccaagggtccaggctgctttaggccatctgtgccccactcatctggggacagatggtttttytttattgtaaaattgtggacttttaaaacctgttgactaaacagtaattaatttatatttgtgaaaaatgccactgtcctagtgatttctgatgtaaataatgttgtttatatagtatgtattaaattttcctacattgtaaaactgctgtacttttgattcttgtatattaaaaagtgttactgagcatttttagaattgggctaacacgttgcattgcattgtggtgtgagctctgtgactagagataccgccttgtctaccttccctcgttggttgctgggtcacatccagatgttttgacagcttgtgaagtggagtcttttaaagttgcatttccctccatccagtaccagttgcattgttgcgtaccggccttaacaccacagatacctaagctgttcctgagtatgccgtcgtcgaggtgaacagctccctggccgagcaactccaggctgtggcccacagctctgcacttgagggagggccagggttgccgaaaccggtagttaattcccgtgggttagtcctgcctggggggatccagggagacctaggggggccaccccttctatcctgaaggaaataacactgtgtctgccagcctgtagctttgagggtaatttaacagatggggtctggggggtggcattttataatggaaacactgacacaaacgttagctttagtattctggcacaggggcaggcccagctctggtgcagcccagacagaggaagggtggcacagcctgcgggcggagatctctgtctgaataagggttgaagtttgcccagatccacgattttcactaatgttttggtgactttgagactagctcttaaatcttgataccaaataagccatgtgtctactgagagctgagctgtcaactgctgtgactccgctccgtcagcccaggggacttggacgcaggggcccttgccagccctggcccgcgctggagcgggaggctgggatttttagttcacgtagttcttgagaaagacgaagaaaagctgagggctcttggtgcccatcaagaaacgactcacaatcgtgttgtaactcatgactcagctggaacaatttggggaaactttaagaacaagtactgcaataatcagcttattatgacttacaatagcaacaaggcttcgaaactgccagctgccaaaacgcctgccttttactggaagcggccggcccagggcccctgcctcctccctcctccctggcagggcctcgcacgcctggcatcacggcaagccctcctcagtcagcgccaacagaaaggtcacttattgaaacccaagtccctgcagtttgccagaccagagtcggctccagattccaacctgtggcttttaaaggcgcaggaccagctctgatgtgaggcgttgccttaactgaagccccctgcaccagtcctttctgtcatatctcatgggacccatttggtctcccagcccacctcaaatctgttctgatcagtgagcgggtggggaggagaaggtgcagctggattcagtgaaagttccatcctgcagaaacctgggcactaattgaggagctgttcccgctgctgccggtgggcccctcccccaggcttgacgtcttgggggtgttctggtcagttctgctggcgtgtgatgtggtggatgacagtgtgctcaggccacctggttttgcgctgagcctcctgctgtctggctttgtgtgggaacatggaccagtccatggcctaaaggcttcttacctcgaagatgggcagaacaatatccacttccggaacatcacacgtgagcttcctcttaatttctttagtgacctaagaaggaattgttgctaaaacacgggccccgttaaccacaggcactgtggtggccctcggggcgttggggggctgtaaaggggcctcccgagtcagcgcattgcccccatgtggtccctccccatgttcagctgggtgatcaccttgcatcttcacctgcaaaggaaggaggccgcttcttgggttcatgcggtttttaagtgagagtgtgcacagtggaaaaggaaaaggtttgtaaccctaagggcgacctggaagagacagcattcaaagtccttggctggggaatgggtggagagggttgagtcagagggcagctggatgggttgaggcagactaaggacagagcttgcccggcctggagggcaggcccggtgagcaccgggcccagcacctcccactccagagactgcaagacaagcgagctgccctcttggagccccattggccagggcttctggaaagccgcagcttgctgtgcggggagactaaaccccagcaggaaggcccagcagggactagaacccccaggagctcatagtctcatgggggagacactgctggaaccagacagttatgggagaggacgttttccttgaaccaggtctccagcccctcctgtgggctggtcctgctccaggagctggacccgcgcagtgaaccaggaggataagggccctggccccttggagttggtattctagctggggtaggggttgggggcgggccctagagaagcaaacagtaagaggacaaacgtcacatgagtgccagggagaaaacagccagaggtagagggacagggtcgtgaaaatcctggatctgggcaaacttcaacccctactcagacggccaagccctggcgatgaggatgggcggtcaggaaggcacgtgggccagcgggtgggtgccgggcatggctggacagactggatttgaacattggctctgtctcttaccagctggtgttgtggagcacattctctatctccaagccttaactacaaatagatactgacagcttctcaccaggctgggcagggacaagtgaggtccctgaggtgcatgtcaggt

SEQ ID NO: 94393 - DNA, 20533 bp, Homo sapiens
  misc_feature (1)...(20533): n = A,T,C or G
ggagtagagatacgaatggggtgtagtagccgactgctcgcaggcacccccaggttatgtggacagagctaagcccaaagttgtgattttccactctgttctgtccatgtcgagggaagataagtagaaagtgacacagtaagagccagaatacaccaggtgaaggagagaattgcattgtgttttgagaagtttcactgacaagttatcctgggctgtgggacatcactagctttgaaagtgtagctggcacctcgtccatctaatttgatgggtgtgtgtggggtgttgggcacgcgtcggcctagcagatctgaacccaggtgatttctgttctcaggaagcttttaggtgacaaggatcaggcatgtgaacaaataaccatactgtaaagctggctgtgctgggtcgctagagcaaactcagacacacactctgcgctcttggagttgggaaacccacctgcgttggctttttgtgggaggtggccttgattgggccttgaaggatgggtgagatttacagaaggttggaatgaggcactccaagcaaagaacagcagaggctcagcagcaagaatgcaaaaagggagttcactactgactcaaatacccggagccctggggtttagtctcctccctccacaagtcacatgtaaaagtccagtcatgctgggcgcggtggctcatgcctataatcctagcactttgggaggccgaggtgggcggatcatgaggtcagtagttcaagaacaacctggccaacacggtgaaaccctgtctctactaaaaatacaaaaattagtcgggcatggtggtgggcacctgcaatcccagctactcgagaggctgaggcaggagaatcacttgaaactggaaggcggaggttgcagtgagccgagatcatgccactgcattccagcctgggcgaaagagctaaactccgtctctcaaaaaaaaaaaaaaaaaaaaaagtccagtcatgtaattatgtaacagtcacgtgacctgttatggaacttccaatggcaactaaaagcacatgcagctagtggatttcatcggagtgtttgaggttcccgtcttgaatgtgactgtcggaactactgtccgggggggtggtgcatttttctgagtttaagcaggagtcgggagtccccaaaagggaacacaagacaccttgatcctggcatatcttgtgtgccctctgtgggcctcagtttgtttcacaggattgaaaacctgggaagttagatgctcatctcatctgaagaagttgttctgcctttgttaaggtggagcgggaatagtcagcactgggacatgagaatggacagtcgcctggacccacctagggattcaccatttgctaaatgtgtgagctgtgggctcggccctgggggcactttaggaacatgactagtcttcccctgcagtgtggaggacacatgtgccacagagcccagctttgtgctcggtgccagagaggcttccggaggcaggcagggctgcgtgcagcctggaaggatgagccaggccaggcgggaaacggaagtccaggtagaagggaggagccgaattggggtacactccatatgggctcaggcaggtcagcctgtggaatgaatagaggccaacatgcaggccagcccggaatgcggcaggagtgacagtggctttccgtttctgggaattctgccagtacctacagtggtgccttttgacttggcttaccttttttctcgacatgcaggcagcgtctatcccagactaccggggccctaatggagtgtggacactgcttcagaaagggagaagcgttaggtaagcgggccaggcatggcctcccacataggctgggcagcggcagcacgggcctgagctccagctctcctcaccttgccttcctttctgcctggcagtgctgccgacctgagcgaggccgagccaaccctcacccacatgagcatcacccgtctgcatgagcagaagctggtaagagccctgggtggctggtacacttgccagggaccaggcagagcaccttggtgcccagtgggcaactaactgcacccgccctctgtctgccagttgactcccatgatgagcacccaccaagcgggttaggccgcgggtttgatcctcctgtgcttgactctccaggacagaaggggagctccccctctgaaccatcccatccgcagccagcctcagcctcagagctgctggtggcctttcccctttgtgattcccttgcatttttctgtggacctcagaagccatcctagtcacaggggaggcttataggacatctctggggaccttctgctgaacaccctcaaccaatggggtgtagtggttgatctgcctaggtccccagggacctgaaatgtcatgacccaagagagcatggatctggggcagagtggcccttgccaaaccccgagccacttcccaaccttgccgggacggtgcaacctcttgccctcccagccactccaggtgcatcagggctggaggaaggacagcccctccccaccacaggccctcttgactcctggtggttggacctgttgtgtgttttactttctaaggctctctggggggacggagctgcccctggttttgggagccatcggcggggctcagaacagcctcgctgtggccgggtactgacctccccaccaccactggcagccatccctccccttgccacccgttctgccttccaggtgcagcatgtggtgtctcagaactgtgacgggctccacctgaggagtgggctgccgcgcacggccatctccgagctccacgggaacatgtacattgaagtgagcagtcctgcagggacccagggtctccatgggcaggcgggtcccactcactgtgccctcttgcctctaggtctgtacctcctgcgttcccaacagggagtacgtgcgggtgttcgatgtgacggagcgcactgccctccacagacaccagacaggccggacctgccacaagtgtgggacccagctgcgggacaccattgtgcactttggggagagggggacgttggggcagcctytgaactgggaagcggcgaccgaggctgccagcagagcagacaccatcctgtgtctagggtccagcctgaaggtacgtgccgatgacacaatgagtgaaccgagcccctgcccgcccgagggtgtccagctctgcggcccagcactgtacagacttgtcccttgtgtgtgtgcggtgtctgtctgtctgcttccacaggttctaaagaagtacccacgcctctggtgcatgaccaagccccctagccggcggccgaagctttacatcgtgaacctgcaggtaactcgggtgctgagagccacgtccttagatctgggtcttagaacgcacagccagagacaccccacacccatgcaccagggcggtctgatagggcccccgtgggtgctcagggagcaccgactgagcccgtaggggccaaggctgacaggccaccgggaagggttgggctgctgttactctcactcggctttccctgtcctcagtggaccccgaaggatgactgggctgccctgaagctacatgggaagtgtgatgacgtcatgcggctcctcatggccgagctgggcttggagatccccgcctatagcaggtgagtgagccgctgcagcagcctgcttccccgcacctctgtgtgctgggccttgtctgtcttctctcgtgagctgagtgtggaggaagctctgaggtgtttgcagtggtgcctgaggcatgactgaagcgtggtggtctccagagggcctgacctcggtggttggcggagaccctgcgtgtgccactcctgccctggctgatgtggcacacacaatccccgcggggagagggattctgcccgcgtgctcctgctccaggcctccccgtggagctctccgagatgcctggtgggaagcatctggaggggacgagcactcggcagctctggtcagacagaatctgtgtgcttggttttgggagttggcgtactttgggaaagcttaaacaaactgtgccttaatacagaatttgtgataatttagacttggtgtatgtattgagtaaaaagtttacactctctttctctgtgaattttcagggtcttataggggaaatcaataacttcttttaatcaaagggttcaagaaattaaggatcccttcaccttctgggcctggcacttcttgtatgttatgtgtgtggtgttctgtgatgtgggctatcgtgtactgtattttttttttacattaacttagctcattttccttatcagtgcgtatctgtatcttaagttatgatctgtggttctgcatctccgtcagacacatgctttcttcacggggtcgtctgtaggccacgcctccctagtcagctgggaagrgggagagggtctggtccacctgccccagcggtacaagtggaaggtggggcccagagttgctagtgactcatccctggagacggaggcagccctggggccactgctgccccaccctgtgtgtgcacgccgctcagtggtggacaaggacacggagttttgaggagaccgagctagtgtgggtgccgacctttgagtcaccacctaagaggtgacctctcccacatccgttctgcagcttggtaacaatgaagctgccgccaaccagagccccgccgcagttgacacgggagggaaggggatgggaaggcagggaccgcagacagctttcccgagctggggcaggtgtgactgcgagaggctcccaggcccgcctgatgccgctttccctttttggcaggtggcaggatcccattttctcactggcgactcccctgcgtgctggtgaagaaggcagccacagtcggaagtcgctgtgcagaagcagagaggaggccccgcctggggaccggggtgcaccgcttagctcggcccccatcctagggggctggtttggcaggggctgcacaaaacgcacaaaaaggaagaaagtgacgtaatcacgtgctcgatgaagaacagttggcactttgcagatggccagtgtcacggtgaaggctgggttgcccccacgggtctagggagaacgaactctttggggatgacattttcaccgtgacatttttagccatttgtccttgaggaagccccttgcactgctgcggttgtaccctgatacggcctggccatcgaggacacctgcccatccggcctctgtgtcaagaggtggcagccgcacctttctgtgagaacggaactcgggttatttcagccccggcctgcagagtggaagcgcccagcggcctttcctcgctcaccaggccagtctcagggcctcaccgtatttctactactacttaatgaaaaagtgtgaactttatagaatcctctctgtactggatgtgcggcagaggggtggctccgagcctcggctctatgcagacctttttatttctattaaacgtttctgcactggcttccggtgtccccgagtggtcggcgcgggctccccgggctcaggtctgccgcctggcagctcggtcgtggcttaaaactcccttggttggacaggggacaactgtagattattgtgccaaaaaataagaaaaaaaactcccctggttgggacagcgccccgtggaggttcccggaggtggcggcggtgggacggtccccacgccgcactgccccgccagccgagcgccaggtgtgggcggtgcggagaggccaggtgtgggtcggggggcggggctcggaaagcgcggcacacgccattggctgtgcgtttggagggggcgggactctgtcaggggctcacgccattggccgtgcgcggaggtgcggtggggcgcggccttcggggggtggggctcggggcggagggcgggaggcggggcgggggaagcgggggctgggctcgggccgagcgccgacccattggccgtgcgcagcgggtgaggcccgcgtgacggccgctgagcgtgcgctggcggggcgggcggcggcgctcggagtcgccgggagctgccaggctgctccgcgcgccgctgcggggccatgatccggaacgggcgcggggctgcaggcggcgcagagcagccgggcccggggggcaggcgcgccgtgagggtgtggtgcgatggctggtgagcgcggggnnnnnnnnnnnnnnnnnnnnnnnnnnnnnnnnnnnnnnnnnnnnnnnnnnnnnnnnnnnnnnnnnnnnnnnnnnnnnnnnnnnnnnnnnnnnnnnnnnnnnnnnnnnnnnnnnnnnnnnnnnnnnnnnnnnnnnnnnnnnnnnnnnnnnnnnnnnnnnnnnnnnnnnnnnnnnnnnnnnnnnnnnnnnnnnnnnnnnnnnnnnnnnnnnnnnnnnnnnnncagaggctccgcgccctgccgtgggcgaccccgtctacctctggcggaggccccgcccggtcacgccgacctctccggtgcagccaccgcgctgagatctggagccacggcctccctgcttctccgtaaccaccagcaaccagcttgcccggctccggtccaggggttcccctggcctccgggcgagcgtccctgtaggtgggcatcgggtgcgacctgcctgtccgggacccgcggtgaagcccgcgggctcccgggtcctcctccgcggggctagaatgcgatcggtcttccctggccagtcagagggcattgttttaagaaaagtttcgggttgtcaacaagtgaaaggaagacgaccgttactgataatttgctacctctgaccctttcacgtgcctgccggatggaatccaggaagcaagcgcctctatytgattagcccttcccaggagagcaagcagggccttgtcttctgtgtccgagtcacctctgggaaaaggaatgtggctttgtgtcagtggactttgaccttgccctgaccaggccccagccccattccagactgtgctcccctggcccagcctctgccccctcctcccctccagcctgtccagtgggtacatgggcccgccagattttacccagcatgtctgccgggctccgcgcactgtggcaggggtgctgggaggaagcagtggtgtgcagtggagcaactctgtgcactgtgtgggctgccagggtcacacctctccctggagaggcagggacagctttgtccacttgaggggatgggccgctgctgtaaagaagtggcgaagaagccagggcagcgaggcccagttggtggcagggctgtgtagctttgggcttgagagttcacgtgttagcagacctagatttgtgaatgaaaactctcgagccaggtggcaaggcagtggctgttcacccttagcgttaagcctgctgagcttgaggccgtaagggaggagagacaggattttcagggccagtgattcccagggttttattttgtggttggatttgttttgggttagccccagggactgtttgcttgtctcaaggtagtctaggatccaaccctaccccaagagttaacatcggcttattttaaagtgactgcccagggcagttgatatttggtgaggggataggacacgtggccctgcagctttcagtgggctccagtctgtcctgcacccaccagtcctctagacccagccaggccttgacatctctgcccctgccaccctttctagatctggcacaggggtcccaccgtcaggcccaggagccagtggggtggagagctgagcacctacatcctccgaatcccagtcccagggctcccagcagcagcttctcagagcgcttcctaaggagtcctcagaggagcaaagctctgcccctaacccacagggacacctggtccccacccttggcacagggaccacccactctctctgtctccacagctatgacatggtgcattacggccactccaaccagctgcgccaggcacgggccatgggtgactacctcatcgtaggcgtgcacaccgatggtaagcacagatggcctcgcccacccgcggccccccagccctcctgtgggttgcgactgttgactgaaagcctgcaggcctggggccaccttgccagggcacagcwgtaggggagggcactgtaggctcacccagcccagccccagctgaggatggcctaatgcctttcccatcttgcatttcctgtcccagctaaagagaaggggcacctgctccccaccactgccagcgaggctcccaagccttcaggggctgagcacctgctcgtcagaaggaatctctgcctttgcctgagaccctcgcagggaagagagccacccagttggccagcactagtgggctaagggccagggtagagagacagcctgcccccaccggccctcttgtgtggctacagctgggtgctgggaaggggcctcctactggaggggccgggtgggctggggtccccagtctccccgttgtccttttcctagaggagatcgccaagcacaaggggcccccggtgttcactcaggaggagagatacaagatggtgcaggccatcaaatgggtggacgaggtggtgccagcggctccctacgtcactacactagagaccctggacaaayacaactgtgacttctgtgttcacggcagtgagtggcggggctgggacctgggggcctggggacatcaggtggctcaggatcagatctgctggtgggacatccgggaacagggggcctccgccctttgaggatctgagacatttccgggcccccacctagaaatgggcacgcggacactagggcaggccaggggccgagagggtcctgggctctgaaggttctggtggctttgggttaaggatccttgtccttgtgtgtcactgcttagatgacatcaccctgactgtagatggccgggacacctatgaggaagtaaagcaggctgggaggtacaggtgagtctccaccgcgggccyggccatccagggagctggacacggggctccctcctggctcgtgctttgctatttaccgggagcccgtgaggggagcgtccaggccctgggccatgttcctcacgcccaggactgggaactcgagggatggaggtgccattgtggggtggcctggaggcccttgccatttggtgctgcagacccatggccccagggctccaaaggcacagctttgtgaggtggcagctgttgagctcgggggacgtggctggcactgctggggagctggcactatatctgaattaccagacgtcagggacatgaggccagtggctcccgcatgagatgctgcagctgagaattcactcagctgcagatgctcagcgggcaggacgtgggtgtgagggaggcaggaagcagagctgctaccccagtgcccatcctctccctggcattgcacacctgggccccagcaagggtccttttctgtgctcctgccactcccttcagtcaataaaagcgtggaggccttccccatgttcccaacccaggttttctgttatggccttgcacaggaaggggaccctcagtctttggggcagccgtgggttctgccacagcagggctgctagtgtccctagtggtggtagcaggaggcagagccttgcgagtgtcccaggatgagaccccactcccactgtgtcccccagagaatgcaagcgcacgcaaggggtgtccaccacagacctcgtgggccgcatgctgctggtaaccaaagcccatcacagcagccaggtgagtcggcggcggaatccccgaggcccctgggtcgaggtctccaggggaaaggaggggcacctccctgccctctcagggtcctcctgcccactgctccccatccccagccggttctggggtggccacgccgggagggcaggcccctcagccctgctctgaccttctgtgcaggagatgtcctctgagtaccgggagtatgcagacagttttggcaaggtgagtgcggctgtgcagggagagctgagcacgcagctgcagggggctcccccggccacctgtcccagccatcccttggggaaaggccagcccagagcctcaccctcctccctctgtccctggcactgaccaggcactgactgccaggtttggctcactggtggatgctgggagggagggcaggcgggtggtggcaccggctggccggtcacggcagccactgcttggaggagcaaggatttgcctgtggacaggtggcctctaaccaagtggcctggccctctctcccattgtagccccctcacccgatacccgccggggacatactttcctcagaaggctgctcccaggtgaccagacagtggtctcagggtaccaggtccctcccaagggctgtgtgcacctgccacagggctccttgcctcctcctggtggtcgcttgctgggctgaagtggtgtctgctgcggtgcctgctgtggttgtggggtggcgccacagtcccacctgccacctggcctggcagtgtgtcccctgcccgagatgactggctggaaatgggattgctggcaggtgacagctgagggtttggtgacctggtgagggcagcacctgggaggcctcccccgccaacctgctccctctcttggcttgcagtgccctggtgggcggaacccytggaccggggtatcccagttcctgcagacatctcagaagatcatccagtttgcttctgggaaggagccccagccaggggagacagtcatctatgtggctggtgccttcgacctgttccgtatcctctgggcctctgctgctcccctacatgtgccacatggggtgggacccgggggcctcacttgactccttggggcccccagactgggctggctggtttgcaggggagcagctgtcagcagggaggatggcggggaggcccttgggcatgagctgtcagggagctgctccctgtcatccccatcccgactgcttcttaacctgggygcagacatcgggcatgtggacttcctggagaaggtgcacaggctggcagagaggccctacatcatcgcgggcttacactttgaccaggtcactgccttcttgctccctgggcccctgggcagctgatgggccctcgaggggccctaagcgttsctgttaggtgcaggtggtctctgggaaggggccccaggtgaagtcacaggagaccctggggggtgatcgtaggcttctggggtccagggctgtcctgtctggggcatccccacaagggcgagcaacctccccgacttcttcccatgagggacagccgggaggggcacaccctgtccccccaaaaagtctcygggctgagctagccgcactctggccgcaggaggtcaatcactacaaggggaaraactaccccatcatgaatctgcatgaacggactctgagcgtgctggcctgccgggtgagtgggggccaggagccagcccaaggatggggagacattcccacaacatcccccctactaagkgcctccctgagccagggcaggggggcttgggtcactggcagagctgcacccagcaccccgagttctgtggcacctgcccatacctgtttgttgaggcatgargaggggtggtcaggtctccagatgctgttccttcttgtctcatggaggagccccaggggtccccagcctgcccagcccatccctgctactcactggcagccccgccccatgtctgagccgtctctcaccaccctgtggccctggcttwccagtagcagggaccgagcaagtctttctgcccccactgtccccacagtacgtgtcagaagtggtgattggagccccgtacgcggtcacagcagagctcctaagtcacttcaaggtgagsstccgcatgggctcacctcgttccctctgttcacctctgttcctgcatgggctgggaatgcaggctggctgtgggctcctaggcggggcccaggaggtacctgggctgaggaaagggcagggtcagctctcccaacccccggggcctgtgctgggctgtgggtggcgacggccgctgcctccccggggagggctcctgaccccactccttctccaggtggacctggtgtgtcacggcaagacagaaattatccctkacagggatggctccgacccataccaggtgggtcatgctggcccttgctgggcacaggggttgccattggcacctcccagccatttaatgactcactgtgcctgcctgggaaacgggcatggtggcgcagctgctccgactgcaccactcccatgggaccctgggcgctggtctccctctggggcagggcatcagatgggtcttggggaggtcagcagggaccttcatcccgctcctcctctctggacccccaggagcccaagagaaggggcatcttccgtcagattgacagtggcagcaacctcaccacagacctcatcgtccagcggatcatcaccaacaggtgcagttgggtgggggcacctcggagccgcctcatgggcgctctccgctagacttaccstgccctccccctcggagccgcctcatgggcrctctctgctagacttaccctgccctcycaggttggagtatgaggcgcgaaaccagaagaaggawgccaaggagctggccttcctggaggctgccaggcagcaggcggcacagcccctgggggagcgcgatggtgacttctaacctggcagaggccctggccggccctccccctgctctgcttctgygccttctgcgtttggacataggactctgcagggcygccctctctaactggcctggctctgsaagggctggtgaggactctgcctccttgcctgcctacaaggtgcctggtttgcagcaggctctccgctctttccagcaaagctgctcagagagggtgtccagcacagtggagaggccggaagtgagacgggcagacggcacctgcagcctgaaacgcaccgctcctgcgtgcgcccccacctggtccccggatgcccccaccacctggacagaggccacactgactgcccacccagctgtggcgggaggtgcagagcagagggctttagggagcagtgactgcggtcacccctttagttctctgggtgtagaccacaccacctcccactgggcaccccccaacacggtgtcctgccacccagcgcctggctccaggaaaacacgcttgccttccttcccggcagcttcgccactctccttatggactctgttctgtttgtacatggctgacggaaatctctttggtacaaccgaataaagcctggtggcagtgctgcgcggggctcccagccctgctgggaaggaccagggaaccactcagcaaggagaccctcttggccctgcccccaccatgcacccagcagccgggagtgcagcgggcagcctggcagtgagtgaaacccaggcctccagccctccaaagcctggggccaccccctgtagcaggcgatgctagaataaggaggagagccagagctgaggctccttgccccttggcccctccaggggccatgggatctctgtctcccacacccctgtcacggcccgcctggagcagcccagaggccgaagaggttcttactgcagcctccgggaggtgtctagggaggccatagattgcctggtctcgccgcattcaaaatgaggcttatgatcagtacttttttcagccccacattcctctccagaatggcctctgccctacagcacctggcccatgtggcaccccatgggcctgtcctctgctgttgtgaggtcgacctcacgacccagcacaggagctggaggcgaggtgcacgcgaggctctccacagcccaggaaggcagcctgtcaccctgctctccgagccaggggccaaggtgtggggggcacaggccatcctcatcctgccaggcccccgctttcaggagtggggtggtgccaatgctcccactcagaaccctggactgcggggtcccctgagcagagggaccagccagttccccatagacagattggtgctggacaggggctgcctgggccccaggcttggggagggtagaaaggccctgcagtgctgctgcctgggcccggaggtgggcctggccccgtagcagcattggaggccagagcccaagccagttccggagtcacacccaacggcggagggagaacctacccatctcccaccttcagctctggggaggcatgctctgggcctctggagccagggctcaggcccccaactctcctccttgcccctgcaccctcggacttggcctggccagaagggatgggggcaagaggaaggcagccaggggctccagcccatgccctcacagatttggctctcgagttggggagcgaagggctgggggaggacactgggaaccgggccarccgtggccctgcacttcccccagggagcaccaaggctaggcgcggcttcaccgcggggctgggtcgtggccagcttcgcccctgggtctgaagacctctgggcggcccaggccaaccttgccctgccgccgcacactcggctgccttctcatacccaggcttggggatttccaggtcccgttcccctcgtggcctggctgccagtcctccagcacccctcactccgaggccgcctcatttatttattcgtttgccattaactgcggggtgagcggagtaggggagacctggggcgccatcccgcgccggaggggcctggggtcaccgagtgggacggtgggggcggggggcccccagcggtgccaggagaggtccgggctcaggcggcgaggcagtcggctgcgcgcagggacaggaagacgttcgccttgcactggtaggtcccgcggccgtcggggagccgctcgcacctctgcaggtttggggcgacgtcctggacgcacacagcctggggggcaggcaagcaaaggctgaggggccgccgcacccccacccacgtcctgccgccgccccccatcagtccccggcacgccggactcacgaggctccgcagcctggggtgcagttgcagctccggggaggcgccggccccgcccgggggttccgcccctctgtagggctgggagcgccgcgcgtacggggacctgcggaggccggacagcagccccgcggcgcggcccaccgagtaggagctgtgccccgccgctggcttgtaccacgcgaggccaggcggcgccagcagcaggcacagcgccagggcggcggccgccagtgtcgcggaccgggccatggggacgccggctgactggtgggcggcggcgtccgggctcggagcagccaccgcctgggccgccttatatctgcggcgagggcgggccgaggctgcggagggccgggaggggcggcgggcgggctggggtgcagcgggcgcgcgcggaggagccgtcgcacctccgcatcccaaaggaaccagccgcgcgggcgagctggaggcgcgcaaggatctggcgcttggtgggagcccaacgccccctcaagctccccacccatgccgctcgcgcccttcaggcccggcttgcgtgggccgcagtggcagcaggggagggcccacgggcgcccagccctaggagtcgtcccccaggcaatccccagtactcctgatgctggagagccagccacactgcacagtgccccgggggcggtttctaccaccctaaggggtattcttggctccaggcatcagagtccatgtggcttgtggggccctcatttctttcatgcccactggggaaggttccaccagcagggctgttactggcggggtcctctgggaggggggcaagaaggccagccacaccaaggcactggagctccacgactcctggccttcgattggaggcccctctctgccagctctgccccttggggggcaccaggcaggactgccagccgctctcctggcaggtgacatcagccttcaagctcactgtgccctcaccatttcatgctcccccaaggtcctggtcatgtcttctcttgggtatcttcccaggacaggcactggcactggagccctggcacttgtttctgggttccatgcttcccaggtgtgatggtgaatgctgagtgtcagcttgactggattgaaggatgcaaagtattatcactgggtgtgtctgtgagggtgttgccagaggagattcccatttgagtcagtgggctgggagaggcagacccaccctcaatccaggtgggcaccacctaatcggctgccagcacagccaggatacaagcaggcagaggaacgtggaaagactagactggctgaatctggcctccatctttctcccatgctggatgcttcccgccctcgcacgtcggcctccaggttcttcagcttttggactctcggacctacaccagtggcttgccaggggctctgcagcctttggccacaggatgaaggctgcactatcggcttctctacttttgttttgggactcagactggcttccttgctcctcaccttgcacatggcttattgtgggacttcaccttgtgatcacgtgagtcaatactcccaataaactcttcatatatactcttcatatagagtcctgtctctctagagaaccctgacacagatttcaggtgaggcctggtctactcctcaggttgctgtgaggaagggtcaagagacactgggcacgggtcactggccccatgaatgccaagggctccctaggttactggagacacagcctgtgctctgtccagaagcagcctgagatgccggggctgccactcccccagcggccccttcccaccacgattgtggggagcagaggcacacaaaggagcctcccagggccacctttccctaggaagggaagcctcagacgtgtggacacacttcccagtgtcaggacactgatccctacactgtgggaggcccagccccgctgcagacagtcccagtgagaacaatggacgcccactcagagatggtggccttcagtctggaggcgccacaagcagtggccgccagctttgcacagccagggtccctcagagccagcctgagggagggtcccagggccgccgccggcaatccagcaggcaagagcatgcctgaagagcatgccccaggctctaccgtctgatcctgctccttctcctcccagtcatgactcagggtttgacgagggccttggcgtttcacggagatgtttattcatgagagttttcatatcaaaacacaccgagaccacatctatatgcygagaacacaggcacccagaggcctccagcaagatttgagtagtttaatgagttttcacttattggataaaagtgtcaacatagtgatggcaaaacaaacgcagctccagcccttgtttccaccttgttgcagctcaggggcgctgtccccagcagccatcggcgccagcatgaggaaggagtctcaggatgcccctccagcgagagccaggtcgggcctcactccttgaacttccattcctggcggcacatggggcagtgctgctgcacctgctgtgcgtgcagccacttgaggatgcaatgcatgtggaagcagtgggagcactggccccacaccagcgggcagtcgtcgccgggcaccttgcctacggaggggaggtggggaaaaggacaggcatgaccaggctggacacagagcatgtgacaagccaggcaggggtgcaggtagggaccctgggcagtggctccagcactgcagcctctcatgtttcagagaagccgaaatcaggagtgttacccaatcggtctcctgaccagcccgcccccaggcgaagaccagcaatgaccaagggacaccggacatgcggcctccacccggggcaaccgcagcaggcgcctcccctcacccaggctcatcatgctcagtggggagcccaggggcctctctgaggaggtggcgctctggcctagcccaccctgtgtcccctgtgcttgaggctggggaaaaagggcaatgtctgacctacaggccctgggcccatctgcagacacttgatctgtgatgccaaaaaggtcacatgaatggtcaaggcaccaaggagacgtgcatctgagtagtgaactggtctcttgatcaagggcaggaggggtggggtctggggacctagaagactcttccctagacatcagggatccggtgtgctgcccaggcgttggggaagctgtgttgatgggcacctgtggatgggccctgcctcccaggacaggcacaggctgcgggcaccagcccaaacacctagaaatgctttctccatggagaggacctgacacagagagggatgcttgtatcagccatgatcaagagaaatgagtgtccctgatctccaagagcctggaaacccctgaggaacagctgctgccaacagagcacagcaagtcccagccccagccccacggcagggtcggcctggcattgtggagctggagctcgtggccaccctcctgtcctggcagcgccggccccacggcatgcccactcccagccctgggaggacctgcccgtgggggtttctggcctcagcacaactctgcttgatatcggccctttcaaatgagagctgaagcctgctagccccctgaggagaggggtctgggccactctgagtactcgggggaggcctcgtttagtcaaaggtgtcacttcgttctagtgcattccccacccgaagccggcctggggtgtctgatgagtccgcagatgcactgagggtgactcattccaggacctgctggtctcctgattgcatttttttaaattaaaactcctctcggcaaaactgcactgccaccagagtcccctgggatgcgggatggactcattgtttaccagcctcgggctcccacggtctttgttgaatgaacttagtcactctgaatttttcacaggagttcaattttagcaaaagaaacctggtgctgcttagtatggaagcacattggactcgtcaaacgctttgcgcgttaacactgactcactatgacttaaccatcagcaggtccaaaaattagactctcaactcctgagtctctgcagccaacaggccccatgttaacaaagcytgagcacactgtgtcagcggagacatgctgagtgttcagggcaacaccctctggatgccccatcacaggcccagctggcatgctgcagggcgggctctgcaggctgcctgtggacccaccactgcagtcacttgggggctacctagcaccacctctaatccacaggattcaccacccacatctggcccacggatgcagccagacgaggtgtggacacatggttcggaggaatttcagaagttaagctgctgctccagaagtcgaatgcctgccctcagggcatcccacgcactctttgttacatccttaagagcaatttaaaagagatcaaataaaactgtgccttgtgaatttagttattaacctaattagctattaactacaaatccaatcaggtagagtcaatcaataatttcctaagattacaccctacccgtttgattaaatgaggattaattcctgagtgatgagatttctatttagctagggccaatgtaaaagttaagcctagaataaaaagtatttgtacgggccaggcgccacacctataatcccagcactttgggaggctgtggcaggacagagccaagagtttgagaccagcctgggaaacatagtgagactccatttccacaaaaaaaattaaaaatttatgtagttttgttcaggcatggtggctcacgtctgtaatcccagcactttggtatgccaaggcaggcagatcccttgagcccaggagttcaagactagccttggcaacatagcaaaaccctgtctctacaaaaaataaaaaaataaaaaattagccaggcattgtggagcatgcctgtggtcccagctacttgagaggtggaggtgggaggatcacttgagctgaggaattgaaggctacagtgagctatgattttgccacactgcactgccgcctgggtgacagcaagaccctgtctcaaaaaaaaaaaattgtactaagattcagtcatctcaatttcaccttaagaagcaaagacaggggcgggtgcagtggctcacacctgtaatcctggtactttgggaggccgaggtggacggatcacctgaggtcaggagttttaagaccagcccggccaacatggtgaaaccctgtctctgctaaaaatacaacaagggctgggcgcagtggctcatgcctgtaatcccagcactttgggaggctgaggtgggcggatcacgaggtcaagagatcgagaccatcctggccaacatggtgaaaccccatttctgttaaaactacaaaaattagctgggcatggcggcgagcgcctgtagtcccagctattcggaaagctgaggcaggagaatcacttgaactagggaggcggaagttgcagtgagccaagatcgtgccactgcactccagccctggtgacagagtgagactctgtctcgaaaataaataaataaataaaaataaaaatacaacaaattagctggctgtggtggtgca

SEQ ID NO: 94394 - DNA, 33898 bp, Homo sapiens
atcctgaagggactttgtgctgtgaaaaggaattgtttctctctagcccgtaggtagttcagagccattaaacttttcaagcagagacctgatatagctagatttgtatttcagcaggatcaccctcagaggccctgtgatggtgggctgtgcaggcagtggataggggagagatggtgaaggcctaagccaggcrcatggcaaggaggagacagggaaggatgtttagcggtggcctgggctccgtgctgccttcctcacactgaagccagtcggtgttaaatcccccaggaactgtgctggaggaaaactractcagagcctcgaggtggatgggccacgtttctgggagtctgtggtgattcctgtgttcccctttcctttgcagtgacaaagctgcaggtgagcaaatcgaagaggaccctcaccctggtggaaaacaagcccattcagctgaactgctcagtcaagtctcagaccagccagaactcccactttgcggtgctctggtacgtccacaagccctcagatgccaacggcaagcttatcctgaagaccacccacaactccgccttcgaatacggtacttacgtggaggaggagggcctgagagccaggctccagtttgagaggcatgtgtcggggggcctgttcagcctcaccgtccagagagccgaggtcagcgacagcggcagctactactgccacrtggagtagtggctgctgagccccaactatgcctggtacaagctggcagaggaggtttctgggcgcacagaagtcactgtgaaacagccaggtaaggccgcagggcacggctgtcctgggccagtgggtttagtgcagagactgcctgggggtgggtggggctctgtggggctggtgtggagagactgtctgcaaggtgcatgctgagtgtgggtgcaggtacacagaccatcaccctagcacactgcaatcccatccattttacctgcagtgggtcctgctgctgatggcagactcatggaagcatccttgactctgcttctgtggatagcatcttcaccaaggagcagggcagctgtggttagcaaaatgtggcaaggcagggttcatggcagctcctgaatcttcttctgggtttgcagtttgcaccctgaatcttgggcttacaccagctccacacccagagttcctacctagaaggcattttctggtcttatgcatctgcatcccccttctttcttagcttccagcccagcccagacaagactttcctgtctccaaactgaatcattcctcctctggcccttcctcgaccccgtggtgtagcccttattcctctccctcacaggtggcactcaacctctgccagaatgcttccagggagggagagctactcactccacaagcctcagttccacttttgggcagctctgattgttgaaaagttcactttcctgtaatttcccttttgagatctgcccatggaaaaaccaaagagaagtctgcgtcatttcctttcaaatacatgaaatgtatgccccttctctgttaaagatctctagttctttcaacttctcacatagtgtagccttaagggcctctccatccctcattctcacatccctacaatttgttgttgtctctgcctgtccttcctgatgggccatggagggtgctgtgttgccactcttagccttgctaagagtgacaattctggcaggctgcagaccatgtgtggaccttgatctgagggcttagaggcttcggcctgccagccctgtgggggcacccaccccatctcttctcattgaatggggcagagcaggtgagggcatgatggacagatgggcctcatccccctgcttccgttgcctggggtcctcggtcagcctgtctgctcagacccctgaaactgggggttgaggaaggaccctcctggatcatgtgactctgttcagtccaggtgagcagggtccttggagtgacatctcctagagcccagcctatagccctgaaagttggggagaggacctgttaggagaagcatcccctgccctggggttgtagaggtgatctaggctcctcagaccttgtggggcctcagatgcttacatctccagctcctcctggcatgggcatctggctgcagcccagctctgtggccccatctcccagggaacctttggtgtaatctgcctcccgctgaaacccagcctcattcagccccaccgaggctttcagagttcaggtctctcattcagggtttgagaccccaccgggctcagagagacctgcagcctgcagcggtcccagatcacacagccccagggatgggaccaggagccagcccacatcccacctgcagcagttcctgtgcctttaaagcctcccctccccccgccccacccccaggccactgggggagggaaggaggagctgggtcacagcagggaatcttagcttggttttggtgtgctgctggacgaccagaccgggcgtcgggtgagcccagaagtgagagcagttggctgcgccccagtgctgtgtgacccagaggcgccacacaccctctctgagctggtggacatcataggtggggaagctcaggtcagggcactcccatgagtgtctggaggcctgagttccattctcagctctgccatatgcttgctgcgctctagaggagttcctcttcctctccgagcctcggtttatgtacccgtgcagtgggagtgagttgcacttcggggtgaagggggcaagacttgtgtgggcgcatcctgcagagggatcccacagaaggggagagccctgggttctttatctgactgggtctgggctgggggggcctctgtttcttggctgaygagtttatgtgagtttgagtgaggtatgcgggtgggtgaaggagggctggggggagtcacctgacttgtgcgaagaagctcttgagagagccgtggcttcttggaattaagaggaaagagtgaagcatgaacaaacaggccctggaggatctggcagccctgagtgggggtggggggtcagctctggagtagagccagagctgtgatggggttgggggaccctgtgtccttgggccatgcttgcctcgctcctgggttctgtttgtggctgtggattggggtagggcagggccggttgtgcgaggggtcattgcccaactccagggggcacctgccacctctcagctatatatatagggatatatatagttctttcgacaggtttccagcaggttgtggttattaaatcttactgaaggggtgttttttctgattctcaactctgtgccgcaagggtggaaactgtgagagacagattccaactccacttctgggtagtaagcatccagtccaggggtgtagacggtcttggggaagcygccagagatctgtacattctcatatccagggatagcgacttcaggctgggggctggcagggtaaggggtgggtgggtcccaggctcacccacaggtctgcagacttcctggggccagctgacctcggtaaatcccttttgtctaagcttcagtttcctgcctgtgaatggggttggggctgtgctctggtttcacccttgtggctctggggttgtggtgacaaagccatcaagctgggttgaaggattaaccaggaaacctcagactggctgccktgtctacctcttcctcctactcctctctctgctacatcctgggaagctgctctgctcagcctagatgaggctcagttgtgtgtgtgtgcacgtgcttgcacgtgtgttggaagtgggtggtattgacrccagagtcagtgtctcygggtgagtgaggcttgcacatttctcgggacagggaactcactaccttatgtgcccaggacaagagctgtggggtctggagaagacttctaggccagcccctgcagtctttcctcaggtgacatggcttccccagacccacttccccctaggtgccctctctgcattcagggggtagagggctgactgggacagaatgtgacacactcagcaagtgaggaaaagcctccttcattctgtaggccctacctctattaacatgtcctttgataaagtgcctcccctcctgtctcccctctctggaatcctcagctgctgccaggcttcagctgtgccccatkgaaggcagctctgtctccctactttccccagcccagggttttccttttggggtcagctgcagggatctgggccatcctttacccactcagactttcttcctgcccacctgctgctgtgaatcctgtatgtcatatatatatatatatawtatattatataatatattatataattattatatttatgtaatttatataatatattataatatattataaatatatatagtattatatataaaattatactttaagttccagggtacatgtgcacaacgtacaggtttgttacatatgtatacatgtgccatgttggtgtgctgcacccattaacttgtcatttacattaggtatatctcctaatgctatccctcccccctcccctcaccccaccacaggccccagtgtgtgatgttccccttcctgtgtccaagtgttctcattgttcaattccaacctatgagtgagaacatgcatgtcttatakgctctcaggcagagaggaaactgctgagcagggcaggggacagagccctatggctctccactttagacccctcccggctgactgccatggaattcagccacttagcagggccaaatcccctgatgttcctgttggctgtctagccttcagggacaggtcatggggccttggttcctgccctgtcatcttccyagtcaccctgatcttcagggggaggaayagcctgaraaagggcttggtcatagcacctccaccctagggctattgaggatctcacagttgtgtgtctggtgggttctgtccagagcccatttgagagcagtggatgacaggacaggcctatgtgacccaggcaggcagcaatattgggtcagccttcatgtccccttctgtcagcttggggcagcttggaaggatgattgtggggtaggtgttatgggcacggaatagacctcaggtggaggctgcaggggctctccggcactgtagaccaggatcaggggagggagccatgactcagggagactctggcccatatcsttggcagatgagggccacaggggaatgggcagcactgtccaaagtcccctgggctgggtccgcagctgttcctggctcagacttcttggtgggctggtcagaaacatgcagtaacttggggcagttaccaggtggccaagtctgcactgctgggctctgtgagcttgggccagctcaggccctctctgggccctgcctttctgggctgttcaggtggttccttgggcctggggtgctaatgtttctggatgggcagcagaaccagtctgcactcagggccccaggccatgttcctggaacacacctttagcattgacagcagcrtgtggtgaggccccttagtctgggttctggtctagtgccaggggcaccactactccaccgcctccagagccatctctgggacactggctgtgmgttcagatgttctgaacagggacagggagagccagagggacccagcctggggctcwctggaggggctygtgggcagacagtgccctttggagggaactgagtctgaaaggaaggaaaccctttccccggctcatagcacctgccatccagggccctgccagggctgcgtgaactttagtcatgygrtgacaggccgagtcaccgtgccaagtcactgtgcgcctccttgctgctgtgacgtcagcttccccatcctcccagccaggctggatctctgtgagaggcctgcctgtcctgcaccctgtgcggatgcctcccactgtccrccrgggctgctgggcaccccctggctggtctcttggactaggtaagctcatgggtcctccggccgctcctgctctttccctgcctctgctcctcctcggaggtggccaccccyagatcccagtcccaattyggaggccccctgaggagtgctgcagggggccgcaggcgtggctctgagccactctggagagtgggggtgcccagccagttctgtggctgggactttcccaggcagacaagtctgtctcttcctccccagcrggtgcagcccagaactgtcttctgaggaagaggtgctctcctgggcccccactgtccccaggcctcaggtaagcccatcagggtcacaaggaagggggtctgggtttgaggccaaccatggcagctgacctactttctagcctcagtttcccctagtgtgtgcagctctcacactgtttgggtgagaaccaggcctctgggcttggacattctttcagtgagttttgagggtggagggatgggaaatggaagcccaggacctcagcagggtgtcttcctccgagccgtggacatctgcctgtgggaggctgggcccaccctcccttgctgacctgctctgggaggaagggacagggcccagcactgcctamtcccctccctgttcttcccagcagtctgagcctggctgggtgccccctgctcctccaggtgcctacttgggcctttgggtagagagattaacagacrggggaggctgggtcatggttggaccaccccaggatcctgactgggggctcagctcatgaccctgagcctgggagagatgaggccatgccctccagggcactcagcatgacccggcccagtggacgggactggatagcttccttggtgcagggggctgtcatgctaggacagggtcactgaccaggccaggcccctgccccatgacttgtggtggaaatgtccttttgtttttgttttttgcttttttttttgagacggagtttccctcttgttgcccaggctggagtgcagtggtgcaatcttkcctcactgcaacctccacctcccgggttcaagcaattctcctgactcagctcctgagtagctgggattacaggcacctgccaccatgccaggctaattttttgtatttttagtggagatgggggtttcaccatgttgtccaggctggtctccaactcttcacctcaggtgatccacctgcctctacctcccaaagtgctgggattataggcrtgagccactgcacccggccatgtgatgggaatgttctgtgtccataatagatgctgcatattgctggcccagctcctgaggctctttggacctccaggaatcggtgtctctaycaggaacccttaaccctgacccrgactcccggctgggacccagggtgttggagtggcaggagcgctgtcaggcttggtgaagggtgtgagctgtccaacggggcaaggaggaggcagggcctgttctgtagttggacagacagagccctctagctgctttctggaagactgaagggcaggygatgttggagggagggagtgcaggcaggggctgtgagggagttcagrtcagaaacaggtggcgcctggattcaggctgtggtggtcacggtggggatgaggggctgctttggattrtgctggggatgtgcggtggtgcgctgctgtgtggctactgccaggtctctctgctcttggtgtctgcatccagggctgggagggggtcaaatgtatcacactatcagccccaggcccaccaagcctggggaggtggccacccttccacgatggcatttggatgttccctgtgtgtggggagggcacagggactccattcrtagaccacctctgggacagtgtgtctgcctctgaggtcagacgctctgcactgggacagggtggagtggagggaaacccagcttggggctcattggaggggcttgctggcagacaccgccctttgtgggaaactgactgtgggagaggggaaccccaacctctgtcaccacatccctcttccctgttgtcacacctgtcacttgctgccatagccatgagacttcccaagggtcactgctgccactcactgcacagcctggaagggagtccacaggggacatayagtgagcaagagacctgtgccactcaggcctcctgggggtgtccccagtgcagccatgatgataatcacagctaccattcaccaagtcctgcccacagtctaacctactctattcacaacactcccagcagcaaggcaagtgaggtgctgccatcttccaggctggacagttcagtgatttgcctgaggccccacagcaggtgagtggcaagtccagcatcagagcagggaaggctggcggtgccycctgagccccctttgccatgcttaccacatgcacatcctgggcttctgcaggaatgccctgtcccctacctgccctgctccgtgcaaaaccctctttgagctgtgcctgggagacatgctgagagaattcatggaaacaaatgtgttactgacagcctctttgcctccagagttcaactggagacagaraaaccagctagaggcagagggaggtaacccggagtcccccagaaaggtctgggctgtgcgtgcttcaggtaacctcccttgaccttcaggagaacgagaaggctgcctgatcagagagtctctgaagaagattctgtggctacaggcttcagcagagtgtgagggagaccccagttatttcctcagstgtttccaccaaatcctcctgtctttcgtggccaacaccccaggcaaggcttggggcccccgtctgctgctggacggtaagtcctggccccgtggcagtgaatctgtggggcgctctgattgtgggcactatggaagctaaaccccatgctccaggtggggtggagggtcttcagaggactcctggacagtgccaggctctaggctggggtgggggacacaggagaaaccaggccaggcccatccctgctggagcttctccctaagcagtggaggctcagccactgtgaggaggtaggccaggccctgcagaaagaggggtgtggaaatctgggggctcccaggaagggccgctgctggagatggggttcttaccaggatgggctctgaagacaagcagggaggatttgggagggtagagatgaggcccagagcttctggcagagggcatggcctgcacaaaggtctgggggccggacagcctgcacgtattctgggaagcgggaaggagacacaggccttgtgtttctgaggcccgactttagactgtgccctgttggggaggggccagggaatgtctgaggctgggcctgaccctgctccttaccccgtgggagcagcagagccatgaagaagaagttagtggtgctgggcctgctggccgtggtcctggtgctggtcattgtcaatctctgtctctggctgccctcagcctccaaggaacctgacaaccatgtgtacaccagggctgccgtggctgcagatgccaagcagtgctcggagattgggaggtgagcggggcagggcatgggacatgggccctgaaaactgggcaagtggacctgagcaatacsttcacccctctgagactcagtttccccacatgtaagcttcgcttggactccctcagtagcctttgggaaggggacggtgactccgagagcagggtgtgggtctctagagccaaacaggccccttttctcagttctaagagtctctgtctctttggataaactccactgttttgttgtttggttgctatttttacttatttcttcctatctatctatctatctatctatctatctatctatctatttagagatggagttttgctctgttgccaggctggagtgcagtgatgcaatctcagttaactgcaacctccgcctcccaagttcaagcgattctcatgcctaagcctcccaagtagctgggattacaggtgtgtgccaccacgcccaacaaatttgtgtgtgtgtgtgtgtgtgtgtgtgtgtgtgtgtgtgtttgtttccgagacagagtattgctctgttacccaggctggagggcagtggtgcaatcttggcttactgcagcctccccctcccaggtttaagtgattctcctgcctcagcctccacagtagctgagactacaggcatgtgccaccatgcctagctaatttttgtatctttagtagagacagggttttgctatgttggccaggctggtcttgaactcctgaccttgtgatcctcccacctctgcctctcaaagtgctgggattacaggtgtgagccactgtgcctggcctaattatggtgtttttagtagagatggggtttcaccatgttggtcaggctggtctcgaactcctgacctcaggtaatccacccacctgggcctcccaaagtgttgggattacaggtgtgagccaccatgccyggcttattcttttctttttattttttggttaggagacaatttctttctttcttttttttattttattttattattattatactttaagttttagggtacatgtgcacaatgtgcaggtttgttacatatgtacacatgtgccatgttggtgtgctgcacccaccaactcgtcatttagcattaggtatatctcccgatgccatccctcccccctcccccgaaggaacgctgttgcccaaacagggacatgaagggcttattctttttttaaggtggagtgttactctgtcacccaggctggagtataggggagcgatcatagcccactgcagcctcaaactcttggatttaagtgatcctcccgcctcagctycctaaagtgctgggattacaggtgtgagccatggtgcctggcttctactgtkttattctattttgggctcttatctcatgttatatataaagatcagttcccttctaaagacttaaacagaaaaaatattatgtttttcatattttgagacagggtcttgttctgtcacccaggctggagtgcagtggcatgatcatagctcactgcagccttgaactcttgggctyaagcgatcctcccacctcagccccctgagtagctaggactacaggcgtgcatcayacctgactaatttaaaaagactgttttgtagagacggtctcactctattgcccaggctggtcttgaactcctggcctcaagtgatcctccaccttggcctcccaaagtgctgagattacaggtgtaagccaccatctctagcagggaaaaaaaaatgttattaataaagtatagcaatttccctttttgtcccaattataaaagtcatgtacatttgtttgcttgataaagaggaaactgtctgggcaaggtggtccacacctgtaatcccagcactttggggggttgaggcgggcagaccacccgaggtcaggagttcgagactagcctggccaacatggtgcactctgtccctactaaaaatataaaaagttagcggggcatggtggtgtgcgcctgtaatcccagctactcaggggctgaggcaggagaatcgcttgaacccaggaggcagaggttgcagtgagctaagatcatgccactgcactccagcctgggcaactgagtgaaactctgtctcagaaaaaaaaaaaaagaaagaaaagaaaaagaagaaactgtaatcccagcactttgggaggttgaggcgataggattgctttagaccatgagttcgagaccagcctgggcaacatagaaagaccctatctctacaaaaaagacaaaaaattgcccagtgtggtggttcttacctgtagtcccagctactcaggagactgaagtgggaggattgcttgagcccaggaggtcaaagctgcattgagccaagactgtgccactgtacttcatcctgggtgacaaagtgagaccctgtctcataaaacaaaggctgggcacagtggctcatgcctgtaataccagcactttgggaggccaaggtgggtggattacttgagcacaggagttcttgaccagcctgggcaacatgatgaaaccccatctctacaaaatacacaaacaaacaaaattggctgggcatggtggcatgtggccacagtcccagctacttgggaggctgagatgggagggtcaattgagcccaggagactgaggctgcagtgatctgagatcacaccactgcactccagcctgagcaacaaagagagactttgtctcaaaaaaaaaaaaaaaaaaagaggccaaggcaggcagatcatgaggtcaagagatagagatcatcctggccaacatggtgaaaccccgtctctactaaaaatacaaaaattagctgggcgtggtggcatgcacctgtagtcccagctactcaggaggctgaggcaggagaatggcttgaacccgagaggcagaggttgcagtgagctgagatcgtgccactacactccagcctggcaatagagcaagactccatctcaaaacaaaaaagaaagaaactaaaaacaaaaaccccaaaactcgaatggacttctcttccaycctcctttgggcaggtaggcagcagggtatgtatgcggtgccagggtggaagcctgcwggttctcatgcctttatgtgccacatggcagggacacactgcgggatggtggctctgcggtggatgcagccattgcagccctgttgtgtgtggggctcatgaatgcccacagcatgagcatcgggggtggcctcttcctcaccatctacaacagcaccactcatgaatgcctcggaagaggagagggagaggggcaggggttgtgggttgggccgaggcacagctgggtggcccccaggctcacgtggcataaagggtttkggtgggtgggcctgcctacctgcttctccttctaggaaaagctgaggtcatcaatgccygmgaggtggcccccaggctggcctttgccagcatgttcaacagctyggagcagtcccagaagggtaagccatgctgcagacttggggcrtgggtgcagagctggctgagccacygggaaggggccttgcycacaggagcctgctcccgtcagggttcaggggcagttctagcaccccccatcccttcctggccccatagcaccctcccacaatgagtggtcaggaccatcatcaccacggtaaagggccgggagcttctgttatttctgctaaggcctccggggccattctgtgcagcacatggaaagaataattattatgctagcagacctcatggaccagggctcactggggcccacgctctgctctgtgcttttcacccacgagcttctcacaaccctccctgctcctttgggcwaggggatgctgtgtggattcccattttacagggtggggatgctgaggctcagacaggtcatgcaaatcagctgaggtcacacagctgggaggtggtgaagctaaaattgawcccaggctgtctatatcctgccttttcaacaggcatcccattcactcatttgttcatttgtggggatggcgctctagaatgtgaggtggagtctctcttttctaatctggtcttaagtggrgaggaggcccccaaattccccaggtacctgargggaagccactgtccatccaggaagccactgtctgwccccaaaggaggcacaatagaktgtgagataaaagttggaggatgggagggtctcaacaactcaacrcctctaatcctagcactttaggaggccaagtcaggaggagtgcatgagcccaggagacctgcctggacaacatagcaagactccatctctacaaaaaaatggaaaaaaaaattagctaggtatggcggtgtgtgcttatggtcccagctacttgggaggctaaggtgggaggatcacttgagcccaggaggttgaggctgcagtgagccatgattataccactacactctagcttgggcaacaaagtgagaccctgtcaaaaaaaaaaaaaaaaaggttgggcctttttttcacaggctcacgcctgtaatcccagcactttgggaggctgaggcagatggatcacctaggtcaggagttcaagaccagcctggccaacatagtgaaacccattctctactaaaagtacaataagtcaggcgtggtggcacaggcctgtaatatcccagctactcaggaggctaaggcaggagaatcgcttgaacccaggaggtggagattgcagtgagccgagatcatgccactgcactccagcctgggcaacaagaacgaagctccgtctcaaaaaaaaaaaaaaaaagttggaggatggaggggcaggacacactcaccatagcaggtcttagacttcaggtgggggtcctgggtggtgccctttggagtcttctgcaacatactcaatctttgatttttttttctttttttttttttttttttgagacggagtctcactctgtcgcccaggttggagtgcagtggtgcgatctcggctcactgcaagctctgcctcctgagttcacgccattctcctgcctcagcctcccgagtagctgggactacaggcgcctgccaccacgcccggctaattttttgtattttttagtagaggcgggttttcactatgttgcccaggctggtccctcgatctcctgacctcgtgatccccctgcctcggcctcccaaagtgctggaattacaggcgtgagccactgtgccccaccaatctttcatttgtttttaatactcattgagaaactcagcatctgtagacatgaagttgctcagggtaagagaatgcgggaatcataggcttggcaccttgtggatgcttagaatcatttatttaactagaatgtattgagcattgtcttaaagaatcagctgttgttcctgaagctggggtgaaaaacaaagacggcagatgaaatctgtgacactccaggtgggaaaagaaactaggcaggtgccggtatgttacgggctgtagaaaaacagacctggagggcctcaaaatctgggactctatggagggtgacctagtcagggaaggggacatctgagcaaagacccagaggcagagatggggtcgggggagttatctcctggtctgctatccaggtgtgatggcagggacagagccctgtggggagctggggaggctgcagcaagtgatccaaggggaatggcccaggttgtgcgggatctcttaggttatggtgaagcctctgcttcctgtctgagggaagtgggggctcgtggagtgtgtgagtggaaggggatggatctggcctatggaccccttggattgctgtgtaaggggcagggagcatgtggggacctgtccggaggtcactgcagtaattcgtggagagggtgctgggaagtggctgatgctggacagacacacttggaagtggagcctgtggatttgaggatggggtgggtgtgatgcttgtgtagggagtccccagggacccctgatcttttgtctgtacctggaaggatggggtgaccctaatggaggcaggcagggttctcaggaagcaggttgagcagacactcaggagctcggttttgggcacgttgaagtttgagatgctttcttcaagcaggcaggtagatactcaggtctggtgatcagaggagcagtccaggccagcaggtcaatttgggagttgtcagtgcataaatggaggctgaagctcagatgtcaagcagaccaccaggagagagagcaaagacagaggggagagtaggagctaggatggcaggcaggggatactcgggtggagccaggtgctgggatgcaggggcggctctcagggagagtgatgagcccagtaaagctgagaggggcactgggtctggcagtgtgggtgtcaccagagaacttggcaagtgtggtggcatgagagtctgattggcctgaggtcaggagaagattttttttctgatgttgatacatgatattttctatatttatgggtacatgtgagtgcttgttacatgcagagagtgtataatgatcaaggcagggtatttggagtctccgtcaccttgaatatttttctttctgggtgttagcaccatagtcctctcttcattactttgaaatatacaaaatactgttgctaagcatcgtcaccctggtctgctatcaaagattagaacttctcctgtcttggctgggcacggtggctcatgcctgtcatcccagcaccttggaaggctgaggtgggtggatgacctgaggtcaggagtytgaaaccagcctggccaacatggcaaaaccccatctgtactaaaaatacaaaaattagcctggcgtgctggcctgtgcctgtaatcccagcgactcgggaggctgaggcaggagaatcgcttgaacctgggaggcggaggttgtagtcagctgagatcatgccactgcactgcagtctgggagacagagcaagactccatctcaaaaacaaacaaacaaaaaaacaaaacaaaacaaaaaagaacttctgtctaaccacaaggtggaaggaatcatgtgctgggtgtcagaccttccgggatgtatgtgcagcttttaggaattgaaaccaccagctcttggaaacttgtgccaggcttcagggtgggagaggcagttttagagctgcagccgccaagccaagccaaatggccccatcatctctcgcaagagcaggagagtacctgggggcagaggccatagttgtacctttctaggcaaagggtcagtgtctgtagtgtccatatgggcagtggggctcgggggggaagcaggcccaggggtctgtttccaatgacctcctcaaaagtcagaactggaaggcaaaaccccttatagactgggtgcacctgtaatcccagcatgttgggaggctgaggtgggaggattgcttgaggccagagtttgagaccagtcttggcaatgtagcaagacccctgtctctacaaaaaataaaaataaaaaattaggctgggagtggtggctcatgcctctaatcccagaactctgagaggctgaggaggatggatcacctgatattaggagttcaagaccagcttgaccaacctggtgaaaccccgtctctgctaaaaatgcaaaaattagcaagccatggttgtacatgcctgtaatcccagctacttgggaggctgaggcaggagaattacttgaactcgggaggtggaggttggagtgagccaagattgtgccattgcactccagcctgggcaacaagagtgaaactccatctcaaaaaaaaaaaaaaaaagccacatgtagtggggtatgtctgtagtcttaggtacttcagaggctgaggtgggaggatcgcttgagcctgggaagccaaggctgcagtgagccatgattgcaccactgcactccagctgggacaacagagtgagaccctgtctcaaaacagacaaacaaacaaaaacccttatagttggatggagaaactgaggctgggagaggggacaggayggaggttaaggctcagtcttgcctatctggggcagtagaaaagaggaagggagccctttcttggggctggctgtgtcttgaaggtggcctgtgcttgacctgggtcagggtgggatctgctcttgttttggcacattctggtggagcccatgagtcttacaggataaggccttgtggtcagtgagatgggagggggtctggcctggcacaggattttagacatgcaggcacctgcacagacagacacctcatcctgggacagcaaaacccagccgcatgctactgcttcccctcctgtgccctcctcagacatccctggtccatgtacactcctacctgctaagcccctcttaaaaaaaaaattaaacatcccctcctaaaaaaaataataaaataaaaatcaggaggctgaggtgggaggattgcttgaatccaggagttcgagatcaggctgggcaagatggcaagaccccaactcaaaaaagaaaaaaaaaatctttcctcctaagcctcattgccccatctgtaaaacgagtcagggactgtgcctgggatgctgcctgcgagagatcccgatgtcccccactcagggtcactaactgtggctctctctccccaggagggctgtcagtggcagtgcctggggagatccgaggctatgagctggcacaccagcggcatgggcggctgccctgggctcgcctcttccagcccagcatccagctggcccgccagggcttccccgtgggcaagggcttggcggcagtcctggaaaacaagcggaccgtcatcgagcagcagcctgtcttgtggyatgtctgtgggtgcggccccctgacacaggcagggcaggcacagcccaaggaccttgcaggccgtagcagcagtggagcggccctctgccttcaggaccctgygctgataatgggatgaggagatacagacccttcccaccacgtgtggggacacattctgagcgtggggacacattctgagcgtgaggtcccagtggccactgtggctggccatgtgtcctgagtggcaagggacactagaakgttcccggaagggacactaggaggatgagcgctgagtgacagggccacccacctgtgacaggcgctgcccctgctttgtgctggtctcctgtgtgggcaggtgtggggggtggtctagctragtccaccccacctgctgcctcacatgagccccctctgccccagtgaggtgttctgccgggatagaaaggtgcttcgggagggggagagactgaccctgccgcgggtggctgacacctacgagacgctggccattgagggtgcccaggccttctacaatggcagcctcatggcccagattgtgaaggacatccaggcggccgtgagtgggtaacctcaagggcctgggtaaggaactctgcagtggaaaccctgagctgtagcccagagccatggggtcctcctgtcttgcctgagcctgcaggaagttcctggtggaggagggtcagtgactagccatgtgggtccacagctcctgcttatatcaaaaccaagagaggccacacagtccaggagagcaagtccctgttggggtaaatgcaggtgwaggcaagagccagggctagggaagcactagaatacagcctgaagatccaggaggacttcttggaggaggtggcggctgggctgcagataactttgttaggcagagagaggaagggattcctagcagaggaacagctgggctaaggcccagtagagggggctttgattcaccaagggggttacaagggatgagggtcgccttgagagaggcatggggaaggggatttgtggggcaggggcctggagcttggctgtggctttcttcaggtaatttttgtcactgtttcatggaggagggtgattagcatgtcgacctttactactgaggctggaaattggcgtgccaataccctgtctgtctggagctgactccaggagaattaagagcctccctccctccctctatccattcatcgtgaggagaagaggccaagcagcagggacaccggcaggaattctccagttagaaaaggccctctgagccaggtgtggtggctcacatctgtaatcccagcactttgggaggccgaggcgggtggatcacctgaggtcaggagttcaagaccagcctggccaacatggtgaaaccctgtctctactaaaaatgcaaaattagtcaggcatggtgggttgtgcctgtaatcccagctgcttgggaggctgtggcaggagaatcgctagaacctcgggggctgaggttgcagtgagctgagattgcaccactgcactccacagagtgagactccatctcaaaaaaaaaagaaaaaaaaggccctctgaggccaagcttggtgtctcatgtctgtaatcacaacactttgggaggctgaggtagaagttgaggccaggaggtccaagacaagcctgggcaacatagtgagtctacaaaaaaagtattgagaatctacataaatatagtgggggtgggggtggggaacaagaaaacaaaaaattcaaagcatagtgaaaagaaatatagcaaaaccyggccgkgcatggtggctcatgcctgtaatcccagcactttgagaggtcgaggcgtgtggatacggggtcaggagatcgagaccatcctggctaacacagtgaaacctgtctctactaaaaatacaaaaaaattagccaggtgtggtggcgggtgcctgcagtcccagctacttgggaggctgaggcaggagaatggcgtgaacctgggaagcggagcttgcagtgagccgatatcatgccactgcactccagcctgggcgatagagtgagactccgtctcaaaaaaaaaaaaatagcaaaacacaacaaaaaaaattaaaatttgctgggtgtagttgtgcctttagtctcagctactggggagggtctgctggaggatcacttgagcccgggagttcaaggctgtgattaagccactgcactccagcctgggtgacagagcaagatcctatctctaaaaaaaaaaaaaaaaaaagaaaacactctctggccacagatgagagaaggcagacaggaagccactaagccaagcaggcagagggcaggtggccccagaccagctgtcgggtggtgagcagtgtcagggagacaggagtgccggagctggtgaggttcccaaggaggtgaggttgcctgtggcctcctcccagggcacagtcccacccctccagtagtgcactctgtcctcccttgtaggtacaggcttttcctcaccaccatggtgcagccatgcctgcccccaacaccactggtgcagctccatcctccacgcagtggtgcagccccatcccagtgcccattcgagctgctgtcccgtcgcagggggcattgtgacagctgaggacctgaacaactactgtgctgagctgatcgagcacccgctgaacatcagcctgggagacgcggtgctgtacatgcccagtgcgccgctcagcgggcccgtgctggccctcatcctcaacatcctcaaaggtgagtggtcgcaccacagccgtgtggtaggacccatgacactgcctctctctccccacgccccacccctgctgcatctctgctcgccctccatgccacgtctttccatcactgagctcccgaggcgtgtccctgcgtcacagctcaccatgtcctgaaggaggcagtgcagagcgacagggctgaagcgggcaatgctcaagggttggaggaggaacaggagtcatcaggaaggagagaggtgcaggagctcagggctgcagggcctggtccagagggtaccctggtccagtgggtgaccctgccacttggtcacygaatggccagagctgatgcgtgacgtgaggtccaggctcgggagccctcaccttacttcactctcaccacagccttctgaagcagctgctgctattggttattaaacgctccttgaggtgggcaaagtggctcaggcaggtgttaaccctctgagcccctcagagcctctggggctcagcaacatgcacctggctctgatcaaccagggtacaacttctcctgggagagtgtggagacccccgagcagaagggcctgacgtaccaccgcatcgtagaggctttctggtttgcctacgccaagaggaccctgcttggggaccccaagtttgtgaatgtgactgaggtaaggggcaggggctggcccactgtgggtgtggggcctgctgtagaggcatcaggtgggctccccagggtggctacagcctcacatacgctttatgaatccattcctgccacgaactttgattgcgggcctactgtgtgctcggatggactggtgggtgacccccagtcttggcttctgccccacagaactgacagtgtggggaattagtggccaccctcctacctcaggtcctttgcacatgctgtggttctcgagtgttcagtgctgagatgaggaatgcatgggggcattgcagccctcgggcatggtgagatggatgggtgaaagggagagggccaggtgaacagagacctcggccacccactccctgtcactccaaactaacgcttcccagatgccaccctcagccctgcaccacctgacccactcactcagtagttgctccagctccacgctgggtccctataagaccctgtcatatcccttcccgctgaggatcctcacattcctccttacctacttgggtccttggcattcctgggtggatctgcagacgccccccacactgaccagtgacctcccaggaggggcgtcagctgcccgggtggtgtcttctctttccccgtgagcattctgcacctctgactcccgctgcagccagtgacctgatgtcttgtctctctgaggggacagagccactgcagcgtgtccctctgccctcccttttggctaaggccaactctttcatctactcgctggctcagggtgctgttcctacaatgctcctttctgcctctgacgatttacttctttatcacggattattcccaaaagaaaggcagctgttgttgctctagaaatttctatctgctgcctccttctgtcctttgctcctcttagagcaaacatggctgggctatgtcctctctcccttcagggtatcccctcccctgctctatccccatgccaccagatcgccatgtccagcctcagtttccccatcaagccccactcagcagcatctcacacagctcaccacactctcctcgagttttcattttgcaaattttcgcacttacaaaaatgtaaaaaaaaaccaaaactgcccaagcatcaatgttcccttttcctggagtctgcagtgtggacgtttctgccggatttcctaactctctccatctccacccacatctattgggattcgtgtttttctgagggattccacagtaggttactgatgtcacacctcagggtgtgtctcaaaagtgagacttgaacatagcacagcaggatgtcggggtgacacaacctgctgtcccttctctttacctacagtaggctcccttggctgttttgtttttgttgtgtttttgtttggacacagagtctctgtcatccaggttggagtrcagtggtgtgatcttggctcactgcagcctcaacctccatggctcaagcaatcctcccacttcagccccctgagcagctgggaccagaggcacgtgccaccaaacctggataatttttgtatgttttttagagacagggtcttgcccagactggtctcaaactcctgggatcaaactatcttcccacctcagcctcccaaagtgctgggattacaggtgtgtgtgtttttttttttgagacagagtctctctctgtcacccaggctggagtgcagtggcgctatctcagctcactgcaagctccgcctcctgggttcacgccattctcctgcctcagcctcccgagtagctgggactacaggcgcctgccactgcgcccagctaattttttgtatttttagtagagacggggtttcaccgtgattgcgatctcctgacctcgtgatcctcctgcctcggcctcccaaagtgctgggattacaggcatgagccaccgtgcctggcctgttttgttgatttttaaagcccagggcagtagtcttggaaaatgtcccacatcatggatttgcctttctgtttccttgagggcagtttcagacagaacacctttccctcggattggtcaactaatctgtggggtgttgctgaaactttattttattttattttattttattgtattttatttattttatttttgagatggagtctcgctctgtcccccaggctgtcccccaggctggagtgcagtggcgggatctcggctcactgcaagctccgcctcccaggttcacgccattctcctgcctcagccccccaagtagctgggactacaggtgcccaccaccgcgcccagctaattttttgtatttttagtagagatggggtttcactgtgttagccaggatggtctcgatctcctgacgtcgtgatccgccctcccaaagtgctgggattacaggcctcggcctcccaaagtgctgggattacaggcgtgagccaccgcgcccggtgtggaaactctcttgaggcattttcttcggccttcgggtccatcctctctgtctcctccttgacctcctcatctcctcctcgccactgccttggggaccttggccaggctcatggcatccagcagccactcaatgtcaatacctccatgttcatctctcagcccgcccttgcccgtgaacccatgcttatttatttattttttttatacttgcacccatgctgttcaggtctgatgaagtgtccaaaatcaagcttctgaccatccccaaacctgccccttctgcagggtttacctcgctagtcagcaccatccttgattcttctctttctcccacccaggccatcatctcttgcctggttgatacccacagcctcccctttgggatttatccttatccccgtcatagctgccagagggaccctgtgaaaacactccccagcctgctcattcctctgccctaagcctgcatggcacagagcaaaagccagtttttatgggacctaggaggtcctgtgggatgggccccagcctgcatcttcatcctcttctccccaccccactccattcactctctgcctatcgctcaccagcctataccacctgcctcagggcctttgcactgaccatttaggcyrcattccaggctcttttcacacrttgcctcctctgagaagccctccctgaccactctgcccatacctcatgcctcttgattccccttacctggcttgtggtttcagcactttccctgtgtgtgtttgtttttcttggcatgagggcaggacctaaaactgtctgttccctgttgattccccagtgccaggcatgcagtgcaaactctagaaatattttttgcatgaaggaatgagtgattgaatgcagcaagggtctggaggctgaggaccaggcagacagacattcagagttgctgaaacgcaacagagacagggagtcagactggtcatgcaaggtcctgggcctgcccttgggtcctggggagccacggaaggttgtgggtgccagagggttttggtcagagtcacagtcaggggccttctgagacctgtgccccctccccaccctccctccccacctcatcaggccagctctggggtctcggcaggtggtccgcaacatgacctctgagttcttcgctgcccagctctgggcccagatctctgacaacaccactcacacgatctcctactacaagcccaagttctacacgccggatgacaggggcactgctcacctgtctgtcatcacagaggacggcagtgctgtgtccgccaccagcaccatcaacctctagtaggggctgctgggccgcctgggtgggaaactgccagaggtgggtggcccagggaccacccacttatccagtcaggtggctccatcacctcttttcctggtgggaaactgaggcccaatcttggtagcttatcctgggcctctcagtgagtatgtttcagcctcagtgggtggatagggaccaggctggcccaggcaaggtcgggcgctgtctgaccctgctgggcggtagctttggctccaaggtctgctccccggtcagcgggatcctgttcaataatgaatggaygacttcagctctcccagcatcaccaatgagtttggggtacccccctcacctgccaatttcatccagccaggtatggggtggaggtccgggggtgggggactggggtggagaggggcgggtgtcctgggcaggcagctgacgggcatccctgtcttctcccatcagccgcagggaagcagccgctctcgtccatgttcccaacgatcatggtgggccaggacggccaggtccggatggtggtgggagctgctgggggcacgcagatcaccacagccactgcactggtatgcgtcaccccttttctccctggccctgcccactccgcacagcccccaagccatgctgatcacactcccatgccccaggccatcatctacaacctctggttcggctatgacatgaagcgggccgtggaggagccccggctgcacaaccagcttctgcccaacatcacgacagtggagagaaacattgaccaggtgggccaggggttggagaaactgagtcatggtgtgtggccccagggcatcctgggctggaggcctggatcatcacagagtgaacaatggttggtgtcctctctctagtgcctgggccatctggagcccctgtgccatgagggccaaaccccctgctccaatgagacccagcaggccccaacctgctcttcctgatgacctggcctgaaatggcaccacctgggctgaggcctgtgaccacacaggcgtggttcaggtggcatctggagccctgctcagccttcccctctccccccacccccaggcagtgactgcagccctggagacccggcaccatcacacccagatcgcgtccaccttcatcgctgtggtgcaagccatcgtccgcacggctggtggctgggcagctgcctyagactccaggaaaggcrgggagcctgccggctactgagtgctccgggcagacaaggctgacaagcaatccagggacaagatactcacsaggaygaggaagaggactttgggggacgggcttcccctgtgagcagcagagcagcataataaatgaggccactgtgccaggctccaggtggcctccctggcctgtctccccactctctgggcctcagtgtwttgtgtgtgaaatggagccgtctggctggggaggaacagagaggtgggattcggagatcttcacratgcgggcactggaactagcctcagcatcttcagcatggggagagccgggcacatggctgggggccaggggaaggttcacaccaagccctgccccttcccaccctgatccctcggactttggggccaggccctcccttactggggctgggcagtgacactacctaggatcagccaccagggggtgtcacgaccctggcgctttcttaggcagagggtggccagctgatgctgggaacctgggcgccttcycagacccgtaggcctccagctcaccctgccgatgacactggcggtgaagctgaggtccgaggaatggggactgggcaacaggctggaggaaaacatctcggtcagarccacgcccctcgggggttcccaagagcaagcccagagtgaaacccaagcttgtgatcctctccagagggaggcctggttctcagggaacagcaaacgggaagatgtccccagatcccagggatcagggcttggaccagctggggacgcagcccagagggagtgggtccagaaggaaacagctagacacagcagccttcaccattggcagcccctccaggcctcccttggggcctgctccctcctctgtgcacagttccaacacctggagcagggttctgggaagggctggtggaggtgggctggtgggaggcggtgatcacagcccagcacctggatatcaccaggggcactggggccaggggccaggtgaggccaggtcggggctatccttcaggagccccaaaaacctggtgattccaaagggcccatagacaaacagggttttatgcctgtggagtcaagtcccactgggtctgagctctggagggctgtgtctctggggctctgcaagggtgaggtggaggtaggctcaactggtgtacaagtcactcttcaatccttattttatttatttaattttttwwaaaaaaatttaaaccaatagagatggggtctcactatgttgaccaggctggtcttaactcctgacttcaagcagtcccccaatctcagtctcccaaagtgctaggattacaggggtgagccactgcacccggcctcaatccttattttggcctgagaggaaaagccgtggccccatttgcaggggagaagactaaagctggaggggcaggccttgctctgggttgcacagcagcaagagaagtgggagctggccatgagacttcctggacccgacacgctggtggggtacaccctggttctccaggtcccatggggctcagcccaggactacctcggggggtgagggacttaaatcctctccttcattctcatcaccccttcccccatcatttcctgaggaaggacattcagggacctgaaggggtggcctgcccctccacacctgtgggtgtttctcatcaggtgggacaagagactgagaaaagaaagagacacagagacaaagtatagagaaagaaaagtgggcccaggggacctgcactcagcatatggaggacccacgctggcaccagtctctgagttccctagtatttattgatcattatctctaccatctcagagagggggatgtggcaggacaatagggtaatagtggggagagggtcagcaggaaaacacgtgaacaaatgtctgtgtcataaacaaggttaagaaaaaggtgctgtgctttgatgtgcatatacataaacatctcaatgcattaaagagcagtattgccgccagcatgtctcacctccagccctaaggcagttttctcctatctcagtagatggaatatacaatcgggttttacaccgagacattcctttgcccagggacgatcaggagagagatgccttcctcttatctcaactgcaaagagtccttcctcttttactaatcctcctcagcaaagaccctttggggtgtcgggctgtgggatggtcaggtctttcccttcccaggaggccatatttcagactgtcacttggggagaaaccttggacaatacctggctttcctaggcagaggtccctgcggccttctgcagtgttttgtgtccctgcttacttgagattagggagtggtgatgactcttaacaagcatgctgccttcaagcatttgtttaacaaagcacatcctgcatagccctaaatccattaaaccttgagtcgacacagtacatgtttctgtgagcacagggttggggtagggttacagattaacagcatctcaaggcaaaagaatttttcttactacacaacaaaatggagtctcttatgtctacttctttctacatagacacagtaacagtctgatatctctttcttttccccacagggaccttcctggctgtgcctcgggtcaggaccagaatgacacccattcgtttccctgggcctttgctcggatggtccctgcaccctggcctctgcctgatgaggatggtggggagaggaggggggacgtcccccacactgctgtctccactgttcctgctgcccaggcctctgggcttccaggactgcagcgggtcgatgggtgggctggcctgagccgaggaatgcacttcagctcctggttgagcaatgtcactgaggcttgggagtcgggtgggggcaggaggaggtgtccacaggcccccataccgtgagaggcagccgtgggaacagcctacctctaaacaatcactgcagcccaggctgaccaggggctctggccagacataggggcctggcaggctgtgtggcctgtaaggacacagtctgtctctgtgcctcagtttctctgctgcccagatggaggggcccggactccaggtgtagacatctggagcaggcagtgttcagctggggaggaagcggggaggactgtgggggccatgtgggaaggattccaccccacatcacctgcacccctgctgagccgggtcaacggagcccctcagtgggtcctcactcccctggctgcctcccatttaggcaccctgaggcctggggagaacagagccaggccagtgtccccagagaggctgtgctgccagcacagtagtagcggatttggattcagggaagcagacctgcagccagggtgggaaagagctgcaggyggggtggrgcccccacatggcacagcccccctccctggaggtccatgctgcatttccaggacagcaagtcccagggatggatggtgccgggtaccaagggctagaggcatggtctgtctgcatttcccacataagtgtctcatagtcaccagcatttgatgctgtcaagtccccctgtcctctgtgcagactgggaagcccttgttaaccttgggggtttgggggacccaggccaggctgcagaaacataaggacttgaacccgggtcctgagtgacaccaccttgggtcctcctccttctgcctctgttcagctccaccttgatgctgactaggctgggccatgcggagagggttaggggatagagatgggagctggggagcagggctccactctgggaggggggcagccttgccagatccagggcagagttaagcggccccaactctgctttcccagagcagctgagaacctggggaatggtgtggaggttccggggagccctgcccctacctggcaacagcagtgcagcaggcaccaagttctcctgcacattgcgacagtgtgaccatgggctctggyaggcagtaggtggggcctttggacctaccagcagtgagggagttaacacagcagctgacttctctaggcaaagaaaactcccctcagacgctttgctgcctggcctcctgccaggaacaagcaggagctgaaaactagaagttgaggcatgagtttggccactccgtagtgtgcacttggtgagggcagcagctcaccacagctgccagccatctgtccattcacccatctgtccatctggcagcccgctgttcagacctgtctgtctgtccgcccaactgtaagcccatctctgtcccattgtctatctgaccatctttctcttactgtccactttttctagctatctggcctgtctgtcgatccatcttcgtgtctgtcttcagcccccacctgtttgtccatctgtccaattacctgtgagtctatctatgcatcttcttgtctattcatctgcccaaccatctgtccctccgtctgcccaccggcctcccctctccttctgggccacagagccatggcccaggactgcggagccatggttgacctggtcctgctggggctggggctggggctggggctggcgctggctgtgattgtgctggctgtgttcctctctcgacaccaggccccatgtggcccccaggcctttgtccccgctgctgttgctgctgactccaaggtctgctcaaatgttgtacggtgagtgagacgtgggaggaagctgggtggcccttggcagccagcccctcctggagaaggcgtgtgtgtgtgagcatgtgtgtgtgtgtgagattatgtgtgagtgtgagtgtgtgtgggtatgtgagattatgtgtgagtgtgtgtgtgggtatatgtgtgagtgtgtctgtggggtttgggtgggtgtgaatgtgtgtgatcgtgtttgggtgtgtgtatgtgtgagtgtgggtgtgtgtgaatgtgtgtgattgtgtttgtgtatgtgtgagtgtgtgggtgtgtgtgagtatatgagtgtgagtgtgggggtgtgggtgggtgtgaatatgtgtgattgtgtttcgctgtgtgagggtgtgtgtgagtgtgagtgtgagtgtgtgggtgtgtgggtgtgtgtaaatgtgtgtgattgtgtgtgtgagtgtatgtgtgcgtgtttgtgggtgtgtgtgagtgtgtgagtgtgagtatggggggtgtgggtatgtgtgaatgtgtgtgattgtgtgtgggtatgtgtatgtgtgggggtgtgtgtgcgcgtgtgtgtgtgtgtgcacgtgcactggcccaggaagcaggagctgtgtgtgtgggcttcagcacctgcagggcttgagcgcaaggagacagcctcagggcccttgcacagaacaggtggcagggtgtgcccgtggggcagatggggacttggggacaatggtggtgtgtgagtccatacctggctccaggattcaggaggcccatttgcatatcccaggtgggaacctgtctggccccgcctgaccctgctggccggtgcaggccccttcagtgaggccaattctccaaggctggggtcttctcccagggtcaagggtgaaggggtttggaggctccctgcgtgggtactggcctgctggggtacacacaatgctgccatagccagtctgccccaacacccagcccggggccacatctcaggtctctcagtcctggggagcccggtgccccacccctcacatcctctctccctgagtcagggcctgggtctcgtgagctgagtgactgatacttggtgtcctggatgagggcgtggtggagaggggccacagtgggtgtttcctgaccctcttccaggaaggtgctgctgctgctgcagggaggacacatacaggatgccccttcctgccccctgcctcccattgggcccacaaaagccagggcaagcctcccctccctgccagccacctggtctgcttcccagaaattctgtcttgcaggctgttgggaggatcccagtactttgtaaactaaagcaagggaggagtggccgttctctctctttgttcattcattcaccttttcattcattccttcttccctccattcccccatctgtccatccttccctgccctgattgctcacaccaccccccagcccctcctgacctggtcctttggtttctctttagggctttctgtctcctcccacagggctgagaatggcagctcagggacaagtgggggctggggactgcttagtctccccagtggctctcaggggatttgagggtttgacgccagctgccaccccgggctgtgcccctcctctgctcaggagcacatacagggatgcgacacccacttaaactcgaagttgcaaagatgcaaatgagactggggtctcaggcaccagagaccacccatgggcacgtggcttttgggagtggggacctgctgccacagatctctgaagagtctggacctgctgggtctcaccgagtgactgtctgggggtctccatagcatgccttgctgtgtgcgtgatggtcactggttgggtaggggtctctactctaaagctccctctgccggcatcccctcgaactctcccttggtgaagagaggatgtggtttgccccagtgttttatcaaacaactctctccacttccagttttaagaagctgagagtggaagagagcctggggctggccccagctgctgctgtgaaacaggggtcactggatgctgggaccctggccgggctggctggaggcctcaggaagaggcctgctacatcgtcatcctggccaagattcctccctgcagaggaccctggccacactgccacrgggtctgctggggccaccagaagcccatgctcctgcctccatctctcccctctgtgctcacctctcaccaggaggccctcccagagttcagtgtcctgctttttttttttgagacggtgtctcactctgtcaccaggctggagtgcagtggcgcgatctcagctcactgaaacctctgcttcctcggttcaaatgattctcctgcctcagcctcttgagtagctgggactacaggtgccagccaccatgcccagctaatttttgtatttttagtagagacggggtttcaccatgttggccagatggtctctatctcttgattagcccaccttggcctcccaaagtgctagcattacaggaatgagtcatggcgcccggcctcatctcctactctttcagcaccaggttttattcttaggattctgctacagctggagcccctgggtgcgagctcctaagctttgtgtgagtgtggacccagcaccgtgcctagtagacatacaaaaggagcatggtgacagtgaggtctgtcatctcca

SEQ ID NO: 94395 - DNA, 14354 bp, Homo sapiens
ttttgtatttttagtagagaaggggtttcgccttgttggccaggctggtctcaaactcctgacctcaggtgatccgcccgcttcagcctcccaaagtgctgggattataggcgtgagcaacctggcattctttttttttttttttttattctttttgagatggagtcttgctctgttgcccaggctggcgtgcaatggcatgatcttggctcactgaaacctctttgtctctcaggttcaagagattcttctgcctcagcctccccagtagctgtgattatcggcacccaccaccacgcccggctaattttttatttctagtagagacagggtttcaccttgttggtcaggctggtctcaaactcctggcctcaagtgatccaccctcctctgcctcccaaagtgctgggattacaggcgtgagccaccgcgcctggcaccgccgttcattttctgtgtgagcacttgttgtatatatactaggctcagttttcagaggggagaggcaagtgccttctgtatatccctccccagcacgtggcttcctgccagcatctcttttgctatcccatcttttctctttctggccacagcagcctcttcattgtgtggttcccagggcccagccaagcacttgctagaccagaggattttgacatttttttgtcctccttattctttctcagccttctctgtccatttcccacccccattttcagacctgagaggctcacctaaataatttaggtgtggataattcaggctgtaactggggacatggaggcaggggtagcaggagggttagtgagggcctggaggagagagctgggtcctggactctctgtggatgataagagctggccttgcagtgagagggggtagagtgggacggctgagtatctcagagcacacacacggcttaccacaatctcttgcctctgtatcagttttattttttattttattcactttttctttttttgagacaggatctcactccatcaccaggctggagtacaatggcacaatcacagctcactgcagcctcaacctcctgggctcaagtgatccttcccacttcagcctctggagtagcagggactacaggcacaccccaagatgcctggctaatttttgtattttttgtagagatggggttttgtcatgttgcccaggctattctcgaactcctgggctcaagtgatctgcccgcccagcctcccaagtagctgagactataggtgtgcaccaccacttccagctaattttttgtttttgttgaatctgggtcttgctatgttgcccaggctggtcatgaactcctggcttcaagtgatcctccagctaaggcctcccaaagtactgggattacagtcatgagccactgtacctggccccagactagtttttaaaaatagtgtttccacaggctgagggttaggaaaaaaaaaagaaaagaaatagtgtgctttctttctcctgttctaaggtagaaaaccatggcaaggtatccatggataccttgagagcagtggacagaatcgtagtccctttttgacttcacccctcaggccctccagagtactctgtgtcctgcccgccttgtaccccccctggctgtgtgtgcatgtggaaagtcatcttgcatctgttctcttccaggtttctttttggagacaggcccttttggtgggtccatgagtctggttactacagccaggctccagcccaggttcaccagttcccctcttcttgtgagactggtccaggtgggaagcctcaaacattctccctttcccaatgtggttagggttcgggtgaacatttcagagtacttttcagcctgggtggcccaaccaaaggaccagcctctcaattactggcgcagagaacaaaagaaccccagggagaccaagctgagttatgggaggagggcactcatgctatgtaccagctgcccaccttgtatagaggacagccaagagacacagatcaggacagaaacctgagcacagtgacctcaagtggcagtaaaaaggcctcagagcagagcgagttatgaatcagtgctggggaaaagctcttctcagccaggaaaggcagctgtattattgaggcatcaccaggggccccggggttctgcctccatcttctcaccacgagcttctggatttgctggcaggcagcccttctggacactgcatgatcacaggagcagccctctggcccataatgacggccctgtcttcgcaggtggccactcgggcccgcaggtatacccttggcattgcccaccattgggagcaggggtgatggcaccctgtacctaatagacacagcagcatggcagcctgggagctggagttttggggaccctaggttgtgtggttcaaccatggagtacctgggtgctgcaggaggccaagctgtgtatggacacgctctgagctccttgcctctcttctttctagccgctgggtaagggtgatgcctagcctggcttattgcaccttccttttggcggttggcttgtcgcgaatcttcatcttagcacatttccctcaccaggtgctggctggcctaataactggtgagcaactggggcaacggggtggactgagaggatgcctttggcagtgggaggatcagtctaggatcttcccatcgctcccagcttctgtagagcccaccccagaggccccccgttatgtctcagtttattctcttgccaagctgcactgcagctgggggtcggggtggggagggtcatatccccagactccttgaagctgttgtcactccactctcctaggcgctgtcctgggctggctgatgactccccgagtgcctatggagcgggagctaagcttctatgggttgactgcactggccctcatgctaggcaccagcctcatctattggaccctctttacactgggcctggatctttcttggtaagtctcgctttgaagcctgggcaggctgggccctgtcctatctcgcctgcacctagcctggtgtgtctctggttcattatagctaaaaaaggacacattacctattcacatagaccctcacaggcacaaaacagaacatgggagtgggccccaagggcagatggccaagagccagtggccttctatgttccagcctctcctggcaagaactcttcttccccacaggtccatcagcctagccttcaagtggtgtgagcggcctgagtggatacacgtggatagccggccctttgcctccctgagccgtgactcaggggctgccctgggcctgggcattgccttgcactctccctgctatgcccaggtgcgtcgggcacagctgggaaatggccagaagatagcctgccttgtgctggccatggggctgctgggccccctggactggctgggccacccccctcagatcagcctcttctacattttcaatttcctcaagtacaccctctggccatgcctagtcctggccctcgtgccctgggcagtgcacatgttcagtgcccaggaagcaccgcccatccactcttcctgacttcttgtgtgcctccctttcctttccctcccacaaagccaacactctgtgaccaccacactccaggaggcagccccatccccttccagcccctaagtaggccctcccctccctaaatctgcttccgcaccacctggtcttagccccaaagatgggccttctctctcccagataagttggtcctccctctgcctttcctctcaagcccccaaagagcaaaggcaacagcaagaccagcgggttcttgcaacactgtgaggggcagccagggcggccccaataaagcccttgaatactttgagattcctttcttgcctatgcgcacatctccatgggccttgcctgtgtgtgcacaagtggaacctttgccaggctgctccagtagtctctgtgccatctccagccctgtttccaggggcagagaggcaggaaaggagagggctgtaaactcaggtgagacctctcagccctgggtcccctgcctcatcactgcctaggccacatgagaggtcccatgagatgctgtgactatattcggtataaccctgtcttttcacttacaggacagatcttgcgccccaacctccagtttcctaaatcggcttctagtccaggggctggagaaaagagtagtgtgtttggctaggaaggaggatgagaacctctactccatttgggagcccagagaatagagacattggccccagaaggcactgccagaaacaagtttatttacacaaggacacacagtgtaacgggttacaaaatacttaactgaaatccatatccagggagacaaagcaaggagtgggtttacatgagaaccagaccagccacagggagagagtgggtaaggggccgggagcctggggctcagcacagagaggcctagtacactgagcctggccccatccccatcccccaggaggatctaaaacaaacacacaagcacactatgaaccgatggtgctgggactcctgcccctcccctggctccctcaatcctgctcaggcccccataggataataaatatgtaaacagattggtggggccctggagatagaaggagagaaagtatatgtggtactggggaggaggaggaaggaagagtcagccccctaggagccacttcccatctttggtttcctacaggctggatggcatcccctggaagccttgtaggcccacagcccctggcagggctcctgggaaagagaagggacagcgcccagccccctcctggtcttagctcccttgggctggtggtcagcaaagggagcccagaaggtatggaagctccagctgagagccgactcctggatccctgggttctggccttaccccttctagaacctccattctcaccatccccaggatccaaaacaaaaggccccaggagggaggtgagcctctgccccttctccccgcagcatgctggatggctgggaaaatctggtcctgacagcaggggggctctcaccagcctggagcccctctgcagggaccaccttctccccttgcccaggctgtgccagcagaggggcagggaggccatccgagtaaggtggggagcagacctggttctgttactcctcctggcccctgagaacccaggaaaccagtcctctccttccccacacactttcaccctctcagccccggggaaggggaagtaggctgtgaggagtgtgaggcaagacagccctcctcacagactgcaggccacagcttgggcaccagcctcccatcagtgctgagaccaagaggaaggaggaggagaggggtctgcagagatggtgaggacgaaagaaggggaaagggtggagaatcgcagggtgggtgcccacctcccctccactctgcatcttaaagacagtagtggatcctccagatcctcccctgaggctggagaagggaggagagtgaaattaaggcatttccccccaaatcagctgaaaccaaggcaccgacttcccgttccctcctcactcggggggccccagaactggagagtactgtctgggcccccgtgcccaccttgagctggcccaggctccaaggaggaaaaggacagacagaatgcaggaaaatgggtggagggacacatgggacagggctgggaagacaccaccaccccctgcagagggagcaggcttctagagctgaggtggaagccacagggctgggggcctgaggcagcgtagaggagcaggaggggcaaggctgagagacccacacggcacaccttgttgaatgtgtgactttttgtttttaatagaaaaaataaacaaaatcacaatggtgaagcccagagggatgggggccggggcgtcacagggcaggctcctgctccatgggctcctctgccggcctgtggggcaagcacaggggagggtattgagtggggcgcaccagcaggggtgagggcagagaggtggtgcgggttgctgcttacctggggctgtgttcccgggctgccgcagcctgggcctgctcggcccccaccgacagcaaggccatggcgctcacagtctcggcctcctcggtctcacctgcttgggcctctcgcagggaccggcccagaccagcggcgaacttctgcacacagctccagtgtttgcctgtggacgagagacaggcaaggggtcrgggagggcagagsacacccacatgaacagtcccagtcctggtgctcccacaagctccgtgcccccttggcagcctgagcccctctacgtgtcctcacgcactctggatctcgatgactttctctagcgtggccactgcgttgatgttgggcttttgctgcaagactgcctcatccaagggctgcagctggcaggggaaagaagagaaggcttagggtggggagtagggttgccatgcatacccctctractgccccactcagccccagatatccctcacaacaggggcaaacatggcctttttggacaaacgcatactcagaaagcctggccattagctgttccttaggaccaaggaaaagcttcctaaggggctcccagtgctggctgaccccttgctggcccctcagmcctctggcctgccacctcccagctccttcccaccccttacctctacactgagcagagccgagacacaagcctcagaggcatcacagatggcggtcaagtcatggcctccctccagggccagcaccacccggccccctgccagggtcatcagctgcctggtcaagtggccaaaacctttgaggatgggtgaagggaggaagaagaaatggcgaaaggtaatcaatcaattcaagagccagtaagaggagagaaaaaaggccaggcgcggtggctcacgcctgtaatcccagcactttgggaggccaaggcgggcagatcacaaggtcaggagttcgagaccagcctgaccaacatggtgaaaccccgtctctactaaaaatacaataattagccggccatggtggcacgcgcctgtaatcccagctacttgggaggctgaggcaggaggatggcatgaacccaggaggcggaggttgcagtgagccgagatcacgccattgcactccagcctgggtgacagagtgagactccacctcaaaaaaaaaaaaaaaaaaaaagaaagaaaaggagagaaaaagaaacacaagaggtgggacaaatagcacaaaatgtgatgggagatataaacccaaatatatccataataaaatacagcatcagtgaactaaatgccctatcacagtcaaaacattaacagactggctgaagactccaatccaatgacaaggagcatcactgaaacaccagggaccaacaagcccatctctacagctccggcaggatacatcctctatcctctgctaccccactgccacctcctatcccctcaaggccggggttggcagaggacaagttgggggagttaccaagatgattccaagtctaggccctgccccctgctttccccgtctgctgcaatatcagtctgttccctgccccatgcctcactggactcgatatcctcactgtttcacttcctccctcaatcccccagcaggcttacatctggcggtgacagagtagccacccagaggagacagatgtccttcaacagcatcaaacccggcggagactaggaccacatcaggtgagaactcgtgggcaatgggcatcaccactgtcctgcaaagggatggctcaagctgagcccggcagatgaccaggccaggcctcgccccactgttatcctcccagagacaaccccctctacccacactgaactgagtgccttcygcccctcccactgcagggcccagaggggctcccaytgactaccatggcccttttcagtccctacctgaaggctgtaaggtactccacgtctccaatgggggggtccacacctcctgtccatgccacgttcacattgtaccccacgcctggtcctccaccaacctggcaccagagttggggagagggctattctcaccacctgggagtcccaaacattgcccctgccctcacccctgcctccagatctcactccactgacctctgctctgcctggaggggcagtcagatcagtgtggtcctcccactaggagcccagactccccaggtaccaacaccaccatgggcctccgtggctccccgccaggtcccattgtgccayctcccagaggggccaggagggtctgcatttacgcccaggagctgtacctcttcaggagccccagagcctggaaagaagttcccgttgtcatagcgatgcagagagatgtagagcacagaggggtcattrtagaacgcctgctgggtgccattgccatggtgaatgtcctatgaggggaggtagaagcatcgggaaaatggcccgcgctctgacccaatggtcaaattccacctgtcagctgagcactgtagctcatgcctgtaatcctagcattttgggaggctgagggctgggaggatcgcttgagcccaggactccacccttggccacagggcatccatattctgttcacaatggtattgcacaccccacacttctctaactaggtctgagcctctgtggggtggcactgtgtaggtgatattcaaaaccatgggataaatgtggcatatctccctacagaacccattccacctcacagttttggggaaaacattaaggctagtagggaatttaaaacaggcagatgagattctttcttttttttttttgagaccaagtttcactcttgttgcccaggctagagtgcagtggcacgatctgggctcactgcaacctccacctcccgggttcaagcgattctcctgcctcagcctcccgagtagctgggattacaggcgcccaccactatgcccggccaattttttttgtatttttagtagagatggggtttcaccatgttggccaggctggtctcaaactcctgacctcaggtgatccacccacctcggcctctcaaagtgctgggattacaggcatgagtcactgtacccggccttttttgttttcctttttcttttctttcttttttttttttttttgagacagaatctcactctgtcatcgaggctggagtgcagtggcatgatcttgactcactgcaacctccacttcccaggttcaaggaattctcctgcctcagcctccccaataggtgggattacaggctcccgccaccacacctaactaatttttttgaattttcagtggagacagggtttcaccatgttggccatcctggtctcgaactcctgaccccaagtgattcacccaccttggcctcccaaaatgctgggattacaggctttgagccattgtgcccaaccacaagcacgtaagattctgaaggaggatccaacatttacatgaatttttaagccagaattgggcttccaagagattttgtccttcctgaggcttggtcctggctacttccccagctcacagagagtggtgtgtgcctctgcctccaccattaggagcagggtttgggaagcacccatggtagcaagagcagagtgctggggccaaaagccttggtctgaaacccagtgccgacatccccagctgagtggccttgggtaagtcacgcaacaacacctttgttcacagaaatggacatcctcgttcttactactcgaggtggccataaagtactcattgtgttcctggtatacagtctgctcctaattgtagggggtgggaggaaatatcggctactagcaatggcggcagcgtcactaccgttcaaggtaggaaatccccttcgttgcttgaaactgcaacgtgagggccaagatggaacaggagctaaatgtctttcatagttgaggagggagccctgttggaatgtgacgttagtcatccggcaggagccccagcgcccttccttctgcacccacacccagcacccgaggatgaggacgactggggtgcttgaaggtggggctgggggaggagacttcctgaaggctgaccctggtcctagctctacccgcccctgcccagccccaccagctcactgcctacccagtccacgatgaggaccttgcccacgttcaacttctgctgtaggagttttgcggtgatggctacagagttgaagaagcagaatcccctgaggaggggagaaaagggcaggaggtcagcctcagcatgacgtttgcaagagacaggaaggggcgagggcagagaatctagggcactcacatggctgtggattcctcggcgtggtgtcctgggggccggatgatggcaaatccattctgaagaggtgcaggcagaggtgaggggcaagatccaggcaggaaggccgtggagggggtagcacaggacagaagcacaagccaggcagggaagtgaacacaaaccagaaaagcagatccatatgtttaatgcacaattttgttggggtttctttgtttttttatgggtttttttggagacagagtcttgctttgtcacccaggctggagtgcagtggcgcgatcatggctcactacaaccttggcctcccaggctcagacaatccttccacctcagtctcctgaatagctaggactacaagcacacgccaccacacctggttaattttttgtagagacagcgttttactatgttgcccaggctggtctcgaactcctgggctcaagctatctgcccacctcggcctcccaaagtgttgagattacaggtatgagccactgtgcccagcctcaacggaccattttgaatgccaaccatgaggcttgagcaggcagacactatttctgcctcgagacacccacgagagcactgggcattagtgtctttttgttggtccctcataacctgaattcccagctggcaactccttcccaccctggtgcctgagagttgagcttgcaaaggacagtgcctcactgaaaggatcccaaggctgcccctgtcctctgcctctgaggagcagggccatgccaaggggcaccgaggtcacaagcacacgctcaccttgagctctcctgcagccaccttgaaggccagctccagcaggcagcccactgccatgcgcacagcactggaggagtgcatctcattccacacggtgtcactgtccacctgcagggcaggagagcaggtttcagtgtgccccctgcagggcaagaacaggggagggcacctggacagtgggccagcggctgtggtaggcagggaagagacagacctaggagagccgcccgcccacccccactgctgtacgccctactcaccccgatgcccccacaaggcagcacagcatacatcttctggctgatggggcctgcatggaagaggaatagagctactctagaagtggcctcgggcggatcacctgaggtcaggagttcgagaccagcctggacaacatgatgaaaccccatctctactaaaaatacaaaacttagctgggcgtggtggcacacacctgtaaacccagctactcaataggctcaggcaagagagttgcttgagcctggggagacagaggtcgcagtgagctgagatcgcaccactgtactccagcctggccaacagagcaagactgtctcaaaaaaaaaaaaggcacctcaactgccacagggctacaggcttagccaccaaaaatgagggctcagacccaagtacaagacaggcctctgcagcccacaccagttggaagctgtcagtcctctgtccttggggacgtcttacctctgggggcaggtggcagggagagaggagcatgataagccgtggaggaggggaacaaagcagtccccccaaccgagcacttccatcctcctgcaccgcgccccacagcatgctctattttagtggcgccctctggaggtgtgtgacgtgataattgtgccacctctgccgcagcaatgccctatgcccgtggggacaaccctcctagcctggtcaggcagtcttcctgagagcccccatcccaccctgacactgaacatgcctgcccgcccacccatgtgccagctcaccgagcaacttcttgctgtctagcttctgccggttgaggggactggtcccatagagcagggtgtggtattcagagtgcactgtctggatctcatctagcgtggctttgcgacctcggatccgctgccaggaggatcagtaagaggggtcacacaaaggcacagctctctcagagcctctctgccccatagccagggcacacagagccacttcctggcctcaggagatccaaatattttcagaaagtagatcctggctctgtcatgaccttactcccggatcccccccactcagctggggaccatgggggaaaacaggctgcaagggatggaacggggtggtgggagaactggccccgaagtctggggctgaagagaggatgaggaagaagcatgaagagaggcttatctaacagggaaacaaaggctggatttaagttgagagccagaagaaggaggggctcccttacctcgcacttgctaagcaggcctgtctcctgcagccgggaccagatgctctggatccggccagcatgctcagggtgcacgtgtgtgttcccgcacatgcactggtgctttagcatgaacgtgtcgtagaccacacctgggccacagacctatgtgtcagccagcactgctctgggcccaggatcccagcctggctaccatgatcctcagcagggctcatggagctgtctccaacccccaggtccaaacacctccccatggccactgcagccaccctgccacaaacctgccccctctcctctccagcttttttttttttttctttgaaacagggtctcactctgtcacccaggctggagtggagtgtgtagtggtgctatcatggctcactgcagcctcaaccactgcccccaccaccctgggctcaagcgatcctcccacctcagcgttctgagtagctgggactataggcactaccacacctagcttttcttttgtttttttttgagacagagtctcgctctgtcggccaggtccagtggcacgatctcggctcactgcaacctctgcctcctgggctcaagcaattctcctgcctcagcctcccgagtagctgggattacaggcatgtgccaccacgcctggctaatttttgtatttttagtagagacggggttttaccatgttggccaggctggtctcgaactcctgacctcaggtaatccacccacctcagcctcctaaagtgctgggattacaggcgtgagccactgcacccaacctatttttttattttttattttaaagagacggggtctcactatgttgctcacgttggtctcaaactcctgggctcaagtgatcctcccaccttggcctcccaaaatgctgggattacaggtgtgagccactgcacctggcctttcctctccagcctttgccccctcttgactcctcctgaaattcctttgctccattattgcctatcagaagcttccctgctcctcaagccccagcaaggctgccctggacactcgcatgagtctcatctctgccagctgtgcctcctcagctgcacccttctcacggcacctcctgctttccccctcctgccaaacccgtgtcttactctccacgggtgatacagggccaccctcaggcacgtctgtgtccccccagagcccagcctgtggcagcttcatagggaagaggactctggtctcatcccagacctcacagggagaaggaagggaaggtagaaggtcagggcccaacagggacagcaggctctctctacccagcacttcaggctgtggggcagtccttccttcagcggggtgagaaagacgctacccactctcccggctgaggcagaaggccctgccgctaccatgaacagctctggggtacagggagagaacgaaggcctgtgtcccctcctttcagggtgcctaaggggccccagcagcctcttccccctgccatggggcagacaccacacacaggccctctggtgcctggcagaaggacctaacagttggtgggggctcacctgtggtgaagaggtgcttgacgggctggtctggggggctcttcatgcccccaggggcagcaggggaggactgggtacggcccagggcctggtggggcacagtggccaggctgaggggcgcctggtacacctgcaaaggctgcagcggctgggcatctgagaacagctggaggggagaatgggagggggcctgggtcagactcagccaggacaggggtgagggcaggccctgtcagggcctccagtggggccccaatccagcccttttcttccaagtctc

SEQ ID NO: 94396 - DNA, 361121 bp, Homo sapiens
  misc_feature (1)...(361121): n = A,T,C or G
gctacttgtgggggtgaggcgggaggattgctttcaggctgcagtgagatatgatggcaccattgcactccagcctgggcaacagattgaaatcctgtctagaaaagaaaaaaagttatgtacaaatacgtgaaaccaaacaatggctccgagtgaggaataaagtggtggctgataacatccctgttctcactacagggttatataccttgatgatttattttatgtttcaatgggaaacacttctctgggcagcataagtagctcaagaatcttgtatgttgtgtgtgtatgtgtgcatgtgtatctgttccctttggtgaaatcttcttcccacagtatttttctcttctctatggccataaagcataaagaatggccattttcctgccaatgagaatagtcattacgaatgtcaaatgttgagttgtgcttggtgtgatgtgctcaaagcccattggtgtgtaaggctggactggtttatttgctaggtgtggattattatccctattttgcaggtgaagaaacaggcttaaaatagtacaagactagctcaagtcacaaagcaggattgcaagcaatgcaaagcagatttcactacaaccagaagaatcgcttttgaaataaaaacaaattctaatttcaaaagcattacattaagaaatatttgttgtaaaaattcagaattacagttaaacatgataaaaagttcagaagttggtcactacctctaatcctggttctttttccaaggaaaggctatggttaacaattgcatatgtatcgcttctcagattataatgtatatttaaatcacctggacattttgttaaaatgcagattctgactcagtaggtgtgtgatgggcctgatctactgactctctaataagcactcaagtgatgctgatgccagtggtccatggaccatgctatgagtacaaggtcacagggcaatgtgcatttttattttcactgttactgccaaattacattctgaagcaattgtatcaattaccaacagaatatgggagtagtacttatttcccacgttttctccaacacttggaaatttccctattaatttgtttttctcaatttgataggtgaactgtgatatctatggttttaaaatgtatttttattttttaacaagttttttcactcttttatatgttcattggttatttatacattctctacttgtctgttcatattcttgactcatttttccatttggatattcttgcccctctgttttagtggcttatatgaattctttatatattttggttttcaatctttggtctgttaactatcttgcaaatattttcctccgggtctaaagaagaaatttttacccagcagcattgtccagtgactgaatggaagtgaagctgttcagaagttgcataaccacttgctagggaggaatttggtacctcccttgactttttgtgccttctttctcatattaatagaatatctcagaaaagagcttatcctactgtattatggttgtttattttttggcctcatccattcaacagtgatctctttgagggcagggatgagggtctgtgagtcacctctgtattgccagtacccagctttgggtctagcacagagcaggcactcagaaaatatttagtggatgaatcaatggacagagggttagatgggtcttgttgctggattccggccagggtttgccctgtaactcagctaggagttgttttggatccttaaatagggtgacagaagaggagcaagaggaccctttgcccctagttagaggaaagtgccctctggatggcttgtcttccctccattcatttgcatgttagatactctggtgctcagagacagcaataatgacaatagccaatacatgtagtgcctttagtgtgctttgtatacattaattcattgaattctcacaacttctccgtgaggtaagcagtatcagtattatctccatgtacagatgaataaactgaggcacagtgtggttaaggaattttcccaagatcatactgctaataaacggcagaactgagatatgaacccagctgtctggctcygtaatctgtgctcaagagagaacatgaaaaacactaggcctggtacaacgtaggcactaaacaaacgtttctctcttcatttaccatccctccccaagaagtgtgccttttttgttaatgatatctcagacctgtagcttggcgaaatccaatcttggccctacttttcctctgtagcttttgtctctgaaccatacatccatccttgctggaagtgccaacaatccctgttctcctaggaacctggcaaccccaattcccatgcagccagcacagggattgaggctttccatgatccaggcctgtttttatcctttagcacccccaaatcctgacactctggccccaaggctttgcatggtgctgccatctggaaggtacagatgaccactgacaaccctctctgaagagtgaatggccattggccaagactggttcactgttcgtctttaaacctcaggtcagggtacgctatgcagaatgtaatcagttggtggctgaattccattagtgactggccttctctaactctagtatcaaaggtattttgaatgaaggcttagtgttgggggagtcacagtgtggtggtacttatgcgtaggaagtcctattcagctcgccctcagtcacatcaagagaagagctgcctacccaatgtaaaagatgggtgaaatccagaggctgtagtagataagctttatcaagaatcttcagccccattgtatatgcctcaaggcactcactctcctcttgtggcaggagttaaaggagaccctagattctaactctcaggataagtttgaagaactacgttgtactggagtctctgctaggcctgcttacacctattatctgattaactcctcacaatgatccccagcaggaggcaggatttatttaaagtaaaggagaggaaacacttaggagttagataaatgaccgaacttgggaatcagaaacatccttacaatccaaggatgatttttagcagcttcctgagctcagaaaagaggcccgtattgacacaatgaaactcagactggatctacctatctggagcaaaatgggcagaggctaggacaactggtcatttacacaaaacctcaggagcacaaccattacttgtaggattggatgtatggtaactgaattcaggactaaaggtatgaattgctacccaggtattgtttacgagggagcttgcaaagagacttttttctgacctgtgactgcaaaatctttgtgagcaaagcctttatgccccctcccacttcctttgtttgcaaccaagggattaggggtcttgagtggaaaagttgaaggtactgggggtgaccagtaccttgaagaaaccagcctttcattttgaatattttatcaacctatgcagatcattgtactactgatggtgaagacagacattatgaatagaaagccaatgtgctggagcccagctagcgacgatgagatgagccccttggtgctcatagctttagttcctgttagcttccattaggggagagagggctgatactggtaggtagagaaaccaagtattgctaaacagcaggatggaggtcacggagctgagttctggcctggaaagggagtgaccatatctggaaggaaactcacatgatcctaaccactcactatgtgtcctgcactaattaaagccctttctggaacattctctcagttaattttcacagcctgtcctcagtaaggtattgtctacctacatttgatacatgggagaaattgagccctactgactttttgaaatgtgtccaggctctcataactaatacatggtggatctgggattagaaccctggagtctgcctgcacctccagagaaaattctttgaacaggtcaactcaaacctgtgacttttcagagaggagaacctgttcagcattcttcttttgttgtattcatcccctctacagttacacattatcttagaggatcagctgtacaacatttaagatcacgcaattcactttgttttcttcttgaccatcatttttttaaacttgggatttaatttttttccattaagaatgtgaaaagaatgagtattgccttctctttctagtcctgtggtggtttaggaagatcccaagaagggctgaacttccagggctcctcctgggagagggggcagaacagaaggaaagattacaccttagcctgtactcaagggcattgcttgtaagtctgtccaaccagaagaaagttcagatcctttatttgtgagctggattatacctctggaagagaaaaaagggagagacaagttttactccctcctggaggcagatttctctaccttgattttttcagaaattgtgtacattctctcctctcatgtatgtatctcctacataccatacacacgattcttctccccctcctataccccagcccacgccaacccacacccactgttctctcttccagctatggatcaagggaaatcttcccgggtccctagttggtatctgttttcatagcatctttggggaggttttgtaaacaaagcattggtagaagggcccttggctgatggggccataaagtgccctttctttggttttgtgctctccctctcttgtggggccagtcatttgaatccagaagatatcccaggatggagctgccctgagtatttctgtggctggttggaaggctggcacacaacaaagtgggcatgcagcaggctgcctccctggcttaggccaaaaaaataaagcaactcagagatggagaagaggcaggaaatctatgttgtaaaaagtctttgtttaaaggaattctgttcaggtgctgagaacggggtgttcagcagaagaggataatatgagtaaacattggcagtaagaacaaacacagcagtatcactgtctgcgtctggcctcctcctgtgctcagtcacaggtctctcccaccgccctctatgatagcaatcataaacaacatgtagaagggctttacagttcacagacctcagttcccctcagcggcatttccttgcagggtttctttatgcactggatgaccctggttccacataaatgaaaactgggcttaaaggacacatccatgtcctgggagctgtacagacttaaagaaaaacctagataggggcaaaaattggggcaggcggnnnnnnnnnnnnnnnnnnnnnnnnnnnnnnnnnnnnnnnnnnnnnnnnnnnnnnnnnnnnnnnnnnnnnnnnnnnnnnnnnnnnnnnnnnnnnnnnnnnnnnnnnnnnnnnnnnnnnnnnnnnnnnnnnnnnnnnnnnnnnnnnnnnnnnnnnnnnnnnnnnnnnnnnnnnnnnnnnnnntctggacacactcaggaggccggtggctgaagggcagagggcagggtggaggcccaagtgaggccaaggaaggagtggatgccgctggggctggcacttccttggcttctcagcgtcctggcaaccaagaaaagattccaggagtcgactggtggcaccaatgcgagaagccccgggcggatgaaagaagctgacccgtgcgaacccccccaccccctccacaaaaccaggagattcctgcccaagagcaagagatggaattcccctaacggaggaagctgccgacctaagggctgggactggcagcgcgccctctccgggagcttcaggtctggggcagcctgtgcaggcgcgggtggaggcccgggcgcgtccctgggggcgggagccaggggcggccagcaggtggggcctgggagctggactccgccccccgctccctccccgttggtccgctgccgctcagcaccggcccctctcccgagccggagcgcgattggtggcagcgcttgtcgctcggagggggccgggccgctctgcttcgcggctctccccgccgccgctgccgctgccgckgttctcctagcagcgcgggccggtcggaccgccaaggcagccggcgctggcgatgggaagcggcgtggccgccgacacaggcagtggcaaagtttcccagacgtacacatctggacgcgcggctgccggctacccgtgacccctctaggaagggttcagggatttttaatttggaaaaaaatccacctggtttcctttgtcaaggtctctccgggtggccagcggcaggagctgcaaacttgggcacggcggctacaccggcagcggaccgggctttggagaacctcgggactcaggtgctgaggtgcccagcggctccggacgtgctacggggtgcgagcgcgggggagttcggggcgcacgacaaggaagggcccccgggasctctatatggaggaaggagcccagaatggtgtgcaccaggaagaccaaaactttggtgtccacttgcgtgatcctgagcggcatgactaacatcatctgcctgctctacgtgggctgggtcaccaactacatcgccagcgtgtatgtgcgggggcaggagccggcgcccgacaagaagctggaggaagacaaaggggacactctgaagattattgagcggctggaccacctggagaatgtcatcaagcagcacattcaaggtacgggcgccccggaaacttgggtcgcccatgaggcccgggagtgccccgcgcggcgcggggtgcgctggggctggtgcgcatcaactcagccacggcggggctctggggccgcagatgcgtggtagtcgtggggcctgcgtgtgagctcctgcctgcgttcgggaccttctgtctgcggccgtgcgctcttccccggggcacacgtgtgtgcgcagggctgcacgagcggatgtgtgcagctagctggcggtatgggggcgcgctgcgcacgtgtccaaatgtgcgtgtgactctgggctggttgctcgcgggctctcgggatcgcacacaagtccggctcagagtgtgtgtgcatgtgaatgtctgtgtgtgtacaagagggaacgcgcgggcaaacgagcttttttggccactgtaggcgtcaggcgagatgcccgcgcggcggccctgactattggcagttaagacccgcaggctgccggacaagcgaggctaggaaaattgcgttgtatcagccccagccccagtcttgctgtgatcccgttggtaggcgatagggaatgcaaggagccctctgtggttgaaaagccgcttgaacctatagcagtccctacccccaccacagcccgcgggtccaggaccctctccaggagcaggtgtcaacgccgggaagtagcgctggagtctctgtccactgtggtgatgactccgcccaagactggaagaacacgccctgggctgcgccttccccgcggagccgcccgggaccgggtgaaggccgatccctactgtagctccactctcaggccctgggagcagccggggctgagcagacctgggttgggtctgaagtgtaaggttacgctggttgggtgcgctccagaccagcgcgggggtccaaagggagggtgggggttgcagggcgctctcccgaggcgacctggtcaatgagctgtcatgggagggaatggagttccgggcgccaggagcactggtgccgggtgtgcacacacacacacacgcgcgcgcgcgcgctcacgtccacacttcctcccctccccgcgccccctgctttcttccaggtgtgtgagcttcttaagggcagggccgagcttggttcccctgtaaacctagcaggcccaccaggctcaggggccagtgcatggcagaccttggcaaaatcgaattgaactgaaggcttaccccccacccccccgccaggagcactcccttttgtttacacgtggatgtctgaattccaatccttgcacctgctgctcttgccagagtagagatggctcctccgtctgaatttggtgtttccccaggtgtccagaatagttcctttccaggaggggaaggttcagggaggttcaggtgagtgcaggagaggcatccacatccatagtgcttcctgactaatgacttcaaaacaagcccatggcttcggcaccttcccagaaaagagggacattgacagcttcttcttcagacctgcctctgcctctcaacctggcactgggcttgaaaaccaatttacctatctgtgggtgccagttgctgttatttcttacgtgtccttttccatcccataggtcttgattgactattaatcagcaatagaagtacagtgtttcccccagggtgattcagaatgttccccaggagacacaaagccatgccttactttgacatttctagtttgccgacagattttgagattttcattcacagattctgtgtgtgtgtgtgttcctggaaaatgattctcttgtgcttttctttctggtcaggcaggaggtgagcaaggtactgctttggggatgctttcaggggatgccattaacccctgagcctgtaacggagtgggtgccagtcatgtggaatgtggaccatgtcacatgatttctaaggttccacatggaaaagcatgatgttgaagttgaaaggaagcattgtgatttttctccccggaaactttataactatgtgttgttcagcactttcaaatctatacctgaaaaattggagaagataggttaaaaaaataggagacagggtccctaaaacacgtgttgttccacttgtacacgtgcaatgacccctgtgggtattcagaaataaccacaatctcgacagagggccaaagctgccacctataggaaggtagggaagggtcagtgacttggaaagactggaaatgaggcaggcaggggcagaggttaccaggttggctgtgccatgatggtgtagcaatgaccaacagttccctttgccatgctggggccatcctgagctgggatttaggaaacagaggtaaagggcctataaaatttggggctggtcaagtgcagctctctgaaggcagagggtggtaaaggacaataagatcaagctcttgtgcttgatggtacaagctgtttatgtgtaacccactgtcaagttccctctagtcagcatagccctttgaacaatccagtttactttgctgaactggagggaataagcggtaataataataagagctaaaataacatagcacctaggatatgtcaggccctattctaaacactttacatatattgacttatttaatcttcacaaccttatgaagtaggtaatatttgctccattttacagatatggaaactgaggcagggagagggtatatgatttgtccagggtcacacactggtatatgatagtatagggatgtaagctcagctagtgtggcttcagaagtctaagttcttacccacgtactaaactgtctcccaggagggccccagggtcccttggagtctgttgacagtggtggaagtgggtgtcagaggatggctgaggggtgagggagtcagcagccttcccacttggaaactccatagataaactcaggttttgctttgtttcatgccaagaggcagaggttccagtcctttaactaatgtttactgaacatgcaggacagtccctggcacattctgcagaaagtagctgtggggtggaagcgtggatgaatggatgagtgctgatgcctatggccacgttggttattaatgaaagtgttaccactctccaaaaaaggtgttttgctttggagtcttgtccaggctcctctttttgttagaaggaaagtctccttgaagctgcaaatgtcacaaaatgttctgcaggatgttccataggacttgcaattagaagaggctttggagcatcaccccagaggtctgttctagtcatgactgaaaagtttattttcgtcttgggagttgcagtgatatttcattttaatttgttttctgattgaatgatttaattagatggtgtttgggaatctcttgggaatgtaaattgcagttttgggaagttttttgaccaaatagacgttaaatgagagggtggataacttatgagtttttaaaaaaagcatcctgggggtttagaaacacaaagtaaatgttagtaagggtcaggttctctccatcttaggagtagaaagatctgatggcttgacacggtgaggcggatgaagcaagaatctgctaaaggagttctcagtgttggagagtgcaggaaatggaaatgttgattcagttcttattttggaaattcagtaaaaataaagatagctttcttcttttcttagtagctttctgaatatggaaaagaatgtgccaatgtttaagaaaatatttaaaaatgcataaaattgcccataattcattctaccctaaaaatcagtttgcattttgagcatttccttctggatttgttcatttgcctccatatttcaaaatgaaggtgtagtcatgatttacatgtaattttatattctgctttgttcactttctttttgttaacgaagcactattttttccatatttgctacatagtttattggtttaacatttatctgttggagacctaatgtgtgccagacactgcactgagaaagtgattacagtggtgaactgtatactagagacactctacaggagtatgggcactcttggtccttgtcatagcggacttgttttcaaaggacaaagaatcccttttagtcaacgtggtcagggcttgagttagttaatagaaaaattggttaaagaggagagtacaacaaagtattacatacatacaattaaatatttttattttaatgttttccaaaatgtacattcatttgctagacttttgatatcaggccaaagttctgtctttgggatgcatctgccaattggcgtcctgttcatcttccttgcacaaaccactcccataatatcccatagttctgttttctttaaaattcattggaaacttaaaggtgcttatgaagcagtctcagtgtagtagcctaaattgttacgatttttgtctgatcttttgcaatgattttgctcacatgtaatttgattgctattctttaactgactaccgtttataaaacctttgcaaagcacttagaacttaaagtaattttcttagaaacaacactcatctttttagccgtcatatttcattggtttatataatacgtgattaggttatgccgttacagtgacaagtacaaatagtgtaaacacgtttgagaacaaacccagtggaccactggtaagtgtaaaactcaactatttgcaggagctgtgggcagtggtactagagacaaatagggtttgttacagagggaatggcaagcatagttaatctggagaattgattaaatggagagtttctaaagagaacttttactgtatttttaatgactgcatagtattctgtcatcagtatactattattgattcaaccactttcctattattggacatttgttttgctattataattagagcagaaatgaacatcttcacctcactgttttttgaattatgtttaaggatgtctttccagaagtgggattagtactgactcaaagagtctgaacatttttatgaaagattgttttttcagaaggaaaggctttctttacagccaccaacagtgtcttattgtaccaaagtcatggagcctggccagcattgggtgttatcattcaaatttttccgagtaaatgtaatccctgtcaaatgctctattcttttgatttgtactcctttgattactctagaacttaatatcctcccccacccctggtatttgttttatcttgtgggactatttgtgtccttgcttattgttctctaagactatcagtgtttggccaggcgtggtggcttatacctataatcccagcactttaggaggccaaggtgggaggatcacttgagcccaggagttcaagaccaacctggacaacatggtgagacccccatctctacaaagaaaaaaagaagaagaagaagaagaaaaaaagactcagtgtttgtgatttgtgtattttacaaatttttttgatacataaatattttgcctgtattatatgttacatacataattttaattttacatagatgccttagggcagtggttttcaaactgtgtacccaggagacctaaacttgtagaaggtttgatctggggcctgagaattaaaagggttaagtggggtctcccagactctgcctgtaggtgctccctcccctccctgcaaacaacaaaactccactgtcttctgttttctatttggcattctataaaatatttcattttataaaaagttgtacttctttaaaaaaaaagttgaaaataactgtttcaggaaaagaggaaagatcagactgttacatttttgtgagggatgatggtggtataaacaaattcaggagagtaaataaatctaaaaggaaattgaatttctgggtggtgttcttgtaacatctatttacccttctgaataccatgattaataatgtattacattatgtgactaatttctaaatccgttatcttacttcattgagtcaagatcatcccaacaatggagaaatgggttattaactgcattttgtttcctgaaagtttgttagtcatattatgtgcatattaatgtataccaggtcagtaacagcaggttgttcgccatgactacaaatcatttatggttgctaagaatcagcagatgtcctgagcttggatgtttttctgtctcctatagcttatggatgttacttagaattggctcgtgttcttctcatctgagctttgacttggcagcgtttgtgaagaagaggatatgatgtttgctgagtgcatggagtttatttgaggaaagagtgtcatttaaatagtaaagctatttgtcctctggaatgaactgttgcatgtgaaattatattagtaacagtgattgacattttgagagagttcaatagcaggacttaggagttgagcctaattacctttgttactagttcagaaccacagctttatgaagaagaaaagccttgccaaaggacacaacttttccccgtgaccaaagaatcttcatttttagccagaagtgtgtaggctgtaaaataaatgaattccacattctttcccactcacttgacataaattgttattttcccttgataagtaggttggtggagaatctcaaggagaattcagaatgaaaagtgtcagagagccacgtctggttttgtcatttatgagggccttgaagttcagctttagtcacttgggttaggctggcctatgttttcccaaaggtatttatgggattcagagtcacaaacagggttactggagcgtcttcattaccatcgtataggatktctgacctcacttcacttgaatagctgaatgtgcttgatatgcttgaatgtttgtaccctccaaatctcatgttgaaatgtggtccccagtgtttgaggtggggcctagtgggaggtgtttgtatgaatggcttggtgctgtcttcctggtaatgaatgagttcttgctgtatttgttcattcaagagctggttgtttaaagagccttgctgctcctcctccctcctcctcctcctcctcctcctcctcctcttcttcttcttctcctcactctcttgcctctctctctcacccctctctcactatgtgacatacctgcttccctgttaccttctgctgtgattgtaagcttcctggagtctccccaggagcctagcagatgctggacttcgaacagcttgcagaactatgagccaaattataaatttataattttataaattaccaagcctcaggtactcctttatagcaatgcaaaatggactaatacaaagctattgtcttgatttgggtcttgagggtctcctttggtktgtggcagaaagccaagcttggctttttgttagctgggttctatctgggagatggggacagacaggctgccctgtggagaagcacattgccaagcagtacagctggaggtgatgttacacagaaagttcctggagggaaaacccggctgaatgtgagtgataaatgtaaccagaaggcagcatggtgggctttggggagagatggaattatgcatgaagcggaagggcagaagccatacaagttggatgacactcaagtcaggagcaagaggcagagtgactgaggtccactggtggctaagccaccatcaatgaatggtggaccatgctgtttatgctggcctggaatgtctcttgaagggtggagcttctgccttggatttggcagggatgtggtcatttcatggctcctacaattgttattgaatctcacttgcctttggggttagagtcagctccatctgtaatgcaatgcttgagcccaggggtccttgatgtttcccccttcctcacacataggcctacatacaaggcatgtgccctagggcagggctaggaggatgcacctcctaacacattgcattcattcttactccaccctttattttcctacttgagaaggcatattagtatgcaagggaatgtaacaaccttgaaatccctttaatttattagagttaaagctaatcattcataagctttggtacttaaattattgttactcactaattacctcacaactgctccacagcacagtatgttgtggcagtgattgggaatgactgctgttctggaatcttctctgtggatctgtataccttttatagatcccctgtagttccagtgcagccaactggaactttaagcaagaggattccttgttatatgaacacttaagctttggtggtttttctgactacacgattatggattaaaatatgttgctagacagttcgtcccagtggggatgcagtactgagatgtagttctctttcactgcctgacattcaatttcagtttttggaaggtttatttttgggagatgaagctgtccttaatgatgctagtggaaacccctgagtgtccagccaccataaacattcagtggcttcccttatggagccactgctaaaatggttttagaaccaacaggcatactttgctgggctactttccattgccaccatcctttaagagctcacagaaatacagtgtttgggaagatccagagaagtggcatctgcactcttcaccttgggacaggtgagaacaatgaaaaatgatgcctacaaggaggcttgtggccagttctttagcgtgaataggttcattctacaaatgcactgagtttaagtctcagagcagagttccctgattaagattgttgagtgctgcatcttaacaagctctggtgctttgttgggcttcgccagtctgacttgtgcatccatctctgtcccctgggaacttggagttaaaggccattgagatcccagaggagcaggaaggtaattcagggactctggcaagacaggattcgaagcttggcttaataaatgttgtgctagcggcatctggggatttaggagaacagtaccaaaattgcttaggccaatggatatgagagttagaaagctaaggagagatttgaagcgacaaatgagaatcctagctaaacccttgatttattttaagagcaacaggcatatagagaattaaagattgattgtatcaagggaatggaggaagagagctacagtatgctagcaggtcagggactggcccaggtgctgcccaggcatgattacttatttatttatttcaatgaacaaataaaattgtaatttttaaaattagtgattccttttcatcttcacaacatggtaagattaccttttttcttacctttttagaggtaagaaaatgaagacttagagtttgttcaaggtaggtcacagggctgatgggtggtagagccaagaagggaaactggctacaaaaccaatgctctctacagaataggaaggaggatgaatgtttctcgtagagaggaatgggagatcatcttatcaaacatggtgtttgagtgtaagctcagaggcctcaggtcaaatgggaggccaggcaggggcttggtttacatttgtgtctacaaggaacctggagggtagggtgggcagcagtagaaggccctggtctggaagggtgagggagcagccaccacaaagctgtggacagccttttctcctaggtcactgtggggcctccaggaactggtccttgtcaaaaaagcggagtgttccagctgcagactagagctctttcagattcattgtgacttctgagcacccaaaatgtcccaggcaccgggctgagtgctttcctgtgccctggcatagtcacgtgtctttcagggtgaccagcttatcctgatgtgccttacactttccctgttttaaaactgaaagtcccaggtccagggaagcacccaattccctgggcaagcctggatggttggtcatctgaggcttctcacagtggtgaattctctgttccatgataactcctagcaacggggtaaaaatagcctttctgatggtgccgcatccggtctttgctctctgctcttgaacgctgacttgcwtgaaggttacaaagaagaaggtgagggtccacagccccttccccattttccttgcccacacaggctgcctcctctcttttttgttattccttccgctttggcattctctggttttcaactgtctgagcctctcaggatttggaaaggaagaaacaattgctgtaaaggaaagctctaataaagtggtttgggcacaaaacatcagcagctgtttatttgcccaaaacagtaggagtccatattaataaccttgtgagttatatgctgggaagttaaaagtaagcaaaaatcttacttgagacccacaaatgtaactttattcctttattgaactaatctctctttctgtttatgctggtgacattttctattatccaagtggaagatcctttttgatcttccattacagatttatttagctgtgccttggttagcatcccaaggcagaggggttttctggtttctctattgcagttataatgctttgtgtttatatggttcatgcctcaaaggatttcaacaagcgggacaggctttgtctaattaatcatcatatttccctgatgggagagaaggagctgcagaggaagggagggtcttgagaaggcttcagacctgtcagttcatgggcttggagaagtgagtcttttaacattttggtttcttccacttctaaatctcatttttaataataaatggatcctctgatttgcattagtttctaagagtaaatggaggaaggtataacgtgggaattatgacatagaatgtccaactcgataactgggccaggccttttattttattttatgagaacctggggatttatattagaagaagaatccaatggaaagtgcatagaagagatcaatcaatcaagaatgggaaaaaaaaccagtgaggaaggactatagaaaaataggtctgaattcatctggagaagaaatgggaagaggaagagaattaatgtttgctgagcacctgtgatgtgctaaatactttacacctgtcacctcaccttaaccgcataagcaggcctgtgggatggtgttattatccccatttcacagatgaagaaattgaggcttagtgactgtaatgagcttatcccaggttcagctgctagtaacagataaaagcccattaccactgttaagctccttagcaaggggctaagggccctcttgtttttctgctccagtaatgttgatcaagagaaaataggctcaatcctttcttttagcagaaacgttgagactggaagaaaactttttgagagttgtgaagccctgaggtgggttaccaagtgattattttggcagcctcctttcctggagaggcaggaagactatgccaggagctgacctgggctcagctctctggaagactgaaagaaactctaggtatggcattttgcagccagctgcatcattttttcccccaggagcaggcttagcatcaacaagatcatctcctccactcactcaggccacagctttattttgggggtcctctaggctcagggcatggggtggggtaggggaccataaaagggagactggtctacacaaagtcaatagcagacatggccagcccttccaggaacttcccatttaattgagggaatggaatatttggagttaaacgtatgaaatggtgggcccctagctattgggcagttataggaggtggacaccaaggctggcattgtttattgtggtgtgggaatgggaggaaataaaaccaccatgaggagttgggagaaattgcagatgtgcttccaagttcccactctcctcagtgttggctggaagtttgacagtgacctggggtgtaccgctgccttcttttggtatgtgctcagattcttcccctccttcactgaacaagcgtttattgagcacctgtgctggggatgtatcagtggaatcagagcaaaaatacgagggactgcaattacatgaggaggtggtcaggggctctgctataagcaaagacttgaggaaggtgaggtgtgcgccttgtgtatcttagaggaagagagtgccaggcggagggaacagccagtgcaaagcccctgtggcaggagtgtgcctgaagtgtttgagaaacagtggccagtgcggctagagcagggtgatggtgggaaaagggggtaggggaagaagccagagaggggcgggttgggaagctggttgtgcagcctcaaaggccactgcagatggaatgctctggaaggactggggagctaccagagggggtgagcagagaggcatcagtgcaggctgttctgtggctgcttcctgggtacttctcttgggcttggcattgtgccaggtatggtggaaaatgatagaaaacatgtgacatgctccttttctttgaagagctcataattgggctgagaagacaaaacaagaaacagttaaggatcttttgcaagctaactcatgtaatgagggttaaaattgaattccagaagagcgaattgtcagaatagacttcatggaggaatagggactaatgacacatctttgaagaatgaggaggatttaagggagtggagtaagaaagatttggagagggcaagtttagttatgaaataaaaccaaaaattaccttcaagagggaagcctgagcgtctcagtgagtgtggtggaagagagtgtgcaggcagtcatgagaatcagtgctgctatttacagtttgggtgaccttgggcaagtctcttcacttgcagggcctcagtttccccaagcatagaaatgaagacaatcggccaggtgctgtggctcacgcctgtaatcccagtactttgggaggccgagacgggtggatcatgaggtcaggagtttgagaccaacctgaccaacatgatgaaatcctgtctctactaaaaaaaatacaaaaattagctgggcctggtggcaggtgcctgtaatcctggctactcaggagactgaggcaggagaattgcttgaacctgggaggcggaggttgcagtgagccgagattgcaccattgtactcaagcctgggtgacagagcaagactctgtctcaaaaaaaaamcaaaaaacaaaaaagacaggcgagcacccccaccctgtgtatcaggtaggagctaccggggacaacaagttccctttttcagtcttccttcattccctctttccttcatccttgttgaagctcacatagaaaatacggtcaggaatatattttctggttgtaacacctagtatatcagatttagccccatttcattgcaattagttgggactttcccacgtaagtcaagcctcagatggtcataagttaggctccaggggagcccagactaatgctggtcacatctcagctgagacatgttggaagttctgctccagggcatcttggtgtcactgaccgctgctctgaagttctgagccctccagactggggacctgcccttgtttgtggagaaatatttgttttgtaaaacctttacagatttgttttgtaaaatcttttgtagaaacttggcattgcagtgggcagcagacaatgccaggaatgtgctatgttggttgaaaccttggctggtggaagagtcatgcagggtgtctggttacctggtgggttagtctcatttcctagctccttggtggagagtgtcttcttgaggasagatttttccctctcttctaactcaactttcaaaccaaattgaagccacatcagcctatcttcctgccaggatgaatttgatttaactcagagcaatgtgacttataatttcaattgcaggcaggaaggtgtgatttaagacaattgtcaggaagattcaatttaatcttttctttcttccccctctacaaaatgtgcattttgttgcatgatataattttgatatacattctttacaattcagagatagatgtagttcacactgggaaggtacattccatacttttttatagcacttatctatttaaagtgtttttaaaaaagatttctttctaatgatagcagaaaactgagggatggttttgcttctttactagagagaattgtagcaaatcattctgaaacttcccaggcaataaaccatttcttgattaacaggggttattttggtcacttgttaagatactcgtctttaatgaaacaataaaaataattatttcatttaccaaaatggagcaattgtgagttttgcttatttttcaacaagagccagctgtttttagcaaaataggcataagtattttcgagtttgtaattactttagaagcacagaaagtatgcattgatttttgtaaacagaaaattaaatgtcttctttcactctggtcaatagtggaaacttctagtattgtgttgcgcagctcagtgcagttgctttctctttcctcacatatcaacaaagaagggtaaaccttcctacttttgcagttctcacatcatatcccactggtgaaggctcttgtctgaaggctctctagttaaaatcagaccatgttagagttgcaaataacatcagcatcctcaccctcaaactgtttgctgaaggatccaagacccaatgcaacttgaggactaccctgaggagcctctactgggtcctggaggccctggatagggtctagggatcctgatttgaagtctagacaattttcctctacatccasttacttccctcaacttcaggagaaacgtgtgcaccaggaaggaaaatccttacttgtttgtcctcagatgaaaccaggtgcttatgggacaaagaggtgggcagcttttcagggtctcccttggatgggatctcctctccctggcctgctgaccagagcctgacttcgggtccaacagctcctagtgatgctgcctccgtatctgggaacagagcttcttctcagcccctcaaaccagagtgatgattcggatagaggaggggcagatattttatgtcaaggagaggaaaaaagagagaaaattcacatttatcagccatgtaccagatgtttagcactgttkaatccacttcatattatttaatccttaaaataaggctgtgagataattagccccattttacagatgagaaaatcatactgtcctgtaattattagtctgcttttctcattagactgtgggttacttaaaggtggagactgggtccggtttttcctgttttccagtttgtcacacagtgccaggtatacagtaggggctaggtaggagtttgctgagtaaacacatgaataaataaaccagctgcctaaaacctctcagtaagaggtggtgctaggattcacatccagacctctggctttaagactgcctggaagggaagcccagggacagaagagctggttttcattctggctttggggatggcttctgagaggctgttctatgctatgcttttgggtcagggacaggaacgctcatgcttctggggtctctctcatagcccctcacagctgacattactgtgtcaagatttaatcaaagggaagctgaagctcagtggtgtgtgtgtgtgcgcatgagcgtgtgtgcagtgtgctttccacactgagctctcccagggatcagctggtgagagaagcctgaagccttcaagggaccctcgacatcttcattttaataaagctgtcacttgtggtcactttcaaactaaaacaatctagtgggtgcagaaggtaaaaagtaaactgcacgaaaagcagagaataatgccagaaaagatgcaggtaagcagggcatttctgcttcaagaggagagacagcattgaagtcattttaattgacacctgaagagtcactagaaaggagaaagcatagcttcatttycaagaaaggaaacagagtgcttgggaccccagaggtaaagggaagttggcctctggctttccctctraagcagaaacagagggcmtcctgttcaccccgaggtctctgagaacctcagaatggactctaccacctgtgtcttcagggtggcggtgactggcggcctggcaagttaggacttgctgtttcgcactcaggagacaggtgtcgggaaaggtctgcagtgaggagagggagctgagagagggcaacccggagatcagaagagggtgtttcttgcttgcctgtggaaatcccttgaggagatggcccaggtgtcaaggtgggcagcctggaactccaagttatctgctggccacctggggaatcacccacccatgagtgtgggtctgagtttggcaccacagacccttctccactttccccagacaggaaacggacacagtaaaagttcctcctcagactctgcctgtcgggacagcacagcccattagccggagcctcagacaactatgatttttcttttcctattattctctgatattttcaatttgaraagagtcatttaggcagtagcgtggaagagggcatagtagacataggggaaaaattgaaaatgtcatttaaaaaggactattccattctttttttttacctccgcagactcacggccaggagcaatagccagtgggtcaacygaggagagcagtgattttattttccttttcatttcaaacagattgtgtagcctttggggtgtgggggaccagtggaatgaagctatgggccgggaaactaattaygcctccctgcatggctgagctagttaataccaaactgtcattgaggctgattcttccctggggcagaaaagcttcccaaattccttatccctttctctttgccttttgggttttgccagtttgagaaaacaggagcaaaatccaggaagcttctcaaagctctgaaatggtgctctgcattctggttgctaaggctgcattctgatccacatcacccttctctccgccatgcagacttggtgccaggcggggtctggagtcacttggacttgcctcaaatcctggtgctgcctcttactggtgttgccagaagctgcctgggtgtctagggctggatgtagatcgcttgtccaccctgtccttccccactctccagcagtgtgggatcaggaatgggctacctgaatagtgagcctgcctcacttcactgattctgaaactgagacccagctgtgtggatggcgtggtcagcacagtgccactgatggagaccatgcacaatgaaggagaataagacattcaataatgctcttaatggatttttaacttactaaccaaaccaacacaatctttgaaaagtggtatcttagtctatttgggctgctataacaaaataccataaactgtgtggtgtattaataacagacacttatttcctcacagttctggaggctgggaagtccaaaattaaggyatagcggattctgtgtttggtgagggcccaatttcttgctcgtagatggcacctttgtgtttcacatggtagaatagacaaaacagctttctgaggttcctttcataagaacagtaatcccattcatgagggtccaccctcatggccttatcacctcccaaaggccctacctcctaattccatcaacttaggggttaggatttcaacatatggatttggggaagggatacagacatttagatcatggcaagtggttacacatatatgcataagacacatttatttatgatagcaaatgttatgctttgtaataactctgatttcagtaatttctgtcccccttttcccctcttgggagaccttagtccatgcagtccccagctagccagatgtctcaaataacactggatccaataaaatccatagatctttttagggagagaaaatgagttttaaatatggaatggaaacatttaaaaatatagcctttgtggcaacatgaagattatgaatattcagtttggacacaatctcaagcaattaggcagatgcatatttccagggagggtatgttgctctgatggttgagggggtgggtgctgtgtatcatttcaaaactggatttccttgcagacttcaaagtttgattttaggaaaatatgggaatgaagtctcagagaaagccctatacattcccccacctttggcaggccacactccctttggccacatacatacagttaggctttagctgagaaatctgctcagatctagaaaactctctagattctgaacgctgaggtggtaactgagccagtgttggagcaaaacaatctgtttacagccttggaggacggttcttatgtggcaacacttagtcttggctgttgggtattatttgtttacagcccagttttctccatgttgaattctcattagaaataaattgtcttgggagaagcaccaaacacaaattgaagtagttgatgggaagacataacttagaattgcctcctttcaaagaagactttgtaccagccaatagtccctttgaacttttcaggataaccagagtttttagcaatttaatattctcaggttatatgggacaacccaattttaaatattctgatctattttccctagaaaccatgtaaatgaatcataaattctagtatttccaaagtttaccacccattttgactcctgtacctggaagcagcacaaagctcttgccagaccatacacccttatttttaattcagaaaatatggtcaaagtgaagtaaacagagcactgatcaatagagccagctgttctctaaatgattctctctttttttgcagtgcaaatcacagggggttagggaagaactggaatggcagtgtgaggagctctgtgggtcctttgcccagtgaaacaacataactggtaaaaattattaaacaacacccatctaaagtccctggaaattgccctgatgagatacataaaatgaagaaacacttattcaagaaaatctactaaattttagtaataacaagagtctgggacatttgagccataattgcccttcctcccccaattccagctcaataaaacagaagctctcctctggacagatatggacaagaagacggggtgctgctttcccacaacttccactctagggctatatttctctcccagaagggccaggccaccaggatttctcatgtctcccagctctgtgttgcagagcatggttgagtggtctggggctgcccctacttacagggtggaagctttaccctgtgttgagaatactaggccctgattgcccctatccctggctcacatgtagggtggaggtttcataacaggagagacaattcaagaagatcagtgactaccatctccacccagcaccctactcatacagcagggatgtcactctgggagaaagaattaggctgctattcctacttacaactccagagcagtggtatagatattctgcccagggataggggcaggctgtaggaacacagagatttgtagcttttgactttatttggaatggagtatgaggaggtccaagcataaaagcaatttccgagcatttaagaggaggttagtagctccataatagcaacaaaacaaacagagtaggccagctagacgacctagcacagtaagttctcctatcaacacagtaatgctgttgataggttcttagaaattgtgactttaagcaaatcaggcaggtcctcaaataacgtcatttccttcaatgttgttttgttataacattgatgagraaaaaacaggttttgttatatgttatattttgcttaaagtcacagtttccaagaatctattgatgatgttaagtgaggacttactgtagtttaacagacataatcaaagaaagagacatttcctatggtcaaagaaagcctcaaaaactggcctcaaagaaaatccctgccaaaagaacccccaaacccaaatttaattggatcagactgtggagcaatttatgcctaaaggcaccgttgaaaataatagagcaatcaggtagcaactagtggaggctaacagctggaggtgaaaccaatcgggcagtccagccagaaatgtaacagggagataagcaatagagacagttaaaaggagctctgctaaaatcactgtcatcctagggggttcgatagggagaatcaggacactgtgcacatgcctaaggtttcaccttcaagaagtagtattagagactacacactgttgggggaaaaggacttcactgaagtagcccatccaatgcggtaaacaagtaaacaagtatatagtgcaacaacaagaagtccttgggtgggggattaatcagtattcaaagtgtctaaaatatagtatctaaaatgtctggttttcaacagaaatttaagagacatcaaagcagatcatagaaattgtctttcaggggacctggatgtgagacttaccagaaaaagacagcaaagtagctattatatatttgttcaaagaactaaaggaaactatgctgaaaaaattaaaggcatcatgaaaatgtcttaccaataggtaataccaataaaaagatataagttatgaaaatagttaagtggaaatttgggacttgaaatgtttaagaaatgaaaagaaaaaatcactggggcacttaaaaatatatttgagttggcagaagaaagtatcagcaaatttgaagatagatcaatagagattaccacatctgaaaaaaagagaaaaagagaatgaataaaaatatgcagagctttagaaaaacatggaacaccattaaatacagcaatgttaagtttaatgggaatacttgaatgaaagaagaaagaagccaaaaaatatatgaagaaataatagccaaatactccccaaatttgagaaagaatattaatctttatatccaagaagctcaacaaggttcatataggataaaaacaaagccacatccagacacatcatagttgaaattttgaaagctaaagagagagaaaatcttggaagcagtaacagaaagaccacttatcacctacaagagaatactgataagattagcagctgaattctcatcagaaacaatggaggataaaaggcagtgggatgatatattcaaagtgctgaaagaaaaaaaagttaaccaagaatcattacacagcaaaactattcttcaaaagaatagttgaagacaaaatgaatacaaaataaagtcattaccagaaaaacaaaaacagaatttgttgttatcaggtccatcttacaagaaatactacagattgttcttcaggctgaatgtgagtcacacaggacagtaattcaaattcacagaagagacaaagagcaccactaaaggtaattatataagccattataaaaaacaacgtatttgtatatttctcctcctttcttctcttaactgatttagaaaggaattgcataaaaatgcaaattattgtactgctgagcttatatagaaatgtaatatatattaacaggaagcacaaaaatatggaggagggaatagaattatataggactaaattttctatatttcactagaattaagttaatggacttggatgagtcaagaggtatattgtaagcttcagaccaaccactaagaaaataactcaagaagtagagttaaagatattctaaatgttcttatcacaaaaaagataagtatgtgaggtgatgagtatgttaacttgattgaatcactttacaatgtattcatatatcaaagcatcacatcatacactgtaaatatatataatttttattggtaaattctactttagtaaagctgggaaaaaagaaatgttaaaaattattaaggaaattaaaatgtacaagaaaatattgacttagtgcacaagaaactaaggaaaggaggaacaaaaaatatatgagatatagaaaacaaaaagtaaaatttcagatataaacccaactatattaatattaacattaaatatgaatggattaaatgatccaattagaatgttgagattgtcagattggatgaaaacacaagatgcaactacacactgtctacaggagacacacttttgattcaaagatataaataatttgaaagagaaaggatgaagaaagatacacaatgcaaacagtaattgtaagaaatctggaggggctatatttaatatcagacaaaattgacgttaaaacaccaaaaagttactagagataaagagcaaaattttataatgataaaaggatcaatccataaggaggatatagaaattataaacacatatgcaccttaaccacagaccactaaaatacatgaagcaaaaaatggaaaaacttgacagagaaatatacaattcaacattaatagttggagacttccatactttctttaaataatgggtagaacaattaggcagatgtactaatgatgatatagaagacttgaacaaaagtataaaccarttagacctaatagacacttataattcactccatttaataacagcagaatacacatttttttcaagcatatatggaaaattatccagaatacaccatacactaggccataaaacaagcctgaataaatttcaaaggattgaactcatcctttaaaatgaacaaagtacattctctggccacgtgaaatgtaattgaaccaataacagcaggaaatctagaaaattaaaaaatacatggatattagataacatactcctaaataaccaagggatagaagaagaaaagggaaattgcacactattttgaggtgaatgaaaatgaaaacacaacatacaaaacttatgcagataaagtagtatttaaagggaaatgtataactataaatgtctatattgaaaaagaaaaaatatcttaattacctagctgtgataggttgacaaaagtttctccaaaagatatccatgttccaatccctgggactggtaaatattttatttgaaaaaagactctttgcaaatgtgaattagttaaggttttgagatgatgggtttatcctggattattcagatgagccctaaatttgataatcagtaacctcctaagagagaagcagaggaaggttacacacacatgaaaatgaaggctgattttggagtgatgcaatcacaaatcaaggaatgctggcagctaccaggagctggaagaagcaaggaacagattctcctctagagcctgcaaagaagtatagccctgctgacaccttgattttgcctcgagtaagactaattttggacttctggcctccagaattgttagagaataagtttctgttgttttaagccattgggtttataataatttgttatagattacagttataatttgttatagattattatagattatagtaatttattatagattatagtaatttgttatagattactgcaaccttaagaaactgcaaaaagaagagcaaactaaacctaaagcaagtggaagaaaggtaaggattagcactgaaataaatggagaatagaaagccaatagagaagatcaataaaaccaaaagttggttctttgaaaaggtcaataaaatggacagaactttagatagactgacaaaggcaaaaagaatactcaaattattggtcaggcgcggtggctcacgcctgtaatcccagcactttgggaggccgagacgggtggatcatgagatcaggagatcgagaccatcctggctaacacggtgaaaccccatttctactaaaaatacaaaaaattagccgggcgtggtggcaggcgcctgtagtcccagctactcaggaggctgaggcaggagaatgctatgaacctgggaggtggagcttgcagtgagcccagatcgctccactgcactctagcctggatgacagagtgagattctgtctcaaaaaaaaaaaaaaagaatactcaaattattaaaattagggatgaaagggaggacattgcaactgaccttagaaataaagaaggattataataaaatgatataccaaaaaaattattaggcaacttaaataaaatggaccaattcttagactgatgcaaactaccaaagtgaacaacagaagaaatagaacatataaataggcctcttaacaagtaaagagattgattagtgatttaaaaaattctcccaaagaaaagtccaggtccaaatggctttactgggtaacttctactaaacatttaaggaataatcaataccagttcttcataaactcttctgaaaaatagaaaaggaacacttgtcaactcattttatgaagccagtgtaaccctgatatcaaaaccagacaaaaatgtcataatgaaagaaaacctcagaccatatctcctatgaatatagaaacaagaatctacaacaaagcagtagcaaactgaattcagcaacatataatcaggaccatgcaccataatgagtgagatttattccaagaattcctggttggtttaacatctaaaaattagtgttacacataaaatattgatgaagtataaaaaccgcatgatcatctcaaaagatgcagaaaaagcatttgacaaaatctaccctttctggatgaaaacactcaataaactaggaattgaagataatttcaacaacctgatgaagaacatctacaaaaartcccacaactaacatcatacttaatggtcaaagactgaatgaccattaagatcattcagtatcaggaacaacagaagcatatctgctgtcatcacgcctatttaatattataccagatgttttaaagaaagtaaaactatctctgtttgcagatgacataatcatgtatcctagggaatccactaaaaatcagttagaactagtaagtgagttcagtgaggttacaggatataagatcaatataaaaaaacaaattgtatttctatcactatcagtgggcgatctgaaaacaaactataaaaaatcatgtataatggaatcaaaaagaataaaatgcttaggaagaaattaagaaaaaagtgcagaaactcatactctgaaaactayaaaacattgttgaaaaagttaaagaagacctaaataaatgggaagacatctcatgttcatggactgcaagacttaatattgttaagatggcaatacttcagatatctttatcaaaatcccagctggcttttacacagaaattgacaggcttatcttaaaattctgatggaaatttaaggtatacaggctagccaaataatcttgaaaaacaaaaacaaaatggacaactcacatttttttgatctgaaaatgtactgtgaagctacagtaattaaggcagtgtgatacaggcatgaggacagacacactgatcaacagaatagaattgacagtccagaattaagtgcttaaatttatggtcaattttattttgataaggatgctcaaacaatttaaaggggggaaagaatagtcttttaacacatggtgctggaacaactggatatctacatgttaagaataaagttgtcccccatctcactctatccacaaaaactaactcaaaatggatcatagaactaaatataagagataaaatcataaaactcttagaagaagacaaacctaaatctttgtgactttagattaggcaaaggccacttaggtatgacatcaaaagcacagtgacaaaaaaaaatggataaattggatttgatcaaatttaaaactttgtatatcaaagaatactattcaacgagtattctcttgaaatgataatccaatgaattggggaaaatatttgggagtcatttatctggtaaggggttaatatccagaatttacaaaaactcataatgcaatagtaaaggtgataaatgacacaattaaaaaataggcaaaacatctcaatagacaaattctctgaagaagatatacaaatgttcagtaaccacatgaaaggatgctggacataattagccatttgggaaatgtaaatcaaaaccacaatgagatatggcttcacacccactaggataatgagtgttggtgaggatgtggagaagttggaatcctcatacactattgaagagaatgtgtcttagttcatctcggctgccataacaaaataaacaaaactgggtagcttttaaacgacagaaatttctcacagttttggagggtgagaagtccaagatcagggtgccagcttgatggggttctgtctggtgaagtctctcttctgggttgcagcctcctgacttcttgctgtgtcctcacatggtaaaaggggctaactagctccctgagccctctttataaaaaggctctaattccattcatgaggacaaaggcctcattacctatccacctccctagggccccaccttctaaagacatcaccttggtgattagatttcaacatatgaattttggggcaaaataaacattcagatcatagcaaaatataaaatggtaccatcactttggaaaacattttgggagttcctcaaaattttaagcataaagtttatgtgaccaggtaatttcaattctaggaatgaatatatatgtatatattcattcttggagattttatatagatatatatacacacacacacacacacatatgtatattttgtgtatatatacacatatacattcttggagattatatatatatatacacacgcatattttgtatctgtgtgtatatgtagattttatatatatatatatttatgtgtgtgtgtatgtatgtgtatatatatatatatatatatatatatatatgcccaagataattgaaaacacatatctacacaaaaacttgtacacaaatggttatagcaatattatttataatggcaaaaagtgaaaataatccaaatgtctatcaactgatgaatggataaacaaatatggtatatctatggaatgatatatttattcagccataaaaaggaacaaaatactggcacatgctacaacatggataaatcttgaaaacattatactaagtgaaagaagtcagacacaaaatgttgtatcatttgatttgtatgaacagagaagtctatagagacagaaagtagattagaggttgcctagggctgggtctgagtgtggggatgggaaatagggaatgactgctagagggtacagggtttcttttgggagtgatgaaaatgttctaaaattagattgtggtaatgagtgcacagctctgtgaatcaactaaaaaccattgaattgtaccttttaagtgcgtcgctgttatggtatgaaagttgtatatcaataaagcttaaaaaataatatgtggttgttaatgtgaagaactgactcaggctagagcttttccaactttagtggatggaggaaagcatttctgcatttaagacttctggaatgaggtccctctggacaggaagcacagataccaatgaactgtggccacctggacctgacattcttctaaaaaaatactgtgctttctcctctctctcatgtatagatacacaaatgcacatacacagagtctggcacagagtgaaaactaccttcaattccaaaacggagaatctactatgtagcctagcaaagcagaaaggagctgagaagcaagagaaaagcatccttcatctaaatctctatgaatccacaaagtacaaacatgaagaccaattctttgaaaagccaaatgcaaggcaggggaatcatattccaatgagcatgaggctcatatgaaaattttatgttccaagggtcatcttggaacttgacagtgcaattgagaaaggctggaaatttttattttattttactttattttattgttttgttagaaatggggtcttgctgtgttacccaggctggtctcaaactcctggcctcaagccattctcctgcctctgcctcacasagcactggggttaggggcatgagccaccatattggactaaagcctggaaatttttaaagggtgacaatcacttataagaagcctctggaaatggtagaaaaaaaaattagatgtggtctggctataaagcatcttgctaacatttggacacgtggacaaaaaggaacaaagttcctcacgcatcttatagcccctttgttaacatcagtgtctgtttgcagagaaggaaggccaagcttcatagtacctttcagaaactgggaaaactgaggaaaggatttagtatgggcttctcacctcatagatttttttagactcatgagctgacaaagtaccaagaatggcttgagaccctctattccagggtccgcaaactgaaatgctaggcaggcaacgtaaatgggtggtatgggtttgttatgatagaacagggcacagttataacctgtagagaagtaaagactgtacgtcttgcctaaagggagctgcattggacagacttaaaacgaagcgggaggccgaggcgggcggatcacgaggtcaggatatcgagaccatcctggctaacacggtgaaaccccgtctccactaaaaatacaaaaaattagccgagygttggggggtgcctgtagtcccagctactcaggaggctgaggcaggagaatggcgtgaacccgagaggcgcagcttgcagtgagctgagattgcgccactgcactccagcctgggagacagagacaaaaacaaaaaacaaacagaaaaaaacaacgcgaagcatgggcgtcctctgttctggtctgacccttagcattttatctacaagaaaggtaaccagaggccttaagaaggaaatgacttggttaaattgacagaatatcttgccttctctttatactttgaagatatgtcaaaaaattttcagtatgggccccagactgcctaataaatcagcccctttcctgttttttggcttttcaaagagttggaactcccaaatgtgctttggggagtggtgggatttttacatgaaggatgttcccactgtttctcaccatctttctggttttctaagaaggaatggcggtttataccctttttcgtaactgaaagttgttttgagcttgtgccagacccagggcgtgtgctgtgtgtgggggtaaggtgagggagcatggttctgccagggagccatggtaggaacttgagggagtgaaccccttatttggctggaggtattatttgcctggaaagtggaggacagttgcgggaaggatgaattgctcaaacattatctagaaaactcagtccacttccttgcaggaacagcatgtcaatatgtttttgtctgctggacaatgtgtgggaaacatctttgattttttttcgtaaccgtgcatataatttcttagcatttcacttccgggcattgattaaagcttttctgtctctttagagtcattaaatagaaaaacgcctgccagagacagattgatgatgtttctagggacttgcttagagaaataggaatctccttaacttgctgaaaagtttttctggtttgtgccaaatagctagcatttattgagttttattacatgccaggtaccatgctaaatgctatgcacaaattatctcactttatcttcacagcaacaaactgagatatgctattattatyccctttttctattataaaattgaggcacagaaacattaaatcatgtatctgaggtcactcagtcagcatgtgttgggataggaattgactctatgtggtctgatcttgaggactgtgttacatcaaactcaaaacccttaaatcttcataacatctaatcacagctgggtattggctttcaagattataggtgtgttctcaggacccaaatctgataatgtgtgtatttttgtcccttcaaagggtatgggagcacatctgtatggctgggctcattgtatttccatctggcactaaagaaaatgcacttctattactatctcagcctcctttaaccacatacattcacccaggagggagcatttccataaagttgttttaaaatgacagcaggactcactgggggggctgctttccttgtgggcagaatgactgtagttggagatgtaaagtaggaagagaaatggaggctgttatggtctccctccccacttgcctataaaattggaaggatgtgattggaataatttgcatttacaaatgaggagcctgagaaacatggatgagaaggaacgcagtgaggctcatccagtaaagtcagccatgagccaaggaccgtgttagatgctttatctatacagtcatgtatcacataatgatggggatatgttctgagaaatgcattgttaacacagtattatcagtgtgcaaacttcataaagtttgcacaacgataatattgcctaatnnnnnnnnnnnnnnnnnnnnnnnnnnnnnnnnnnnnnnnnnnnnnnnnnnnnnnnnnnnnnnnnnnnnnnnnnnnnnnnnnnnnnnnnnnnnnnnnnnnnnnnnnnnnnnnnnnnnnnnnnnnnnnnnnnnnnnnnnnnnnnnnnnnnnnnnnnnnnnnnnnnnnnnnnnnnnnnnnnnnnnnnnnnnnnatattctaaaataatagtaaaaatataatatagtaaatacataaaccagtaacatagttgttgatcatcattatcaatgattatgtactgtacataattgtatgttctatacttttatatgaccggtagtgcggtaggtttgtttacataagcatcaccacaaacacctgaggaatgcattgtgctgtgacataaggatggctgtgatgttactaggcaataggaatttttgggctccattgtaatcttacgggaccaccattgtatatgtgttctgtcattgagcgaacgtcatgcggtgggtgactgtacaagattcaagtcaatcttcacagcatccttgttgagcagacagtaacatgctcattttatcaatgaggaaacagattcaaaagcaagttgggagtgatatctcactagtatatccctgttgcactgatgcagcagaacagccagtgtccttctgattggttggtgcctaatataggtagagtaaggaaagttaattttaatgtcaacttccaaaccagtggctttaaccagtacaatgaaaatatccctcacttacccaacaagcaatgtggaagttccttgtgggcctgcagccttccttccatccaaggacataggcttgggccctgtcgctttctgcrtgaccccttgcatgcaatcggcagatacggggagagagaacatggaaagagcatggaggtgcccatgagccaggactcgcatggagcacctaatttccaccacattttattcacagaatcagccatgtagcagcckctgactgcaagggaagctgggaaatgtagtctacctggtttccctggaagaaaggaaggtggttttagtgaacacacagcagtgtctgccacatgaccatgctgcattggttattacatatttgaatatcacccctaggtaaagtcacaaaggtagcaagtggcagagccaggagtaggacctaggtctgtgtaacctcagatctggattctttgcagggcctctcatactcctttaatggctggctcaggttctgcacctctggatgcagtgggtgttgtgattgcctatgtggactctctttccaggcaccaacaattctataaaacatgtgactgctctccctttcccttccatggactatctgggctacaaatttgagagtaggttgttgggaatttttgtgagcagccaactcaggatcaggtctgtgaagctcctggcttatgtggtgctcagtggctctcttgggagtgaggggcgatagacaaactgtgtcactctccccaggagggctgggctgtcattagcattcagcaaggctgtgagtcttgttgtacaaatcagctgtttaaaggccttaaaaaaaaaaacccctaaaactgctgaatgcctctcgtggttgaagctcttatgagtatggagctaacagtttcccacgactgctgaacagcaaaaggggagccatggtgtagtgttttccttttgattcatatttggagtcatttttagcaatacggcaaaatgtgaagatgctcttggaatgtgggcatttgttacctttgacaaaggagattgcttgtatttttgtttgtctgttttggtttttttctttacagctcttgatcttgtttattcagagaagcaagaaggatctgttggtttcataaatgtgcttctattcttgaaaaaatgctagagttagccacttctccccccacttcctcactggtctgtggcaggagactcaagttgcaaactaacgcagccccctttccttcctggcttctccctccactcctatgggggtcatcagggggaggggcagagagctaaccagcagagtccaaacacattatctcttttgtctgggtttcagagtcagtttattttcttccatcagttgggaaggtgattctatgcatagggattccttgtatgsaatctttcccaagatagggcttagtgtattgtgccagctttgacttcagtcactctgcttgctgatgcaactgaccctgcttcatcaggcctgggcaaaaacaggcccttttagtagagttctaatgggcactgcttgttcgatggtaattaactgggtattgggaatttcctcagttccagatgtctgggagttagaaacaaataacatctgttctcatcaaaaggtagagtggcaaagtacaaatcacaagtcactctcaataaatgcaggagctggcgtttgagatccacagtgaagccagattacctgtttgcagtactcctctatggatagaggaaacagagctaaacatttcctctgagcctggagctgacctggataagcctcttcttgcttaacagcacccctgagtcttcatccagatttgggaagaggatgaggttggttagcatgctgagtgataaggaagaaaaggatactgtggagcccagcacctgtctgatctagggagagaattcatgactagtagacagaggccagaattgactcgcttcacaggaatcaaggtgtaacattattccttccctccctcctactcttcctttcttctttccatttgtccgtgcatccattggtttagtcaacagacatttaaacagtactcactaaatgccagattctttgctaggtgactggaggcatgcaaagggggagatgtagttctgcctacaaaaagctcacagtccaataggggagtggagacatggacagaagtaatccattcccaaggtgaaaagtgactagtgccataagaaaaggacaagaaagtgtgagggaaggttggtkgggatgaaaccaggaagggggtatggctcacttccagctgagcagatgggtgtgtaggtttggggaagttttcatggagaaagaagtatttgaactgagcactgaaagatggggtagatttcaactgcagaaagttggggaaagggttaggagcctcaagcagaaggacttgtgtgtataaaagtgtggaagctggaaacagcatgcctattttgtaatttmttggtagagacatgccactcttagtgaattagtagaaaggcttcctttctccccctgcctctctctttcctttcggatttctatattttgtgttcttattattctttggaccatagaagaggttcatgaaatgaaagggtgggggctagagatggggtgggctttaccaaccattgacttttccctcttctttaagtttgatcacctaccaggggaagtcaaggggaaatgttgcctgttaattttccttgttataggttggttttgatgttgatgactggtattacttctctaggatataactttggaaacagcattggtgagggcattccatgtaaaacatcaacttcagcttttctgttgtagggtattttccgtgcttgactactgatggtcttgcaaagctcctgtattcaaatcctaggctgagctccagagtgcttcctcctagatcgaggctttggatatgctcactgctcattagcaacctgcagaaaagctgggatgcagtcttcactgatttggtgtgtaacggattccttgaagggaagcctgctttgctgatggggtcrgcatacgtggcgtactgacatgggaatcatggcatttccagccagtgctcaactctgtggaatgcttcccctttcagcccaagtctcaaattgcctccaagtttcctcatttctgagaaagtgagccagtgaaggttgatattcaaatatataaacagctaatgtggcatttggcagtgtccaatcagaaccagtcatatagtgctagagcaaattgctgtgccaggcagtaactgttttgtggctggctcttggggaaggtttggatactgggggaggggtcaggataatgggtgctggaagcatctctcaagtaacttgggaaagcagctttttctaaaatgggaggaaatttgagtttatttatttatttatttatttatttggagatggggtttcactcttgttccccaggctggagtgctttgacacgatctcggctcactgcaccctccgcctcctgggttcaagtgattctcctgcctcagcctcctgagtagctgggattacagacgcccgccaccacacctggcttttgtgtgtgtgtgtgtgtgtgtttttagtagagatggtgtttaaccatgttggccaggctggtctcaaactcctgacctcaggtgatctgcccgcctcggcgtcccaaagggctgtgattacaggcatgagctaccaagcccggcctatttcagtattttaagaactgatatggtggaaccagtgcataccagctaaayataaatgctgaaacgttttattttttttaaaagatcaactatgtcctgactacagcctaagcaaaagggttcctggtggtttctgcctgtcaacagggaagatctcacttcacagaggctgaaactggggctagttatggatgctgggccctgaacaggtagaatttcctatcttttagctatagtttaagccagaagttttcaaactttttggtcttaggactcctttatgcttgtaaaaattattgaaaaccccaagggagttttgttgctataggttgtatcagttaatatttgccacaatagaaatttaaactgagaaaatttcaaaataattattttatttaacaatggcaataataaacccaattacataaattaacataagtagcacactttttgtgaaaaagaactacagactcttggtacaatttgttttagtccattcagactgctataataaaataccctagatggcatggcttataaacaatagaaatttatttttcacagttctggaggccggaaagtccaagatcaaggggccagcagattcagcatttggtaagggcccactgccgggttcacagaccaccacgttcttgttccatcctaacatggtggaagagataagaaagctctctggactctctttcgtaaggatacaaatcccacccatgagggctctaccctcatgaccaaatcacctcccgaaggccccacctccctgggttaggattttagcatgtgacttcttttgtgtgtgggtggggggccacaaacattcagtctattgcagtttccaaagcaacagccaaaaaaaaaaaaaaaaaacttattgagaagagtggccttgttttctattttcacaaatctttttgatacctggtttgatagaagaaaaatggagtctcacatttacttnnnnnnnnnnnnnnnnnnnnttgttttggttgaagtatgaaaaagatttttcggccgggcgcggtggctcatgcctgtaatcccagcactttgggaggccaaggtgggcggatcacctgaggtcgggagttcgagaccagcctgaccaacatggaagaaaccccatctctacaaaaagtgcaaaattagccaggcgtggtggcgcatgcctgtaatcccagctactccggaggctgaggcaggaaaatcgtttgaacctgggagacagaggctgtggtgagccaagatcacgccattgtactccagcctgggcaataagagcaaaactccatctcggaaaaaaaaaaaaaaaagatttttcttcacagatatatgtagatgggaaaagaaggagtattttaatattttcagataattatggatattcttctttgatactacacccaaactggacaagtgataagtttctagaagttggagtgaaatctgaaaccacatcagtaaatgttttatattctgttacatcaaaatctgtggtctgccttgtactttgcttatatcttttatccaagcatgattttgtaatattatacattagtcatttggaaaggataagctcacagagttaggcagatcttctaaatgtggacatattttattatacagtgtgaaaaatcacttccattaatattaccatttatatcatcagaagtctttaggtgttgggaagccgtcaagctcatagtggtggaggcaagttttccataattataaattttccttaaaagcttggattttatcactggggaaaaatattatcacttattttccttggagtgacaagactttgagaaaagttcaccaaattcccaagtatgaataattatgatttgttcatcagttgttcttttaagtgaaaatagtgtttcatgaaaaaagtacgtagttcattgtccacctcgattgtataagctctttctcttgagacaaccttcatacttcagtctgcagcagaagtgctttatgtgtatgtgtgcttataagatagcactgactaataggaataatttacactgtgactcattgggtttgcttctttgctctccacactcctcaggaatctcaaggggcaaacggctctctgtgggtgtttcactgaagactcgcctctcggtccttacgtgttcagacgtgcttctctgagctctgcctccatcattcactgctgagaatatggccagttgaaatgcactggagaataggaacccatttctcttacggcatctcccatcagctttccaacagtaacctgatggctccaaggttcctgtttactttgatttacttttccaagactttaaaatacaaactgtccccttgtgtttgcaaggtgttatttatttatttttcttcttccctggacataacttccaggcctttcctggcataggtcagtgwctatcctcgagcttcctgtccccagctgctggaaggacactttgctctaattttattgccgctggcccacttgtcctaccatttggaaccaagttccctggaatctcaggggccgcttcttctacttcccctttttacttctctccgtatgtcctcttatctcttttctgcttgaccacagttttcaaagcttaaatctgtctccagccagcccagctcatgatgccattccttttygaattcctatgtcctcacaagaattcagttcatctctatttcattgagtgtgaccttgtgctttcatcttgtggggagccgttgacttgtctaagaccataattcatttatttgggccttataatgatattgagatcatctgctccttgcagacagggctatttctttatttctccctcctagcccagtgaatgccttgcacatcatgtgagcttaaccattactggccgatagtgctataagtctggtttgatttttgcttttctgaaaggagctgaagctttaagcattttccctgaccacgtatgtggtcagggctttggaaatatcttggtgtgtgttcttcaaaatgtcggcatttgaagaagtggcgtctcatgggacctctggtctttggatgtcctacatttggggaatgagatgtaaatgtatcctttgctggggccaggtggagaggaatttagtagctacaactcttatttattgattaaactcagctttcrtgcactttccagccagaaacagagctagaaacctttttaccccgtggattttattttcacctatggattcagatagtctacatttcttcattcattcagaatgtatgaattgagctcctcctatgtacttggcactggtcagctgctctggaggacccaaaggcatctgataggtcaccatccattatgagatataagtgtgcacacagagggctagcatctagaaggaccagctgctttgagaaatagccccaggatggtcttgccagaaataggagaccagggtggaattggctttgtgttccctgaccaataactcagcaggagactggttctgtgctgctgtggaaaaacctcattaaagggacaaattgagtgtaacttctcaggaaagagctggaaagcaccaggctttgctggccctcctggtttttatggaagagcacatgaacgaccttcctgagttgagtgttggcaggacttagagtcccatgcctctcattttgggatataaaaatagcatgggggataataggatggttcagggaaatcttagatcttcctctctgcaggaccatgacaaccacttctgtggggtgtgtgtggcagtggctgtgctctgtggctgtggtgaggagttggagaaagaggtgcagctgatgtgggtccgttcttcactcaacaactagagtaatcttttaaaaatgcttacttcctaaagccctgtaatgattattaattgtaggaagaataagttgcatcacctttgatgagggctgaaaggctgtgttggttagtttccactgggttatgctggagcaacatcacaaaggcttttagccctcaatgtgtatttctactgcayactgaaagtctgcgctgcttcacacgatatctacaatccaggaactgggctgagggagcagctattgtttccatcttgtggcagaggaaaagagaacaatagctgtaagtcataatggctcttaaagcttcttctcaaattggtgcatgtttatcacttctgctcctattccagtggtccaagcaagtgagacagtcactcattgtcactgtgggatgggacacagaatcccccactggatagcactgcaagccacggggcaacggacaggcatgcatagccctcttatagggaggggcagtgaatgattgggaacaaaggccctttgcctcctggccatgcccagctccctgcccttttctccctccactctctgaagcctctcattctgctctgacccatcagcttgtgctgttctcaaacacatcagctttgttcctgcttcagagcctttgcctgctctttcctctttcgggaatgccctcttcactttgttcagccctcttccccatatgtcacctctccagggaggctttccctagcagcccattctactctttcccactgcctctgcttggtttttcctaatacacagtatacatggaacctcatgtatactaggaaatactagattactcatttgttgtctttctcttccagtaaactgtaaacatcctgggggcagggactttgtcctytttagccccctatctggtataccagatgcctgacatctggtggactttcaataattagatgttgaatgtgaatggctggtcacctgtgggtctcaaagaaaagaggctcccagcatgtggagagtgaccacccttttaggaataagcacaacctctccctgcctggctgcttctatcctgctaaagatgcagcagccacatgcattctttttaggcccctggatggagaatttctcttcgtctgtgagcttagccaggagtgggtagcaggagccaggcgggataaagtgcccactcggcagcccctgttgaattaataacaagctgcacccttcaggagccctgctctgtgagtgcagcaggtgaccaagtcctgccaagggctgggggtgtcatggggagggggcaggggaggaggaggggaggtcagctggggtctcactgtagcgtgcccctgtccttgcttggatcagtgtttacctcaaaaatagcaggaaatgcagcagctattacaggtgggcgagggaagcagaaaatcctggcaggcatccccagaaggcaggaatcacacatgaccagcacctggctctgtttagagtctttgtgtacccggatgaaaatgaatctgtcacattggccacagccagtgctccttggtgattctgtgaggcctgcctgttgtactggccttctcttctgctctgtacttatactcatcaacaccagcatggacagtgctgtcggggcccctactccagccctgccccacctcaggcctcagggcacttttgtctcatgtctttggaagtctctctggctgccgcagccttggctcagcaagccggcttctctcgggacaccagcaaatagacaaaacacatgcagcacataaattgtccttatcaacacacactgtctccctctttccaacggccgcagggagctgtgaagcaggcttcagggtggcaccgtggaggatgacacagtctttggcaacctttcactaaagtgccttgtgccggaggacggtggagattacaaaagtcacaatgccactgcctagtccagggtaggttagaaataaccctggatcctgtggctacagaactgcccttggagatgcttcacagctggtaaagagctgtccatcctctgccctaatccctgctgagcccaggagtgagttagggatggaggcakccctgctatggtgtgatgacccttggtgtgggcagggccaatggtcactggaacatgctggcatggccatatgggctgtcttgaccaacatctgttcagattggttgggtgttctgcctgggcagtgcccatctgttccagttgttaagtattttgaatagtatttctgtgcggagktctcattaatctacaactccagtggctgagctacctggccacagaactgtagacatttgcactggaaaaatgaggaagaagagttcagtagcaggatgcggaagggagggattttaagtggaggaacagtctgggcaaaagccgggaaacatgagaagcctgggatgttcatggctacatctcagggacggtcttaggaaagcaaatttgatgaggaggacccagggctagtctttgggggtggcgggagggagaaggaataagatggcaccttccttgctgtcggattgagaacacatgrggtttgccctgagtctgccgaggtatttcaccaaggggtttgcatcttgggaacraactgggaaacctggacccaaacatggaatgtgacaggccaaaggtcacaatggtgagttagtggcaaccccagggtcaaaatgattgtgaaagagagtctgtttcacagagatatctgtctgtctctttaactcaatttccattttgcttttttgtctgaagttgaataatacagaactttccaccgtccagactccctccacctggccttcctctcatcctataggaagccaccacactgaggggttggggcacatcttttgttgagttttcaggttttctgaaggcattttataggagaactcactgagtcacaactcagaggttgactacagaatgttcaagccacattcttcacaacccctgctcccagggctctctcctcactgaaacagagtgaaaatgtggaaattagctcttgagcattccagggcttagcacattggtttatacaattgtctgttggcatggccttagagcacacaggaatgggcttaatcatttattcagaaagagacaggttatcaattaatcttaatcgtacctgctctttcactgcccctcctcacaaggagctccgggtgtcagtcccaaagcccaggtctaatcttcacggtttctgatgatggcctgcgatgcccatggggtaccctggcggggttccagaggctagaggcctgatgggtaggacagggatagaaactcccacctcaacccccacctaatccgagcrgctccattccatctgtattatatattgaggtttgcataggagtttatttggacacacattaaatgacggaatttgaaaatcactacctgaagtgagcaagccagtgagcaagccatatagcccagccgagtagcctgctgtctgtcatcttctagtcctggtcaaacctagagtatggtgacaggtggggctcgactcagggctccctagatccagcagaccagggtggctcagtaagttcctgagagctggcgccatgccacggctgcaggactggagccttcctttgccatcaccgccactcagctaaacaaatgtccagattcacatttttctccagtgggattgtgtctgcccacagccagttcccagccaaacctatgtgtctgctggggtgctgctggctgggaaacccgagccgccctcttggctgtctttgttttttccctggctgccctgtgatgctgcccttccttctttccttccttccttcctgaagccagggggcaagagaggccaccccatcccttttgggtttccagggagccagctggtccaagcctcaagttctttgctgctgacatagccctttccatttctaacaaggcacaaggcatcagaaggtggtttttaggaaagagctgttagggaaaggttggctgggattgcacctccctttcttctccccttcattgattttgctaatgcagcaggagtcccgaaggaaggcagcagcctgcaaggggaccacgttgcccatttgtcctgcgcacaggaggcccggctgctgcgacgcacaaccttgacatcccgcctcatctcctgacccgggaggtggggtctcttatgaagatgccttgtcgctttttgctttttctctttcttctttctgtaaaagccaagcaatacattcaacctggtgaaggaaaggataaaagggaaacctcttcttaattggcttaaggccattgcacacattaccaggtgcactcaaactgcaatttactttttaattaaaattctttttacctgcaggaaagctgaacattgggccagtgttctcttacttgaaaagggtgttttggggaccagttaaaaggagaaagtgtggggattatttggcttattgagtttttttttttttttttttggttctttttatgtttttcggctccttctcatgactggctgtcttttgctagccagtgacctgcaggagcgtcagccccagatccttgtacaaacctgatggctgctggggttctcctgactcacctcctccctgcccttatgccatgggacattgtcagccttcgtgggagttcagcaccttctgggacatgtgtcacagtctcctctgtgtctggctgaggctcrtgtgcctgtgggccatgttttgccccaggtcaatgctggcaagaaaaccattccctctcgcagttctggatgagacattcagagcactttcattttagggaagatttgaagggtcctggggacagtcacattttggagctgaggctggctttctccttctcctawcaaattgcttcttgcccttttcctgccaaatgcccctgccgatctgtattsctccctctcattatatgaaacagtttcttcttcctggaagccttggccacaccaataaccacccacgccctgtcttcttaattctatttaatcacttcccaaaccaatratcttcctaatgaagatgctctctccctcaaagtgccagccgggagcttgtctgcctcctcttgacaagaagatgagagcttccctctttcctagggcmtggtcccgaatcctccagcccttctgaatcgatttggggtgttgagcctaggattctatgcttcttcaaaagctccagcccagcttctctgggctttacttaggcccccttgtttaggggtgagagaatggatgcaggccctcaccagtgacattctctctaacaaaacggaaattggaggggtggggtttttgcactatgcagtgtgtgagtggcttcctttctggcacacagtggtgactcagctgctgatatactaggcagttttcagagagtggacggagaaggttcagagctgacctgcccaggagcagggctggacagcagggctgctccagctggtgccaggttccattctggggcctggggcaattcagtggctcccacagtggtcgtctcygctcatctgctgagtccaccagggtctggtgggtgtgaagttgaaagatgatgacaataatcagaataatggctaccattactgagcccctggaatgggccaggtacttgctgaatgcagcacatacgttatttcatttcatccgcactgcagatgtgtgaggtaagtatcatcatccccctttcacagatgaggaaactgaactcagggcacacagccagccagtgctgcagataggtgaacttgcatcgaggtgacagtctgacagtctcaaaggcaggaaaaagagttagacaactgctgaagtctgagttttggcctccatcttgtcctgaacagtcgtgaaggcctgccttcagccagccaccccatctgctctgtctctgtggcactaagggtgtgcgttcacaccatgaaactggccctcaggccatggccaaaggagagaaatttgttctgtgcaagggcaaaaacaaaaaagtgattgtttagagttcagtttataaaagcacattctcatgtcagataatgtgggccccacacgcagaccccgatctcattagtgccatgcactaacccggctaagggaacaggcccagcccctagcccaagcttcagagttgggtgggtctagggtcgagtcctagcttcatttccttccagctgtgtggcctcaatttcctaatctgtggaaygggataatcatctttcctcctatggtcattatgaaagttacacaaaagttgcacattcagagtgcctgggatgacctagagtacatgcctgcatgttgtaggtgaacatttcaacaaatgttaatacctccttacccctgctccaaccccactgtcctctcttatatctgcacctggttaaacccacatcttgtggctgatctctttggggcaattactatagctggaatgatatgatactctgtcatttagatgtttcttttaatcagcctaaacccaggctgtgaaaccaagatggctctgcctggagccacagcctggtgagcagcgatgagggtctgaccaaggtcctgccctggagtcagtgcttgggaacctggtcaggtgcagttggtgcaggagcaggactctggctagagaagggcagcctgggctcccttatgccctagggatttcacacatgccaggctgcttctgccttctggaaacaaatgtacaataggtagcccagtggttcagtggaagtgcctgaaaccctggctctgtctctttctatgtgaccttgagtttgttgctgcacctctctgaaccagtttcttctgcgaaattggggatcaggtcacctcccctccccagcagtgagattgtgactattgtaagtcttccatatatatggttattattttcaatatttaaagcagatgtcgcatttcgtcctcaaaggagtggccatgatgataatttgttttgtctagaatggttgatgacttatcagtgaggtcctcacttagctgagtggctcccctccttcctcccttcttttcctcttctctcctttctcctccctttcatcttttcacagcatttgctgtttttcagacacactgtgctgggttctggggaggatgtgaggaaggggagcagcttacatcctcatggaactcatggcctcatataacagaaaacagagagcaggagttccaaggcatgagaactcaattcaacgtttgcccgaaaggaattttgaagtcatcttatccaaatgaagagactgaggtttcaaagggaggagggcctgggcccagaacctgcaggctcacatccagcctccttgcctaccctccttcacaggcttcctttgtaggctctctcctcctgagaggtcagagggtgggccttgccttggatgatcaggaaaagctttagtgggcctacagctgtttagtttgggaagagaaagatgtaggggttaggaagggggtgccaggaggaagtaataacttgatcaaagatgtggcagcctcaaagcagaggctgaaccagggatggcaggctctggagtgggacaaaggtgccttggtcctcctcccagccccacaccccacccacagagactgtgaccgttcagtggcttacagatgcaatggactggcttccactgccccataccctgccaggaattagttgtgttcatggtaatgagcttggaccctggaagctctagactggcttaaataaacctctcttaaatgttggatttatgatgcattttgcataatagtagcagtactcagccaggcacatgctagatagatgaacccaaatacttaaagaaacctggtccaagaacaccaatgaaaaatacctcttgataaatcatgactattaatttgcatgctttgggtctgagaggctggagcaaacaattctttagcctccggggagtgttgagcagcaaacctttatgaacgctcagagtaatttatactaatgcttctgctctgtccttgctttcctaatacgactcctttgctgggaagagatattaaattggctccatctgttttgtgtggatctcttagctgtcctgcagaagggattccccttgacatcagctcctgcctgcacccagagtgtcttttgcttccttttagccatctggtaggtgctggtagatggactttcatgataggagacaggcctcaaacctaaataaacctcatgtgacgtcatgatggccatgatgctgtggattcctttaagtggatgaaagcccaagctagaagccaggtgtgatgcttcttcctggaagataggacatcatgtggcatagccagaatttggatgtagttaagaattgagggaggttcttatgttttgatatcaaaatcagacctttaagtccagaccagggagayggttcacccatggtacctatccagccctcaggttctctactcccccagtctagggagcagatttgaccagatttctggtctgagcagggctgggattcatttgtagccttcagaagccatctactttctccagtgccatctataaagtgtagttccagttttttgggtctgacctagtgtgcarttgtcctataggcaacctcagggaatggtaacctctctatcactcatgtactgatagaacttcttatraggcagtatgtacccttcctctcccatggggcatggggagccacatacctacaataattgacttgcctrgattgtcctctgattgttgaaagatgctacagtgtcatgtggaaagctcaggctcaggggcctagatttgaatgtcagctctttctcagagtagttaggtgaccttgggcagccatcctaatttctctgaactctgccttctataatgagatgttgatagaatgaatgacccctcaaaatgcaccaaatgaagatggtgcacagaaagccccagcacagtgctcagcaccccgccttctgcagtgggaaggatcrccrtccagcctcgggaagtcaccgtcgacgctcatgcatgggcatcttccaagtgggtttattgagaccrtgatgaggatacaatataggagataggatatccccttccatctcatgaagcttttggctggagagaaattctttctctcctcggagatcctgctgttttctaaagattggttcatagcagcttcttgttctccaccagcctcttgctgatccagctggcacctcttcctgggtggatcaaggctcctgctatcctttcccctttgctgggcatcaggttctgcatctgtaaaataaggaaaataagacctagtctggcatggttgctgtaaaattttaatatcgtttgtgagcaagttcctggcaccaagtaagtgctcagttaattgtggcttttctccttggcttggctgatacttaggtgggcacatgtaccttagtgtaagagaaggagcaggcagaaatcccttttatttcagtctrcccagccttcccacaggcactgtgatgctgcggccccacccggggacagagagctccatcttcagtattgaaagctgtgtgtagggaatctctgggacatccatgtcaagtatgagtcaaggccgcccaccataatgaacatgaacatgctctctggaggggcgctgtagttcagaaaggcagggttttggaaccagwtcaatgtgaattcagacccagtgtccactccttgctggccctgggttactttcattagtatctctgagacccaggtttctcatctgtaaaatgggctaagataacgtcctccttcatgggactactgtgaggactaagagaagtgaccacttgaaagagttttgcacagagtaggtgctcagtaaatggtagcaccctctcctctttgtcaaatgtacaaatttaaggggccattgttttaagacttctcaatatttttggtctccagccttggcaattcaaaatggcaactcatgccccagttggagttgttactgccattgtgtttttcttctttcctgtgagcagaagctggcgcctgcttctgcatcctaatagttggcaggaaggcgagggttgcgagggccatctgttccttgtcttcctcagaagggcaccgggcagccatgttgaatgttcaggggtcctcctgcaccattgctctgtgtagaacttcacatcccaatgctgtcagagagggacatagcaggaaagctgaatctaagacagcttctcacacagacacagcactggccaggagcgactgtagcggagccagggccctgactcatgcccaagttcacatcccaagctgggtgtctttggattagctgcctaaactctgtctcggttatttacctttaaaacagaaatarcaacagtaacacactcatacaattttcatgaagactaagttattcaggcaaagtgcttcatctggtgctgacagttgataaatgttaattcttgttattattttactcataccacctcccttgatccctgaaagccacccaaggagcaagcaggccgtgtatttgtgtacccctcttctagataaagaaactgaggccgagtggttacgtggtcaaggatcccacagaaaggagtggctaggcctggatcccggcaagacactacatgccaacagcatccacaccactactcgatgatgcccacgccctgcggcacaggcctgcttgcacagggagagctggagaaccaggaaaatacagagtcctgtgccacacctcagatctgctgaatcatgctcttcagtgggggagcctggaaatctgtatttgtaaagtgcttcccagggaattcctatgcccagttagtgtggggtctgtggtctacactgctgggcatacagctcactgtgtttccccagggcagagggacaggaaagggactctggaatgaataaacaccttcacagtctgtagccaggcagatactgtcgtcagtaagttttagagaagcttgtggaaatgcagacatagggtcactttaacacacaccaatttttttttccaggtcattggatatctttctagataaaataacctcattacgtgttatgggatttgtggagaaagtctatttaaatgggattgatacatcctttgtcaaaatattcttgtcaattagcctggacatggctaattgacaagaggtggccaaagccagctcagcccattgcaagggctcctggacatgcggttgatctgcacagtgggcctccctgcccaggaagaggcatgtcccaccagaaagctggtgttcactgggaactctgactttgatctgacctagtcattagaggactagagccttggggggcttctggaagcacaggcacccggactcagagagcagagctaattttgaagagttagatttatcaccaaataacctcatttcccagcctgctgagacacctgttgcagactcattggttttctgtttccaccacacaaagtcaggggttgattctccaaagacatgcccttgggaccttttccttttgtgtctgaaggtagctatacacacagcccaarggtcaggctgcctggattgaaatcctggtcctgacactgactagccaggagctgttggataaactgctaagttaatcttaagccttgatttttttcatctgtraaatggaaagaataagactgacctcattaggttgctgtgagggttaaatgaaggcaagaaaggaagcaggcaacaaattaggaggttcttagggtggcccatggtgactcagtttagcatgttgaatcacacacagtgtgctcaacccaggaaaacttggggcccatgaaaaacactcagtggatgttaactgttactaatacctcatgtctttaatatagcatgggtttaactggttggtaagagggaagatgtggrgataatttggagagtaactctttacaggcaagtaaattacctgttcattccattgttcaacagtgtgctgagccctgaatgtgccagggactctgctcgtgctggggatgcaatggagacctgagatcattgccttttcacaacacttgggctgaagcctgatattaaatgggtcagtacacattgcaagaagtgcrgtcaaggcaaaaaatggagcgtgtgagagaaacaaggtgtaagtagggaaataaatccttcctgagctggggtggccagggggagctttgagactgtgatctgaaagraagaagagctggtttggtgaattgtggaaaaaagctttctaggcagagggcagggtcccccaggaggaaaagaaagtatgttatggtgtgttcaagaaacctagggaggccagttaagggcagggcaggggccggacggccggatgaggcttgggtcgtgcgcagaggctagatcatgtgagggctggtgggctagctgtaaggagagggaagcagatatgcacagtgcaagcccagccagggcgtctaagaagggaggagacacaggtctgcagtgctatcaggttgttctggccacggcatggagaacagagcgggtggagggcaagaaaggaagcaggcgacaaattggraggctcttggggtggcccatggtgactcactttagcacgttgaatcccacacggtgtgctcagcccagtgctaagctctccagggcaaaccatggttccygagatggagttctcttttccagccagtccggggctccgccttctggacactcccagcctggctgagctccctcacgtctctgcttgcagaggaaacaggctctttctgtgtgttttcccagccaggaaaagtccaagccacactccctcacttcctgagtggcctgctctgcttctgtccctctttataaatgtccccgaaccaaagttcytctctttcctgagcttttcctgtctccatggactggcctctctctctgtttcagttccctttctcctatggctaccccaaagacctcatgccctgttttgtgatctccatgtctcatctcttcactgcttgcctacttaccagcaacttggacgtaggtcatagtcaaccctagtcctgctctggggtcccatggttagtgctgggtggaagaatggatggattcctgtcacattgggtattgttcagccatttcaggaaggacagtttgcccaggcagatgggacatagcccttggtttagtgaatttggccttgttctcctatgatagaatatgggtccactcaaacgaggctttgggaaaccaaaagctcccagccccttgggcagaggttccatggtctgcaagccctctgagatcagaatttcttagaagaattcccagaggatgtgagaaacatgagatggtttccaggacatgttggctgtatttagtgatctaaaagtgtgaatctcactccaaagaacctttttccagcttggggtattggggtgggggcaagtggtggtcttacccagatactcaaggcagaagataaaccgcaagtagaaagctaaaacwttgagctcacttccttgatggtgtctctgaactgcttttttttttttttttcccttcagccttccaaartctaataatcaccttrgagaaatagaggaagctgktttataactcttggttgagttgttgtgaatctaccttgttacattcttgcttgtcagtcattcactactgggtgccctctgggtgttagtaaatcctkgactacaatggcaaggaagtgggtggccacagaatatacaagaagtcaggcatcagggaggatcagcatgtgtcagatctggaaaggccctcagagatcacctgatcagtgattttgaaatgcatttagctatgggattcttggctaagcaacatcttacctagaaaccgaatttgtacagtagatcaaaacagagcccatctggcagaagcaggggatgaggttatattggccacrggcttcttctcatctcagctatcggctaagacatctccaaggaaaccaatgctgggtttgaaaaccactgatcagtttagacagagggaatgacttgtactaggtcacccaggccmttagagactccgtggttttaagggggtcacatggcccagtgacttagcctgaatccaaatccagaactccagactcctagtccagtgccctctcctgtacatcttgctctctatcttagacagtgagtctccattggctcttggtgtggagcctccccaggagaggaaaagggggtgatttttactctgagatctccagtggcrttgctgaaacattaaacctacctttttccccccttaaccagagtcactggcaggatgagtcatgaactaagggtgttgccgggaagattcacttcttaaggagcctagggtataaatggatggaaaatgagttatggtgaaattggaactaggcctgggctttgttaggtgggtgataggagccayaggacataggtgcaaagagctggccaactccccagagctacctgctactcctgtattgaagggtaattagtcagttgtcgcgaagtctggctgcataacaaacaacctcaactctcagtggcttacaaagcaacagtttctttcttccttatgtcacctgggctgtgcgttggctgtggttctgctccayatactttctcgttttgtgatctgcctgttttattgtggttgagaacagcaagaggctgagccaaattgtatagtcacatttacaacttctgttcagacctggcatccttcatgtctgctcacactctgttggccaaaatcagtcacgtggcaatgcctggcagtggggccaggcctttgtgagtcacaaggcaagggagatgggttatatagttctcttaaagacagggtgagggtggtaactgttaaygaatgcattgtaccagaatgggtgttttggggtgattggtggaagatatataggatgtttatctccctaggtatataggatgtttatctccctaggacatagtctttggagacagaaagactttttaagaattctggatcctaagtcttggagacattgagaaagtcagatccttgattcccaaacaatgccatgtatcccttgtgggtaacttctgtttgcatttttctcctccataagaggatatgcacctgagctggcttgcagaggcagtgatgggcatctcctggtggggctggctgggtttggggcccagaggggcccaagaagcaccgctgacgaacaatgctttaagactatgcttttcagggaagcaggagggtaggagagctggaatggtcattcctactaccctcccctcaccacttgccagaaattgtatgttttgtacattatggtattactttgacagatgaaaaatcaaaactgaatctccttaagataccgagcctccaaatgcctccaccttcccagtggaaatcaatggatgccttctttaatggaggtgttagtatttttgatggtattgatttctaataagtcaagaatcaggaaatcccactctatgggatcattagagatttggatctaggttactaggaaaagtgttgctgccaacctttgtcagcagctcctggctcagcagaaaccttcacataaatcacctataggcttccaggtggcctttgatcagacaaatgccacttaaggacttgcttttgctcctggctgctcttgagtctacctcctgcaggaaattccatactggctggctgcttgttcttccatagcttctgaggcccgaatgtcaaaaggaagctgtcctccaggctgttgggtaaggagagcaggaattcaggcaaaaagaggcctaagcaggatccaggaagctgcactcattttcccattcaaatgaccttctctggtagtgcacaactaatcacggaaggtggaacacgtaatcaaaatgtactcacatccactctgcagaaaaacaagccggtgctaggtcacttcagaggggtctgaagratggaaggggttcaaagtggtctgttcatcaggaccttttgttcctctgaattttctcaaatttctattttttccaaactttttatttcaaaagatttcaagtttacaaaaaagttgcaagaataatgcaaggaacatctgtatatccttcacctagactcaccattgttaacattttgccatatttctcttatctytctttctatatatacttgttatctccctgaaccatttgagaattagttacagccattaagccctctaagcacttctgcagatcgaagacacctctcaagaaagacatctcccaagagcagagatattctcctgcagaaccacaatgtatttatcacactcaggggaattaatgtcaatacaatagtgttacttacaatcctcagtcagagttgcctgctggtcccaaggatgttcttcatagtgaggcttggctacttgggccaaatcctgctcactgcttgttttcataaataaagttttattggagcacagtcccactcattgatttacatattgtctctggttgcttctgcactacagctgcagagttgaatatttgggagaaaggctgtatattcctcaaagtctaaaatattttactatttgactctttaagaaaaagtttcccaacctgtgcattaacgtttgygtaatccagtatctaatcaaggctcatgctttgcatatgtttttaatttaaaaaaatatatgtgatccctaacttatgaacattctttacatacaaatgacaacaggtttcctatgttctgcatgctccatccatatctctcatcaattccctgtaaggtcccagctctatggaactacctagtgacatgagtatttaggtgccatatccttgttctttgttcctgcggtttcctttgctcaaaacacttctctacactgtcttaaagatttagtgcaagcaccatctcttggaaacctccaaaacctttttaacttcctgttctcaagacccctttacccaccatctggttgtctaagctcccaagaccgactggattttctgatgttgtagcactgaccacacaagtgcattgatctattttctgttagtctcacccactagtttgtggakgccttgagggcagggtccatgttttattcatctgtgtctccttggtgcctaatataaggtcctaaaatgctcagccattgtttactgaatgaatgaatggattcctccatggtgcaggggctcctctcctattcttaggaccatcttgtggaatttccagcctcctttttcttctgctccttcctttcccagtgcttgcatttggggcacttaccctcatgcttagaggccttagatcaatctaatgcaggaaccaaaatgagagatggaagaaagcagggtggactactgaagccacaggcataccagaacccttcccaccactgctcctctgccaccgccagtcctgttccagcccttcaccactcttttccagactgtggtaatcatttggtgattgcttagagttggggatcccagccacccctatgtggcaggtagcattagcaggcgacagaaggagcactgagtgtgctgagcatcatctcacttgacccttatagacctctgggaacagggcactgtccccatgctccagatgaggcagtggaggcaaacagtgatggtcttatggttaggaagtgtcagaaccagtgtacatactgggagctggtggttccacagcccctttccagtcacttgcagtgttcactaatttcccytgggagcagtggtgtatccctggcaccccgagtttaacctgtgaaggaatatattatcttctgcagtgctggagtttggggttagggtctagatcagggctgtccaatagagcaagcattctgtggggagggagatgttctagacctattctgttcactatggtatcgagcagacacaggccacttatgaacacttgaaatgtagctagtttgacttatttaattgtaattaacatatttaatttaaatagccatgtgtggctagtgcctaccaacagcacaacctagagtaaaggttgaccagggatagtctaggcaaatgtgctgtgtgggttgactggctggatacttcttgggttagcagggttttcatagataagttggtattaaattccaaccaacatcattagctaccaatttgttctggaattgggggctgcctgcattgccaccgtgctgatgagctctgacagttttcaggtttgcctttgaggcaaatgactctttcagccctcaaataaggcagataaaatgcatagggccgtggggaagaaaagaagggaggcatggatgagaagacccaggggggtctcatgtgatggagctattttatgtgcattctagttctgctcttctgagtgagcacttgcctggaatccttccggggatttgggttctcagctggagttgccagcagaatgtagactcccagggatgtatgtgcctgtcattctaggacctgaaggggaggcttgacagagagtcaggtgcatatctcttaagatgagccttcaggtgaaggcagtatagcacagtggttatggacccgggacttgcagtcacacgttctagcgtggaagcttataaactctctggccttgggaaagttgttctacctctctatgctcaagttccttcaactgtaaaatggggttaagatcagtacgtaactcactgggctcttgtaagagttaaacaagctgacattcatttagcatggtgcctcactagtaatcagcatctagttgatcgttgctggtttttagggcgttggagcaagccatcatgtcagatcagcatagctctttatatccttctctctgcattttttcctctatcaacagtttcttgctttcagaactcaaaatgctttggggagctttgcaaaaatttgctcccaaatcctgggaaaggatatctgttttctcatctcgtctccctctctctggatatttatagttctggatagaaaagagctgctttgatttctcagaatagtttccacaaaagtgtggtgctagggaggcagggctgggaggagagagtgttagacttggcgttgggaagcctgggtttgaatcccacttgccggctgtggggcccccaccagcaaccacaagctagccttaggctttgagccttagtttcctcacttgtgacatgaggatggnnnnnnnnnnnnnnnnnnnnnnnnnnnnnnnnnnnnnnnnnnnnnnnnnnnnnnnnnnnnnnnnnnnnnnnnnnnnnnnnnnnnnnnnnnnnnnnnnnnnnnnnnnnnnnnnnnnnnnnnnnnnnnnnnnnnnnnnnnnnnnnnnnnnnnagactccccagctggaaggcatccagaagccaccttcaagagtaatgcagttaaaggcagcagaccctgtctgtccagatctcgggctgttcctctaccaacaagccttacttagatgactggagcaaagcttccggaaagaaaagactgcagatggagctgaaattgccctatgagaacaaagccaggaagagccaagtctcttgatccggggaggtgcaaggtgaacagccacattatggcttggggaggacacatttggactgcgccaggcagctgggcccactgcaagcagctgctcctccactgtttgagggcactctgtgrggtgtggtggggggtcacctcctgggctggaggagtcttgtttgcagggtgggggtggaagtatatagggaagccatgaagcacaaaacgtcaggaccaagttggcaaattgtagaaggcacggagagaaagagcacatgttggaagcatgtagttcctgggagtctcttccgatctgtgaacttgagggctgtgggggtgctgaatgaagcctgaggcagggtgatgggaagggaaagcccaggcctcgagctaggcagaccccagttcaagtcttttttgccactttcctccacgtgacctgggttaaatagcctctctcagccttsagttagcatcattaaaatggggattgaaggcagagcactttgtgtttggaggaacttaatgcgtggttgagcctttctccctacggaatttcataatatgtaatactttgtttgctcctctgctgacttgctttgctatttgcagacgtccatgtggggccttgaaattgtgctgtgccatggggttgctggggtaggaggcaggtttgatggtgatggtggtgggtgttgctaggacaactcctgaagccccagttctgtgtacttgaaggtccagggtctaggggagtattatgggttgaatcatgtctcccctaaaacaatattttggagtcctcacccctaatacctcagaatgtaaccttatttggagatagaaactttatagaacaaatcaagtgaaaatgaggtcattggggtgggccccaatccaatatgacgggtgtgcacatctaaaggggaaacatggacacgcagacagacacacactaggggcatatgaagtgaagagacacaagaagacagccagccagaagccaaagagagagcctggaacagatccttcctcacagcccacagaaggaaccaatcttgctggcaccttgattgcggacgtctagctcccagaactgtgagagaatgaatatctgttgttgaaggcacccagtctgtgctacttagttaggacagcactagcaaactaatgcagggagcaatcccacacctttagtaaagagaaagggttaggagtgtggtttatggagtgctcggaaggcctggctagagccctgccctgcattcactcgctgtgtgacagtgggcaggtcccttcacccctgtgagccactgctacttggtcagggtgcagaggtaataatacctgtcctcctgtggatctgtggtgaggtgaaatgggagggtgtgtggtggtcattactattaattcccctgcccggttctcgtctttgctttccaagtaggcagcctgccccttgttggctctgcccaatgggccactccctgcctcactgcttgggaacccaggatttctggaagcaggacctgtttccctgggaaaccacacccatgacacctgcaagactttggggaagatcgctgggcacagttctgcactaaagctggaccagaaagtgtttcctcagctgtatacttttgggatgaattaatgaggtcaacgagcctttccttgacatctgttttttagctgactctgctaggcattttcacatttgctttctcactcaatccttaccacaatcctttgaagcaggcattattatacccattttgcagactgggaaactgagtgtcacaatgcttaagtgacttccccaggtcacctggcttatacatggtaattcagcatttgaatccaaaattatatgatttcacatcccttcctttccctvcagtgcttcatttggagaagtgttggttttctgttctggaatatggatttgcctgggtggcgttgcgagtggaaggtagggaaaggcctcctggatttctattaagagaaggtggctagrctcagagggagtttatttcccttttccctcccctcccttctcagctccctgaaaaaggcgcctcgcagtttctgctgctgctgtttctcatggatttttaataaagatgattaatgaaccaagaattgataagaaaaggcaaatggtatttgggttattcattgttctagtaaaatatagttttcactgcaggtcttaagtgactttttcgttaaaatgccatcaaagaaagaaaaggttaaataaaatgagttttccatgrcagaagtgtgaaccaaggggcctctgcaggacaagaccctggggcagccaagcagtaggctttgccactccccagtggcagagttgtggcaattctgccaaacaacacctttctcccagaaagagggctagaagagcgattcctcaaaaagggtctggcaggaatctcagtaattctgctccctggaggcccagtggggtctgagggcccaagaaaatggactgtttcagccctggtaaggcaggcaggcatacagagctacccatgactgctgggctggggtcagtaccctgtgtggtcagctgccctccttatcctgcacaaccacacctgccatgatgcctgtagccagaggggctgtgtctagagctgtgtggggacagcgcccttccagctgaactccttgacagctctgaaggaggcttcttccataggcaggactcagagagcttacactggtctgatgtcaccaaggagatctgcacgttcccagccttacagacattgggcaccaatgggtgaattgccttccacattaaggatatttttgtctttctgaatctgctttgagcaagtgtctctattgtgatttgaagagatcttgtcacaactactctgtttcattccatcacctcccatctcatcccaccccatcctatcatatcctgttctattgaatcccaacctatcccatcatatctcattttattccatcccatcccatcatatctcattctattccatcccatcccttcatattccattctattctatctcacccatcccatcatgtctcattctattccatcccatcccatcctatcccatcctatcccattttattctgtcctatcccatcccatcccatcatatcccattctattctatcccatcctatcccatccctctccatgccttaaacactcatgagattgtagatggtgtcaggtcctcttctaagcactggggaaacagagatgaccaagactcagccctgctattagaaagctccctgtctaacaagagaaagaagcagacagttggggtgtgatggaaacagtagatggagagactaggcacccttctcccctttcccccaagctcactcccacatatttacctggggaagagaggtggctagaggagaatgtgacagtggagggggtggtcggaagaggcttcttggaggtgactattggattgaattttcaaagagtggatagtagtttgccaggcaaacagcaaatctccatactggcacttaaatacagcttgataggtgctgggccacattcctagaatttcacgtatattaactaatctacttccctcttaacagcctgtgaaggaggtgctgttatttattacctccattttccaaatgaggaagcagaggcatggtgaaacaccgtttctgaagtggttgagttggggctggagctctggcaggctatggtgctcactcctgtgctgtgcagcctctctggcaaggtggggagaaactctrgactagaggtgagaagtggtgctgcccttgagcatcaggacagtaagtggggactccagtaaccactcctcctggagtgcagatattattttctctataaacaaagtcccttgagctaagctcttactctctgagacccaagatgaagaggcaggaagggttgccacyttcccccacctgcaaagtgctttcctggccagggaagctgtggaaatccagcagtgcgtcagaagaggggagctttatcccagccctctggctgcaggggctcccagccaggaaactctgagcctgggctggactttccatccctgatgcttctaaagaagggtggaaatgctgcctgactccaagcatgaagcagggctattcctgtgcagcttgcctcaggccttgggcacacccaggctccacctgcagggacaagcgctgtgccctccgcagagcccagcctcaccctgcctgataccttgcrcaaatgtgaagcacacacactaaggcatttgcaagcattcagcagtaggactttagccatttttttcctcacttgtctttttctagagaaaatcaaggatcccattgcatctattacaaggtattgccttttctctattgcaagacctgtcattgatttaatcatcatttttcagagggggagaaaaaaaccctaccacattaagagtacaccttgatcataagattcaccatcaatcaccatttcaaaaacattacaatgtaaaaaagaaatggggatctgagaatccaggggcgatggtattttctaaacatcttgtggcagaaggaggatatgtgtgtggggagcttatccaggaaggttggccctgactgacactggtgaaggcaggtggcagagatgcgtgcccatccacccctgcctcactgccttcagtttccatcatacagttccactttggggacatttctaatacctcaaaaacactcgcagctgaattcgttcttcagttgagtttgacaaataatcagcttctgcttcaagctggggaaatgtcaactcagtggatgtacacggaccagctgtgatcaccaggtatgttggagcatcctcttggtggctagatggtaatgagtgccagccatgtggcatgagagtaccttgctcagagtcaaaggaactgggctgtaatcccagcaacctcagatgccattgctttgcttctctgggtccccaattccccttccatatagtagggatgcaaactgatagccacagaagctgacagttaccgagtgctcagcgtgtgccacacagcgttctgtgtgtctttaaagtacaactcatctgatcctcacaacaaccctaggagggagatatttttatccctatttttcagatgaggaaactgaggcacagtgttgggtccagagctgtgtggggacagggcccttccagctgagttccctgacagctctgaaggaggcttcttccataggcaggacccagagaaattaggtaatttaagacattgagtaatttccccaaggtcacacagccaataagtggctgagacaaaagttgaatccaagctctctaattgtagggtttatgcttttaaaaatgcgggtactaccttagagcaataattattgcatataaaaaacccaccataaccatttaaaaatgaatataacataaaactccaatactgaaacattaaatggcaatcttcctgttaaacaggaatgagactcagagactcttctacctgcaaggatctggaggcacctctgtgacaccctggagttccttaaaacagcataaagacagctagactgagaaacctcatagggccatccagtgtccagtgtcccgtgtcctgagactgtctaggaaagacccaaggcctggcatgggagcctcactgagacccatgggcctcctgggcagactaatgttatggcacctcttctatctaatattcttgagatatttgttcaacattttcaacatttatttgttgaagatagaaaaatggattttctagtaataggatctgtacacctttaaaaaatgttctataggctatcatatgcactgagcataacatttgaacttgtttgggattgtagtttactgcacatttttctattgctcataattggatagcattagccactcctgttagctaaagataatggtagtgtacattgacatatcrtgaaatgtttgttccctgcaratagcgctgtatcctgctttcctgttttcagaattttagccagcagctggcatcatgcaagtttggtttgcagttgcatggtctgtagctgcatggcacaacttcatttgcaacgcaaaaatactcaacagaggtaggaaactggagccagtgagaagttagatttttgtatttagttctacttttactcaagggcactatcttgcacagaagtgagacgaactcactttttgtgagttttatctattgcataattgcccctggaaacctgagttaccggtgccatgttggcgacttaccccagtgacatttttgcaatccctagacgtggcacttcacgctactgtcacggctgcccggtatagggcaaagggtgtgttctatacaattctaggggtagactacaatgtgaatggtaccccatagagttttccaagctgcacagtcctgatggctgactccttaatcaagcgatagagtttgaccttcgctccttatgtttatcccaacttcacgtagtgggaacsctgagcccatttctgcttccacctcatggagtatatttgggcaactaatgcctcccttttctgggtcttagtttcctccatgaaacctgaattgtttatacaaggtcccaccagttccatgcgattgttttgcttcatccatgacctggcactgatggtctgttgatttctggtgttgacttaagtctgatctcggttagaggactcagaggaaataagggaaagcaaaccagatcaacgttcagatgatcctgctctgcattctcgtgagaccccagcctctttcctgatatgtgctggaggtctttggagaagattccatgtctttgagacagagtccacttggtctggtagagatgcatccccagccaggctattccacctggtcatgggcttacctgaggaggcccctgatctgaggaggttctggctgagggaggtgcacccttgcaggaaggcttgaccattacttgcttccctggtaatgctgttaaggaaatgaggaaagtctggcaggacgtgtctttagtgggtgtttcaatttcctagggttctgtaataaagtgggtggcttaaaacaacaggaatttattctctcatagttctggagattagaagtctaaagccagggcattcaaagccaggttaaagtcagtagccagggcccaggagagctttgtcacaggagactcacgccagacctgtgttttaagctgcacgcctgctggcacgtggccactcctgggctgatgctgtcgcagtctgagctcctaagcactggagcgtggattaagctggggttggggaagatgagaagcctgtttctggcaaacgtttacactgtgtcaggaaaatgctctctagctagatctcctgaaaacagagaaccctgmagcctgttggctgtcagagaggggctgggtccttggcagcttggctggcatgaatggtggggtggggataggcacccccgccctgagcagcccwtcagggatcctgagcaggactcatcattcagagtccttagttcaagtcccgatgactccgaatttcttagcctctttaagtgtcaatttccacaactgtagaatggcagaaatgatagacactttattgggttgttggtaagatttagtgagaccacaatctcaaagtgcaaggaagktgcctgcaagagtaggttcagagattctgtgtttccttcccaggaggctgcgcaggaccagccctgttgttccactctgcctgtctgctccctccrggaccctcacccctgctcagagaccctgggctcagacagacactgtcagaaacaggccctgcagtcctggaatctggattctcttgcctctcccctgacactttccataagtagagtgtctaggggagagctggctgtgtgtgagccatgtgagggaatcagccacacttcttccaacatagccggtgagatagcatcagttcccaaaagatgttccatggaacatcagttccattccaggctctggggaatggagttctgtgaacaaatacatttgaaaatctgtatcaggaatgacctaaatacattaatcacactaaaggcttggagacactttatagtaagaaagcctggttaactttcagggtgtcttaaatgaatttcatctcagaagtttagctccccatccctccccctcattttttttttcaagtaacacttgctgacaagcacaggtaatgtctttcatgaaagacatgctgaaagacatgctggagacagattacaggtgtccctgaggctacctgtgcctccccgtcacggtggtcccccacttctctctgtggccccctctccactcagtgataatgcttcttccagagccagtggctcctggaaaagaaggccaggctgtggcaaaggggaacaagcccactgagatgtaaggaagggcattggcaggactaggaggtcacagccatggctccagaaacattgctgtcctcacaggtgcatgggtgcttggtactaactggtctgctgagctgagtcgggaagaagccgccagtcagcggagggwgtggtgaccaccggggaggacgcatcactcaacagaagattgattccccttgcctgtaactggcaaacccttttgtagttacgaagtgctgcgcggtgggccagcagtgcagaaggggagcagtaatcaatgtataattacggaagtatcaggcaggcagagcccgagccgctcgtgtcctctgtggcaaattttccggggctgccttagggatgtgcccatgcattttctaagagttaaatggatttctcagctacactgtggacttgcaatcagggacatggcaggcgaccttggcacccagctgcgggcgacttggctcagcaggaagtgaaacttaaagagaggaccacttggaagggctcccgggggcagctggttagcagtgtctgccatcgggtgggaattgtgggggtgctgggggggagcttggtgcttctyagtcctctccacacttctcctttccataaagggccttcccaggggctttcccatttctccttcagtgagttttgaaggcattttccctcccctgactacccctcctctcccctccatggaggcaggacccagatcttggattccttctggcctgtggaactctgggagaggcaggcagggagggggtgacagaggcctgggtcccgtccatgcyctgggacaagacaggagctgtggaggtgggctttggaggggcagccttgctgcctggcagtgtcttggttccagtcgtggctggccccaggtgcttgactgggaaggcaaagtatacatagatgggtcttctgaaatcctgcagcaggtgggaaggtttactcaggacctcagcgccctggtggcatgggaagataactaatctggaagcaggaagcggtgggataaagaaaggaaaactaggccaaacttcagagtggttctcgaacttgagagtaggtcggagtcacctggagggcttgctttcccacaccccagagtttctgcttcagtgggtatatcatttgggccccagaatgcatatctcacaggttcccaggagacactaattctgttggtcctgggtgaatagcttgaaaactacttgaaaactactgatctagattaaactcacccaagtaagcaaagcccagggctgagacccttgcatgggaagctgtggctcctggcaaactgctgatctcagtctggagtggctcaggaatgtgggtggggtgtcaggggctgggtgtggagcagagacctggagctgaggtgaggctgggacctggttatttaataaaccaggctgttgtctttcttgagaaaggctgacagaaccatgcagaagctagaatgctggatttagcctctggtcaaagacaagtcctttgcataagggtgtggggtctgtgggaatcactctgttcttagcagggtcacagtatatccctgctttgtccacagtatgcccctgctgttgagcccttacaagggctctaggctgaccctgaaatgctttctcatacttaattccaactctgaggctgaggttaagtaacttgcccagggtttcatggccattaggaagctgggctgggatttgaaaactatgctgcccatatgctgtttgcatttactcaatagccarttgtcacaactgttgtcccccaggccccgtgctgggaggtatcaaaccagggcctgccttccagaagctcttggtctttttgagaaggtaaaggctcaaagataactttgatacaacatgatgagtgataatgtggatgtctgaaagaatggggtagggggacagctggaggagtttctagcttttttggggtcctgggctcctttccagattttggccrtggcaggtgaggggtgggtgaccacaattctcacatgcatggctcattgcctggaaaccctgcctcttgttgaagacctgcatttccagagggcctatggctgctttctccttttccttcttttcagtgaatacattatcaattttgtcaggcctctgagcccaagctaagccatcatatcctctatgacctcacgtatatatccagatggcctgaagcaactgaagatccacaaaagaagtgaaaatagccttaactgatgacattccgccattgtgatttgtttctgcccaacccttaactgatcaatgtactttgtaatctcccccacccttaagaaggttctttgtaattctccccaccctggagaatgtactttgtgagatccaccccctgctcgcaraacattgctcctaactccaccgcctatcccaaaacctataagaactaatgataatccaccaccctttgctgactctctttttggactcagcccgcctgcatcctggtgaaataaacagccatgttgcccacacaaagcctgtttggtggtctcttcacatggaagcgtgagacaattttcctttctaaagttcttattgcagcccagaaaatgggcagttacctggtggctctcccagttggctctcatcaactttcccaaagccttcaccctgctttgttctctccatgggagtaagctatcacagccccccagtctgaaattaaggccactgcacccttgatttcaaggaagctcaaagatgccaaagttcttggaaatttctgggctttgggaatctgtttccgctccatgacttcagagatgacctcaagcactagaggttctaatggtggaagggaagtcatggggtttgaagagcgcaggctaaggcagtggtcttaacgccaacttgtccgttttccttcaggggagggtgaagaacaccttgttctatgacagacctctgttgcataagaaaaaaaaaatcaggtttggcccacatataaatgggtagcaactttatttagtttattttcctcagagagaaatgtagagtattgagctgacccacttaaaagaagtttattctttatataaataaagtgaacttgttatagagtatctgaaaaatgtttttggttattttcttctgggctttttttttttttttggtaccgtatagagtttcagttttatatccaaagttggatcacccactgaaatgtgactgcttcagagtgatgttccctctcccccaggaaaggtgaaattcccccattgcacacctcactgtgtgttgctcttcctctccatgctgcttactgcaataacaattaaatctctattaagacaactattggcttattcgtgtaactcccctggaactacaatattcaggatggtagccactagtcacatgtggctgtttacatttaaattaagtgaaattaaagaaaattaacacttagctgctctgttgcactagccacatttcaagagccacatatggctgggtggctaccaccttggacagcgcagatctagaccatttccattgcggaaagttctgttggataatgctgctccagacggtacactcccatggcatgggactcctgtggtccttacctgtctgtgtcaatgagtatcctatgcacttgtaatctgagaatctaggacaacttcggaaatgctttatttataaattacggccagttagagagaaagaggtaggtggtgaggagagaaaagaaaggctttcagaagagccctgtgtgacaatggatgaggatgggggttacacagttctgggcctcacatggcacaaggattggccaagtttccccaactgcagagtgctaaacaatcaatgtgtccagttggaaaactgtgggaatgggactgccttgagatccccttgcatcattttctgagaggtccgaagcatggaagcctttggggaagaggtgttagcaacctgctgatccaggagactagatcccagggtgggctggaagctatcactgtggtctagacactgtaccctgtgtttccacctcgactgggacaactggtgcctgttttctgcaggagctcagagctgagcagtccctgcccctgtgtcttgcctactggatgcattggtttgtaacaccctgtaatgctgcttgattctctgctctctagggctgccatcagagtcctgtcctggaggcacaggctgccttttcaatggcatctgccactgtataatgtgagccttcctcagctccagtaagctccagtggccagagctgggtggctggcagcttggctttttgagaaagcaaatcaaccaggacaggcccttgactttgtttccccagcatgacttcctcccctcctccacccttcttcaggtgtaggctgaataaggaagggagcaagtctacaaggatatttgtgtgggttaggttctcctccagtgtgtcagggcaggggaggtcaatgcttagggtcccagcccagccactagggttgtagctagaacagttcaaagaaggttaccactacttgaaataaaaaccacctgtatgcaatgttggggaggaaatggggataatgggaaagagctgtaggccagaaaagctagccagtggaaatcagactggaaggtcaggccagatagaagggtggagcagcacttaaggaccaaggtggcctgtgccagtgccaacttcttatgaaggactggggccaattattccatttggatggaagaagccccttaaagaggcccaaacatgtgggacagaatggtctcatgagcagtgtttggcactgatatagatgaagattcctagaagtgcagaccaagcctttttaggtcatctgccgtatcagttagaattagatttagcagcagggacagtataatggtggcttaagcaagatagaagtgtatttctctctcaaattcaagaaggctggagttaagcagtctgggactggtctagctcttccaggatcacaggcctgggccctttttagcttgttgctgtcatcctcaacctgagctttctgatttgtggtctgaaacggctgctgcagctccagtcattatgtgtgcattctagccagcaggaaggaggatggagaagcatatatcccttctctttaaggacagttctgagaagttacatataccactttctcttataccctactgtccatactgtagttacataggcacgccaaaatttaagggaagctgggaaatgtagtcttctttctgggaagccatgtgtccagccataatttgagtgttctaactagtagcctctgccacaacagctaatataaagtacattagtatgagtgaaagtgtagatgaagcatctattgttcaccaggaaaacatctattgtgattagcaaagaagatttgtatttgtgttgagttttctgccatcagcatagagatctgttaattgaatttacatgtactgccttggataagaaacttttagcctgcaaaagtggagttggtcaasctgggaaaagtgataaattgtgcatgtgtttatttttgtgtgcctgaggcttactgcattcagaacttgtttagatgggcaaagtcattattgatggagaggagtgaatgattttgtgcagatgggcaggaggctttcagaggccttccctctggcaaatggggagggtctggctcaggaaccccaggaggtccagatgtcagaggacatggaggccatgcagaggttcctgtgagcacagtggcaggggtcagaagctagctgggacaagtaggtctttgtgttggatggagcagttttgtcttagtgcttggtgccttctgaatgggtgttggaaagatgtttccttgtggcttgggatgacagaggctgcctctctcttttttctacctactgcagtctcactagggtgttccatgcagtgcactggaactgaaggcaaggacaagattgattggaaatgtcagcctgtgctcacttttgcagctgagctattcaaacttttggagatgcagattgcagcctgtgctggctttattcatgcaaccattggctgttcacagtgtcacacagtgatatgaaatgatggcaaatttagaaaatctgggaaatgaaaaatggtaaaggtctgtcctggcatcttgcatcatgaggtagggctgttctggaatccccaagccctttccaccaaaggagtttagaattcagagtcagaagatagggcctggagtcctggttcagccatttactctctgagcaacttgggagtttcaggcggagggaatggcacatgcaagggcctgtcagtttgaaggagcatggtacgttccaggaatggtagatagagcatacatatagggcaggctgagaggctggaagggctgccttgaatgccaggctaaggaatttggacttcctaaggaagcatggaatgaattttaggctgggaagggataggatcagatctatgttaatattgctcaccccaattgcagcgtagaggatgggatagaagggaatgtatggattcagggagatggcttagaaccctaagattcatggtagcagggtctcgagcaggggcttgcttgagcaagcaggtscygtggagcaggtttgtcttaactctcgttgtctttctgaatgggtatcaaagaggggcttcctgcagcctggatgaccggggctgccttcctttgtttgtggggagggacgcatgcctggcaacttcatagaggcccaggccatgggyattgccagaggctgagcagaccatgctgaagaaagccaccccgagtgcctggtcccacaggccttattatctgtagctggctttgaatgctstttgcatcattcactgtctaggggccttacctgagcctgaagttgcacaaagtaggtcaggagctcctctgtggctgcctccacccccacccttcactccagccttcaggaaagatctgtctcacccagaactaggagaagctagaggacctgggtcctgcccactggaaggcaaaggaatgcacatgttattaggaccttgttccaacagcagtggctgtcatttgttgtgcacctactatgtgtatgcacaaggctaaatactttctgtacgtttctcatttaatgcctcacagcagctcttcaacataggcattattattttcatccttcatattaatcagtttaaaagtagtagccaagctgcctttgtgtttgaaaatgtctggtcaggctgtctgcctcccagagaggcatcagatgaaaatgacaagagttaaaaaaaaaaaaagaagattccatatccatccacctacccatctatccattcatccatacacatctcccacccacttactcatctgcccacccacacacccaacccacccatccatccatctgaccgaaaattgatctgagtgcctgctctatgccaggtcctcagataatttataagatggaaggatgagaaacctggaagacatcatcaacattcggggtatctactgcagtagataccaaggcctgtttgaggaataggtgtawttgtatggttagaggtcagagtatgtggacagtagataacactaggtaggttggctggatctgggttgggaaaggcttcgaaggcacrgtcaagattttgtgtttatccagtgagcaatgggagccgtgataccttttacagcattgcagtggcagaatttgatttgtagaggactatagagacgggattgtaggttctgagatgataagcgctgggatgtcctcaagtacaggcaagagatgatgtgacagagcctcaggcagcaggttggtgtggttggcacagagagcggaaggcagaaatggagagaataaagaggcagcagtggcaggatctagtgcatggggaggataagacagggagtcccgatggcctcaggtcctggctgggttgacaggggtgtggaggtggagtgggtgtccacgaaggcagatgggatggttgggtctcctccctgtgtaccctatcttccaactatgatgtggctcaagggtagctcaaacaactggctcactttgggcttgtaagccttctcagggataccagggctcagattgtgtcacagacacctgggaaaggaattatagtggcagcttggctgagtggctggggagaagaggggcctaatcctgcttgtttgccaatgttctaaagctgggaacctccccagggtgtctcagctcctggagaagttagctctgttcttttctggtgtgctgtgatgtgctccccaccccacctttttccttgcatgctagttgatgctctgcacagaagtgtttgtcattttgatgcaggccaaatgaccacatcccccctgggatccaggccttcccttgggcactgcatttatgcaggtagctcaggacaatgcagaatttcaaataccatcccccagggagcttcttcagccttcccttctgttccttcccctggcttggctgtcccctgagtgaaggactgacctttacacatgcactccagctgctaaaacctcttttgatgggaaaacgctttttagtggtttttcttggtcctgtggcaactgctgcctgggatggtggaagaccacttgccaacaaggtgatttttttctgaggcatgagtgaggatttcaaggagtgtggcttggatacactgtgcacgcgcttatctgaatgtggcctgcatacctgccacaggtgggcatggttggcatatatatccacatggctgcacatggacacacagcttggaatttcccatcatggggtttggctcctgggggcacaggtgacccagagcccatgggagaaggaagccctctttcctgagtccttgcctgctagcaggatatctgcatttttttcttctgtttaggctaagactggtttcggttgttgctttttccatctcattgttctttacttttatgaaagcgcattcaaagaagcagcatggaatgttggaaaaagcagaagctgtgcaactggtcaagtctgacttggaatcttggcattgaggcctgctattcatgtgaacttgagcaagttactttaactctctgagctcccttttatcatctgtaaaatgggatgacagtcatgctttctacctcatgtggtttggtagttggaaagatagcacagcaatggaatgatctgatactctgtaaatactgctctaattatttgggtgaggttcaggaaggcagggtagtgtagtaattaagagctttgcctcggaaccaggtagagcagggatcctatcccaactgtgccccttacaagtygtgtggtctagtgcaagttacttagcctctctggacttcagtttcctcatctgagcaaagtaatagatttcttccatagcaccagaccagtgtttctgagtgtgaattagagatggggcacttgaaggaaagtgaagattctgtttggagggtgtggccaggtgattttcatagcaggcacacccaagttcaagaattgtgatgcatttakgacaaatacctaatgcatgcgaggcttaaaacctagaggaagggttgatgggtgcagccaaccaccatggcacaggtatacctatgtaacaaacctgcacattctgcacatgtatcctagaacttaaaaataaaaargaattgtgatgcttgactgttcactttttaagagcaggagtcatgtctgtgtgcttcccactgtacyccagtgcacagtatagcttctggcatctaccaagtgctcactgatttttgtttgaataaacaaattatatgacttaatgcacccaaaatgcttagcatagtgactggcacagaactagcacagaaggaacttagcaggtatcagagtgtttcattattaataatagggatggcctgtttctgaatataagtcagcaggacctagcagtcctggcttccagggcacatttgctcccacttgtgtgtactgaaggttgggtcccctcaatgtccattactatgtgcttggtttccactgtggctaccatccagagttaggcctaatttataccctcttgaacaaaggggaccagatctcccacacctatggcatccaggggtcctggctagacccatctgccattggtttcttgcctctagaggggctggcacagcctggggaccttcagtgctgacgaggaagccttgtgcgcactattgcagggccccaaaatccatttttattaagtttgtaggcaattgtgacagaggactggactggctttttattgttcatgtttcttggcttgggcctggagtgaggaagtcacttaggaaaggcctttcctgtgtgaggaagagcaaatattaccagaagccattggagcccagagcgccagaagaagaaatgggagcaataaccacacccacccaccgtggcacattcggggccccagtcacatcacagagccatgggatgtaggagtcagtgatctcagctggcccctcactttgcagttgtaaaagcctaggtcctakggatggatgggattcgcatcaggtcagtgggtggcgaggggaggaacagaggctctgatgtgctgggcactgaagccaggccctttctgccgttccatgcagccctgcccttccccacacccctggcccctggcatgctgtgggaaagactccagcagcacttggtgaatggtgtcctgtgcagaagccaggctcttggtgggtggtggggacggtggggacagggtagcagagaarggacatccccgacctaaaatgggtggcatatccagttccagagtgggtctccatcgaggctcctttgtcctcaccacgtccctgtcactccagctgaggtggcctactaaggattcctgccatgagagaatgaagctaagacagtggacacctaggccacaaattctacttactctcaaggatgcaacaacttgcaatgatcacagatcagcctggctggaattaacaactttccaaaatgaggttctagaaacatccaagacattatagccatttggcaggctctactccctaagtggcagaggtagaaagaccagagaaggcatcggcttcttaataatagtaactaacactgaccaagcactttccatgcaccagatccttcccaaatactttagacacactggtgcatttagtgcctgaaacaaccttgaggaaggtcatatcattcactctttctccacacagtagaaaaggctgcaggggttccatgcaccctgctcctcacccacgaactaatggatccttctcaaccactgaaacttagttactgaccattaaacactttgcccaaaggctgtggctgagtctcagaaagcaaagcaaagcaaagcaaaacaaaacaaaaccttagcaccaaagtgttggaaagtgctatcaaaagcagatcgatcagaaataatgaagaaaggggctcttagactataaaggaactcaaaggcaaactgaaatttgctttacacaaatgtgatacacgcagagaggtgaccaagattacacaactagaaagtagcagagatttgaacccatgctgcctaagtccagaatcaatgttcttgacctctttactctacattctctttttgacacctagttccttcttctttgagcttggcatgactgttttccggaacaaggacatggtaggaattattctttgcatgtgaaaagtgagaagcacgtgatgatttcttcattcattcattgaagaattgcatgtgccagcactgtggcctttgctggaatgggtggtacagggtggagacagatatataaagaaacatgtagacaacatggaagtaggagtgatctggagaggaggtccaggttgctatggtagcatggaggcgtctgtccatggcttgctctatctggtagggagaaaggctgagggaaaggctagatctacaaggaggggagctctgagtgagatgacaggctgttcccacagttttgttttgctttgctttctaagacgcagccacagcctttgggcaaagtctttaatggtcagtaaataagcttaagtgattgagatggacccactagcttgtgggtgaggagcggggtgcgtggaaccctctgcagcctcctcactgggcagtttccctctgcgttcccagcaatccaacatcgtggttggttggctccttcatatttacagcggggtctctggggtcttctgaagggtgggggtgaagctcctcctgggtttggctcgtgtctatagttgccttgcctgtgattctcctgcaggaggttgtggccagcgaggtgtgtcaggacagctctctggaagggtggccaggctgagggaaagcaacctgctcactcttcgggagaggcttctgggcttggcttgtgccctaggctcacgtggaaagttccagaaggagagggtagtctgagcatctttctctgggaggcttggctgaagggaggaatccccaaggctactagcgacgctttggggcaatagaggtgtgggggctgggaagggggccttactagcatgaggcccttgagagggagccttggatatcagatctgaaggcagagatgcatttgtgggtggggctggggtgccagcccaggaaggctttatatgtcagactaatggattaagactggatcctgcaagccttggagagccatggaagaattttaagtagaaagtggcatgacgaggtttgtggtctagaaagatcaccccaactacaggtggaaggtggatgggaggaatgaggctgaaggcagggagactggctgggagaccacttgaagagccagggagaggtactgaaggcggagatcatcatcataacggtggtgatctaggtggagtttgaggaagccctggtgtccagttggctatgggaggggagagaggtggaggagtttggatgattttgggtctaaagtgttcacaaaaacacaggcgattatttgcatggcactgggctgaccctgattcctgagggagggtgaaagaacttgtaggtacagagttgggcagtgagaaacatcagcagccacagtgtcatccccattaatctcagccagtggggaacactatggtctgagaagtggatgtgggacatgcagggaagtgtattgtttgcccctgttttaacaggagcaagggagcatcactttaagtaattctatttctgttttccgaagtatccaccatcaaagaaaagagaatcataacattgcacaaatcttttagcaatttggatgcagtttacagggttaatataggctgggaggattttctaacccattttccttctgacaacccagtgtctgaatagacagcaccaccaccatatctaccttcctgccaattacctgtttctgtctgggtccttgaagacctggtgtctgacacacatttccactgagtctaacgtattgctgtgatcagagagtcatacagggatgaagttgtatcattcagtgcttgttgagggtgcctttttgaagtgcatatctcattagaggtggcaggaaaaatcacaaagcatcacccccaaatcgcagggcaggccaagggaaactcgcagaggcaagatcagggatcagttttcagggtcaaagggtgctctaattactgggagcccctcagtgcagcctcagtattacttatatgattgccgtgattccaaagtttctaatgaaacttggtcatgaaatgaggaacagccgtgtctcctattggcaaggtatcacctgcagctctgccagcccttcagtacacacggtgtgggtatggacaaaacaaacccaaaccacccagggctcttggcatgctcttgtcctagcatcagggatgtaggagtcacaagtttccatggcaacgacgaagaaaaacatttatcctgcaccttccagggcccttcaacaaagttacaaggacgccttctaagcccttgagaagatagcttgctaaggagacagaactgactatctctgttttgaaaatgttgacttggaggtgagaagaggttttagaaccacaaaatatgtttagaataatccagtccaatgccttaagtttttagaaaaagaaaccgaggcccagagagatggtggtgggtggggctggggtgccagcccagaggccaggctgcaagtgccggactggcatcggggtcccctgtgcagctccstctcccctcatttcccattggtactggaaatccaggtgccctttacccctgcaaggcactgtgtctggaaactgtatatcacacttgtgtaaagcaaattccagtttgcctttgagttcctttattgtctgagagcccctttcttctttatttctgatcgatctgcttttgacagcagtttccaacactttggtactaaggttttgttttgttttcctttgctttctaagacgcagccacagccttttttccagtctttgggcaaagtctttcatggccagtaaataaacttaagtgattgagatggacccattagcttgcaggtgagaagcggggtgcatggaaccctccgcagcctcccaagtgggcagtttccctctgtgttcccagcaattcaacatcatgattgtttcgctctttcatgttcacagtggggtctctggggtcttctgaagggcaggggtgaatctcctcctgggtttggctcgtgtctatagttgccttgcctgtggttttcctgcaggaggttgtgggcagcgaggtgttcaggacagctctctggaagggtggccaggccaaaggaaagcgacctgctcactcttcaggagaggcctctgggcttggcttgtgccctaggctcacatagaaagttgcagaaggagagggtggtctgagcatctgtctctgggaggcttggctgaagggaagactgtgggggaggcagtgtggcttcaaggctactagccatgctttggggcagcagaggtgtgggtgctgggaagggcgccttactggcaccgggcccttgagagggagccttggatatcagatctgagggcagagccctgtgccccagatgcgtttgccctcagcactggacctgcacaaagcaggtgcaccattcccatttgttcagcgactgaattaactcattcagcagacattagtgcctgctccctgccaggcactcctctagcccaaagatgtcacagagaacaagatagttaggtccctgctctggatatgcccacatcctgggactgagtgaaaagggaggcccacggcacccagggatctggggggcacctctgttgacaaagcatcttttactgggatctctgaaggtttgggtgggaggccaggcagtgctgtgcagatgggaaccacagccatgaagttaaaggaggcagcagcaggagtaaggagatcagcgggcctgcgatgtgcaggccctggggccaggtgcttcccagatggcgcctcacttaatccttccaaaggcccagtgaggccctgttaaggtccccatttactgactgggaaaccagagctccgggaggcacctctaggaagggaggactcactatcaggtcagcctgtgcttcatccccagataggagctgctgacgaggcccctgagaggagtgccgcgagctccagggctatcgggttgttggtgcaagcagggaaaagttcacactagttgctgaggccacagggtgcttgtggtatgctggtctctcccaccctgcaggcccaggcctctgggagctggagtcagcccagcatgttggctggtgtccacgtctggggacagacaccccgggtggctcagctgaaatgaacatgcggcagaaagagcagccctcctccagctgctccctgccaagtaaaggacaccctggccttagtgagtggccttcccagccccatcatagccctggggatggtggtggcagggcgggctgttcgcaacactgaccttgagctcagaaccagaaaggtcaaggtgtcagattgggtttgaattctgtctctgctgcttgctttttgtgtaatccttagctagtcacccactcttccagcctgaatttcaccctctgcaaaacaaggtcgatgataactccagcacagaggtgtgataagagttaacataaataagattagtaaaacactcagcagtgtctggcatgtagtaagtgctcggtaattggtagttatcattattgttgttattatattatagttgtattagattaaaattggccatggaactgggctgggctgtaactcatcctttattcggaggccaggtcatatttcccaaggatgcacagtgcacagattctcacagcaaatagagccrtcagatttttagggcagagaattccaaacttcgttgtaatccaaatatctgagaagcttgttaaaaattcagggttttgggttatgctcccttttattccttcctgagagattctgatcatgcrtccagggtgaggtcctaaatcaacatttttaataaaatcctgagatggttctgttgtggcaagtccaaggactgggttttgggaaacagtgttttataacctgcttcctccagacccagtcagcttagggatgactttctccatggctgggctatttctgtctaatcactagggcctgtagtcttcagtgaagctcctgttctctgggcagccctggagacacacggacatatcctttcttctcagctccctgtctagacaccatgcagasctacaaaatcttttctccttataaaacatgattgcctgtatcctggtgaccacattttctaaattctccaaagaattatggttaaaggatttttttttccctgacttgtgtattcatcttaaaagccttacaaargtaaagcaatatatttatctttatttgtatattgaacagattcctaggaaatacagagtagggtagcacagtggttaaaaatgcagactgactcacagctccaccccgattaactgtgtgactttaggcaagctgkatgacctctcagtgcctcagttccctcatgtttggaacaggactaacagcagtgcctctcccatagaattattatgaagatcagcagagttgatctggataaagcacttgcaacagtgtctgatccatagtgagcagtatattcatttttatrtaaaacataaaacattctgctcactgtrcrgagtaaaaatgtaactgcgtgagatggcctggacaaatccaggaagaaccagcaccacacatacttcaggaaattaaataagaaacttaggtagtggtgctgcctggctttggccaagccctgttcttttttgccttaacattctgccttgaagcaccactttatgaagctctggtcattgtttttgcaaagcaggaatgcacaaggcataacagtggtgtgcacctaccacatgtgaagctgaacgtcattttgctaaacgcaattagcagagtctgtaagtccttctctttagagactcattctggctgtgatctatgtaagtggcatgcagggaccaggaggtttttttttttttgtctcaattttcatttctaagatacggagttgctaaaggtcttggcgggtttcatcgactacagagctgtagaggaagaagctgatgtcaggaagggagaagttatcagaggccagaatagcagcatctgatcagatcctagtgaggygtaaggaggggaagccctggtttcctccctcttgccttcctctgagggtccagagccaccttgactgtcttgggaggcaggatagaaacctggcttagcactggggctttagagcagacagacctagttgaacagcctggccctggacctaccagttgtgtgatcttggaaacttcgtttgctaaccagtccagtcctattctgtaaaatacagataatgttagtacctatgtcactgagctgttggattgagttcagtgaggaaatgtatacaaagtgcctggagctcaataaatgaaatattttattattagtattgctgagtggtcttttccatgtgtccaatttagcccaaggtcttgataatttcatgtcatttcctgtacaggccccttaaaactatagtcaggaatagctggagagagaacctaggttgaaagatctgcttgcttagactaaaccatgaattactgtgtacgtgtttggatgggaaatgggtggaggacttggacctccgtggatagggaccaccctctacatgggaaaggccctcttgtgatttcacacagcttctctgggggctccagaggcagttacaggaagtgaggaacaggcaggaaagcacgtctagccagcaggccactgtgaggccccagggagcaggacaaacatggcatacaacagtccccagggcagatgcaggaggaaggtgggagcctggcaggaaatgcatttactgggtaggctgcagctgaaagcaccagcactccctggaggaagtcacaggatctaggcaggcgggcaaacctagcagggattggctgtggaagctcggccggctgggtggtcagaaggtctggccaacggcatctgagcccagcctgtgggctggggacagggcagggttctcttccctgggaaggagctggcatgagcttagtagcccttttgtggaaaatggagcccatgagaaccaggagtcagccctaggacatcagaacttggcctccatggacaataagggcagcacagaaaagaataatactggaggttgcatctattactttgctatgtgcttcaaatcacattatttcaaataatcttcacaccaactcaatgcagaaaatgttatcaccatgttactgtgtaaactgaggctcatctaagttaactgacttgccttgtgttgcagagctgctcagtggcagaaccaggggtcaccatgtctgctcattcagtatctcacgcttttacccatggtaccagagtgccctggtctccaactggccgggggccagggtctgcctcaccagcagctgttcacactcattctttttgtattatgtaaaaagcactgcactgtgggctgagagccatgcagatactccacgggactttggaagggatctgatgaagctccttattcaatttcctcaatttaaagacaaggaaatggtggttcagagaggctaacagctttgcctgtggtcactcagcaagacagtagtggagccaggacccgaacaaggtctgctggctccctgccccatggcgtccccactgcattgtgccgttttcctcccgtgctgcaggggacatgagcagactgctgcatgctgcatgtactgctgctgctgcaccaggaacatcaacagaatccagcatttaaaggccaccagcatacctcgcaggacaggtggcaggagaaatttgtgtctgcagttgtatttgtaaacacagcgtggagaatatatcaagaatccagcaagaactgcacaggttctatttgtctgctaattagaatgaagtaagtgccaatggaaaatggattgaggaaaaggtggaagttttcaagtcacatagaatggcaggaggggtggtaatctgacgtcttgggcaaggatagacctgtatctcagtgtgtatgtctgtagctctggctcagctattgctgtctcatctgtctccctggctggctaagcatcttgaggacaagactgtgttatattcacttttgcatcagcagcatccagcacagggtctggcatggagttggcattgagcaaatgtctgttgactgactaattgaaacccattactcaagataagagtgagacaaaatggctggtgagtagctcattctcctttcatattatgcctaccatgggctaatacttcctccttyagagggttctggcagatctcatggtcattgtgtgtctctttgaatatcagcctccctcaggggccatcaggttggcgataggagtcaccattggagtttgttagttctgaccagctgtggtcaaaggcgtgaacctatwacccatggctaagggcctggacaccaaagtctggttgccctagttcaagtcttggcttcatcactttccatgaccttgggcaagccactcgacctctataagcctcagtttcctgatctgtgacgtaggggtgctagcatggggtgtgatgaggctgcgtgagatgatgcatagtgctggcacatagcaacacagctcaatccatgttaggtcttgtactataattcccgaggggctggggtacatgacagacccagccctactccatctgccaggcaggcagtaagcaagtcatggccccatgccacgtcgcctttgtttagaagcacaaaggagagcaggagataatgaggcagagaaacgaggcatctactcggaatggcactgggagaaaataccagatacacagacatgcaccagggcaggccaatgattggataacattttcattctgtttcttttatccataacttagttatttaaagtgcaggaaaaaaagccagaatacactgtttcgtttgtacaaataaggattataaatagctgttgtggagaggaggtaaagtaggaggcagtgtggagagagtggkgtgccatggttagccctgactcagtgccgtaggggcccaggtcctgttgatctggagatggtacatgtgtctgtctctgagcgaacgtcgyctcactcctggtggctccttagggagacgtatgtggataaagagcactgtggcattggaacaggcttggagggcgttagcatcagtaggtatggcaaaaacagtaggatttggaacaaggcagacctgggtacctgggtttggatcctggcttcctcaytgaccagctgtgagactgctggcaagttggctgagctcagcttcttctctgtagcctgcaggtgatgacagatcactaatagggcgccctgaggatgaaacaagctaaagaagctacctcattcctggtagcagttcaacagaacaggagttcattgccagctttggcacaatgggcaggtatctctgaggccagacagctgtaacattttctgggttctggagattacctaagggctggggagtaacatggatgggggtgggcagggcaatgcactggttactatgagggggcaggtgtgcccagaccccactttgagctctgracaggtctcaaactttgagccatctgaccttccaaagaattatgacagtaattattattatggcaattatgtagcacccttattgccatctagttaattacctggcattttagtttccatcagcagcatagactgtctgcaaattatctgctgttgagtgcttgccctggccttgccaagagagtaggctgagggatgagctcagtctttctgaggctccaattctcaaccatgcgtcagtcagaaagcacttgtcctggaatttaatatcatgcatggctttgaccaagggtcagccttgaagcagctcagcgggaagccctctgtgtttttccaggactgcagccatagacatattccattatgttgttcaagatgatctgagcacaggcattgaccagcttggctctcttcatgactggtgagctttgtctttgtatttaagaatgccattggattttcttcttagcttcagttcggttttatgagcattgattgagtgcccaccgtgtggccatgactatgttctgggtaagggagactgagaaatagcacaggggagtggaaagggccagggcttggactcacctgtggctgaacgcctctcactgctcattagctgtgtgccttcaggatagttatccgaagactctgagccctggtttcttacttgtaaaaagagatgaacgatggtctacttggtttttagaatggagaaatggttgtaaaatccgtgctccagctcaggtactcaatgaatgatagtcatcttttcctgttgttcctctctcctctccgctcccttcctcttccctgctttctcctgcgttttttttaccttgtcctccaggggcttagtgttgagctgttgggccaggtagagacctaggctaatcatttcaaaatggtgtcagaatgggagaaaatggggcacttggattcagagatgaatgctcgaagatagctttcttgctgtcagccttgaaagttcaggaaaaaggtgtatcctatgcatatgttcatgacacacacrcatacacagctgcaggtgtgtagagactgcggtgtatagtacctgcactcacacacacgtgcatccatacataaaacayatacacatcctcacctatcagaaggggcctggcccgaagcagaatatacccaaattgtttacctgaaaggatcacaatgaagagatcgaggcagagttaagggagcaagtaagagagggtgagagacccagagactcacagcaggagggagctcttgttacacctagggctggctggacaaggggagaaatagtgttaccagggtagggtaggaaccagagctttggaagcgatgctgcctggygcaagatacagtccctgtggagacgtgggcccaaagcactgcaggaggggaagaaataccctgaccactctgctaccctgtgatcccctatggatggcttcccttggctgagccttactgaggaggctgggtgctgcataggcaggggcctccttcccrggcacagagcctggcagagaaagggggagagtaaccagcccgatgcgtatgcactcgcatacacttatgtacacgcaagcacagattgtctgagcttcttcctccagggcactcaggactggggaaggatgaggggaacaggcaggggtggtacagctggcaagacttccaagcccctcccacatgtctgcaatgctggcagggttcctagccctgtgctgtggacagggcttccagcagggttttctcaaagcctgtatactgtgctgcctcagttgcttatgagaatccatgattggcttctacgctgcctggttgttgctgaaggcagctatggatttacacatattcagaataaatcctcgtgtagtgtctttctctttctactacagcagcacactcaggaggagggagaggtacagtgaaggcagccggcaaaggcctattgcaggcagggggcttgtcctcagagcaggcctcagcctggggtgcaaggcatggcgtcacagtgttgtcctcagtgagtgcctttttcttgcctttgtctccttgaggcccccagaggctctggtagactctctcccacttgaccctacctccttggctctgctcttttccaatcctgctagtctcagtaggacttttgccaggaagtgggagctgatggctccatgctgagcttctgtggggcacccagtggacagtacgtttgtggtgctggttgacaagagaactctgtgctctccaaccagcagcacagctgaccagaatggctttgggtcgtgaacactgaagggctccacaggtgactttgtccaagtgctgggcaggtagaatggaggtcaggagcttggcctccagtcccagctctatgtggtctgggaggtctggagaactccttagtcttttgcctgcctttccttttcctctagaggatgcctatggcacgcctgtttgggtccgatggacttccagaagggttaattgaaaaatgcactccagatcacaaagctcacgggcctgtcctgcccactggcattttgagcagggtcttcccagagtgctgtgtggattcaggtccagttgatgttgccctaatgactgctgacagcacccacagcttgaaggtgtctcctgggggcagagacagggccccgtcagcagcccagggaagaggactgccttcctgtttgctgtggacagagggcatttgttcacttaaaaaaaattgccttaagttattaagtgcatgctaaagatggcaggaatccaggggccccttccccactctgagttgctttagggctggaatttgctcgctccagccttccctcctctctggctggcctggcctccttactagaggcatcacaagccggtgcatgtgaatgagcctgtgttggggaggaggggatggagggcctggccctggggtgcaattaaggccttgacttcaagcaaagctgctaggtgggatgtcagtatgtctgtgacacttgagctgtcttccagctgccttgctcaagcacccttcagtgctgaggtccagactctgaagaacttcagaaagatgcaggaatgtttctgtagaataattcatactgagtatgaaagccaaggagagttaaacctgggtaaagacatacagtcatgtacacactcacacacatacacactcatacatatgtggtcaatctctaagacactcacagacatacacacattcacatataggtacacgtgcatacgtaggcacacactcatatacagtctctctctctctccttctcccctctaacatgcacgtgcacacatgtggcaaacatgatctacatatgtctctgtggtgtgtgtgtgtgtatatatatatataaggagattattataaagaattggcttacactattattgaggcggagaagccccaagatctgcaattggtaagctggaggtctatgggaggccatggtgtagttctgagtctgaagacctgagaataaggagagcagatggtgtaagttccagtccaaaagctggcaggcttgagacccaagaagaacaaatgttcatttagagtctgaaagcaggaagagaccagtgttccagcccaaacagtcaggtaggaggggttcactcattcacagaagggtcagccttttgttctattcaggtaggtcttcaacagattggatgaaggccacccacatatagtcagtctactgattcaaatgttcatctcatacaaaaacaccctcaagcatatccagaataatgtttggccaaatatctgggcaccccatggcccagacaagttgacacatgaaatcacatctggtacctggtgacctcatgcatcaatgggtatcctggtgaaacacagggcaggcactagtagtacctcctggaacttttggtaaacccctggaatacagaagaggctgttctctttgatggaccctttagtcattcgaccatggagctagcaaggtgtcttggccaagacccacactagccctgagggcctctcatagtagcagaatgtcaaagctctgcccatcagcttatctgaaatgacacttcttatctttcactcctccactccctgggtttaacagcaaatttttgccccatggtttgcaccaaaggcttgggcattatctttgaaactcccatgccctcttcccctatatcctttttgaattgagtcctgccagtttcttcctttttaatattccattctcaaatctatcacttttctctctctacccattggtatcacccaggtcctagctcccatcatgtctttctactttcctgcatctacctccttggtggttcccttgttctcagtcttgccccgcatagcccatcatccacatgcttgtcagggagatttgttaacaaaaagatctgacagtatcagtctctgattaattccccttatcagcttctcattgccttgtagagkttgcaagctgattccctaaaggccaaattcagctcacacttaaagaatctgattgcctttacagctgaaggtgtgtaccttctggtttgccacagtcctcacaactccttactgtcttacacctgcccacttctctccttggttacttgtctagtctctgaagtcagaggcccaaactcttccacaccgcatttgagttccrtcamaatttggccttagttgaccttcctagttggaattttaggcaattctacctaagtactctgtgctttagccttcctagtctatacatttccacaaacacacaatattattctgcatttccatgcctttatccatgtcattcagtttgcttgggtggccttcctcttttgaactcctgaataatttccaattatcctctaagactctattcatatgtcacctactctctgctgtctttccgtaacattctctaggactcagtttcctcctttgtaaaatgggggtaatcacagcacctatgtgatggagttgttatgagkattaaataagataacccatgctaagtgcttagcacagtatctggtatatcagaaatgctcagcaaatatccagctgccagcctgcctggcatctagaggtattggtggtttgggcagtggcagggcctctgctgtttgtctcctgctagggkgcctgagtttaacagtctcttactattcacagtttaagaaaatagagaataattgatgtccatcaggcaatgaatagaaaacagctcattgcagatgcctggctttgatgggctcttcaagactgaggggaggaatttgttatgcccagagagctctgttctagaaagcagaacatggaaaataaaatctggctttataaatacatttagacttagggttttaaaaatgtataaatatatatttaatcttgaagaattttaaatatttcatgggccattgctcatggcttggtacctctaattggtgaaccttggtggcagagacactgctttgtggcatctgtttacagttctgtagaataaagctcatgtggacatttacttaggaaaaatctgtgaattgcagaaccacgtaagaataataattattgtccctgttttgtaccggaatgagctgactgcatcagcccagagactcgaaaggcaaacaagtatctgcaggggtaaaaagaaacaccccaatccaacagcagaccatggggacatttgatcaaaaaagtgtcttagatagtgaaacataggttctgtgccagattttcttcatgcagagaaaagctactgtagaagcagaagcagatgctgctcgtctccatccttagtgcagagttggcaggggacaggggttggggggtgccttcaagacaatgaagacttttggaaggatcactaygcagggagtacagacctagacaggaaacattcctggccaggaatgccaaggtcattggcaatctggtgtcaaggcctggagaaatgcatttataaatgagaaagcatcttccctgtgtcgggctccttcaagagagggtacccacatcagatgataattgtcatagtctaggtgcaagactcccacagacattgaggaacctgtccatcttagagtgtggcgtggactcgactggattgctgttcactgacagctgctgtgctcctgcgggagagtaatattccccactttccctggatttcacacttggccatgtgacttattttggctaaataaatgtgagcagaagtgacatgtcactttcaggtggaaaatttaagagccaatatatgctcaatggtcaatggtacaggtattctagcagctcttttcccaatgtaagggtgacaatgatgacacaggagcagagatcctaggtgatcctgatggaygtgtagcctgagatgtagcctttgtgatataagcyaccggtatttggggtgtttttgttactgcaatataaccagctctcccctgacaaatacactatatttttaaaagaaatatatttttaaaagaaagaatgatgtatttattacttccatraataactacatatgttctggtttttatagcagaaagacaatgaaagaagtaactatacatgccagaaagggaccagcgctgcatttttaaaggaacatcaaagactccaggagtctacttgtaagagtctatgaatttattcacaaagtcgtgctattctaccatcacacaaacagtctgtcactcacagaaatgtttgatccatggccgggcccatggcttgcgggaaattgttacatggaaaagccgatactggcttccctccctccacccacatctaacttcctggtcttccctgatgacatcctgcctttatggcttyatacatccctgactgcctgcctaaaatgccattgctctcttttcttccaacatcctgtccctgagaacgcctagcatacttacagcaaatgtctacactgcctctggagcctttctcatacctttcccccactccaggcagatggaagtttcttccgtgtcttccaattgccaacyggtcacccccattagcatgttgcagtgacacctcaaatgtgatatgcgtggccgggcacggtggctcatgagtgtaatcccagcactttaggagactgaggcgggcggatcacctgaggttgggagttcgagaccagcctgaccaacatggagaaaccctgtctctactaaaattacaaaattagctgggcgtggtggcgggcgcctgtaatcccagctactcgggaggctgagkcaggagaattgcttgaacccagcaggtggaggttgtggtgagctgagatagtgtcattgaacttcagcctgggcaacaaaagcgaaactccatctcaaaaaaaaaaaaaaaaaaaagtaatatgcacaacaccagatcatcagctttcttcaaacctgttccccttcctacctcctccatatccacaactgactccattctccatttagataaaatcagtagccctgtattctgtgtattactcattcttccctgtctcaacctcatccaatcaagtcttactgatttcgccactgaaatgtttcgtgaacttttttgcttttactatcgctgtttcagataaggaccttatcatctggcactggttttcayctaacagtctttcttattcattgagctccctgcttctcattcacctccattctaccacttctagggtaatatttctattaccctagaaggtaaggatccagtggaaactttcagtcattcgcgtttccttgagagtgatgtttaaattgctaggatggcattctgggcctttcgaaatctcctccatttcgttgtttttcctaccwctcctcctccccaccctgtctatattccrgcaacaccagaatgtattcatgcatatatatgtattttttttcttgcacctctctgaatttgtatattggtttttctgcatgaaatcccctcctttctcttcaaccttctctgataaccctggacttagtcttcaagatccagtctgagttttgcatcctctgggagcctcctggaaaccccagacagaatctctctctcctttcctattgcttctcagagcttgtgtttatgcttcccttaaaacacttccactctctgccagctatgattcaagaatgacacagacaaatgtcgtgaaggcagagactgagtcctatttacttatacatttcgtttgttcactagacaatggtatggactggttctccataaatgtgtatcagtctgttttattgtaacaaacagcttcccgcccccaaatcagtgacttagaataagaaacacttatttctatgctcacattaaagttggagactgtgtgagtcagttgtggctgccacagctctgctaggttctgttccacgtgtcttcccattctgaggcacaggctgaaggaccaatccctatttggaacacaccattttcctggaagagaaaaygaaagtgagagcctccatatgcaatggctcctaaagcttctgctagggcctagtttatatcatatcccattgatcacagcaagttacaggttcaagctcagtgtyattgagaaaccattctcccataggatggagggatactgcaaggcaatggtaataaataactatgtgtaatatttcacagagaaggagggcagataaatgagaattataatatactctgctgaaatccatgaaattaaatagagtcatgctgctgaaaaggatcttgaagaactccaatttcctcatttgttagacatktgtcattttgggccacctagcatctgagcccacttcttatgtttgggaaattccctactttttgagtcttggtaggaagagaggctgatcagaacaggcttctactagataagtgatttctagcctttcttggatttagggccaggtctatgacttgggctacatcagtcacaagtatttgatttaagactttgaatcaagagctgtacctcgcactagctgaagtgccaggagccttgagttcttggggtsctggtagctgcaatgcagtgcccagtatccacagtattggcagtgcccagagggtcctctactgaagtaataagatttggggtgatgttcttggtgacctgagagcctggttygctacctctcttggcaattccatgagcttcccagtgtcctttaattaattcacttctgacccatgttagccagtgctgttgctgttgcttgcagccgtgtgtcctacctcctttcccagggaggcagggtgtacgatwtwtttttttttttttgagatggagtctcgctctgttgcccaggctggagtgcagtggtgcgatctcggctcactgcaacctcttcctcccgggttctcaccattctcctgcctcagcctcccgagtagctgggactacaggagcccaccaacacgcctggctaattttttgtatttttagtagagacggggtttcactgtgttagccaagatggtctcgatctcctgacctcatgatccacccgcctcagcctcccaaagtggcacggtgtaagaattttaagagcattagctttgaaaccagacttcttgagtttgaagacctctagaggtagctctcsgttacctctgcacagagcaagcaagctacttaacttccatgagcctccatttcctcacctgtgacattgtcctcacctgtgagagtgacaagatttgcctcaaacagctgttgtattaaaagagatgctgtacttggagggcatgcaggacctattctgattgcagttctttgaaagaaagtgaaatgactttctcaagttcataatgtctgtgggtggcaaaactggaaggcagacctcctggctcaaaatagcactgtagaccttcactcagatggaattgatcttgcggacataatgaaagggcttgtaatcagaaaaagcatgtaaattgctactttcttggcaagsagtttgtaagggagagcctctkcctgaattgttagtggactgcactgcgctcagtctcttactttactctcatctgcctaatctgaggacaggggaagaagtttcatgtttggtgctccaagagaatttcagagtaagggtggggagactgtaaacccagatttgaataggaarctagtctaacccatgctgtctgtgtggcaaatgtgtgctccagacttctgaaacaagtggcacagattgtgcacagctagctgcgtgacaagtgtctttgtcggtggagaaggagccgccacactgagactgttagacatcttgagttctgtggatacagtggactgtctgttttgtttttgtgtttcaacatccagaaaaaaatccagtcacagtagcttgtgtcaggattctagcaggctttgagctcttctgcagtggtcccaaggagcgtggcatgtggcatggaccagtcagaggtcttccctctgcttgttgagctgagtggtggtgggacagctgacgcagggctgcgtgtttctgtgggcatgattcttcgtctcttgtctgtgctatgtggcagggctttgggtcagaaacaactacaaaaaatcaagggacactctcatcccctccttccctctgatgggaggaccctgaagcctggccccattcccgttcttagccttaagtcctgtcggccactggaagttgtgtggaaagagggatgggatgcagggaagcttaagagcttccagtttgggcagccgtctctcagagatggggcatagagtttgtagggcagggaccgatgtgtgtttgacctgatggttattccccagaatgaggagaggtcatgtggaggtaggaggagagtagcacctcagggggaggattcttgggatagaagaggcctggggcctcctagggccttccttccttccttccttcctagggtgggtagaagtcatcccgccccagtgtggctgacatggctctagggtcttctccatttgtaagtcacttgctgtccctgatatttgattcttcccttttcttgggcctcaggaaagtgttcttgacagtggcctctctggggtcagctggtctctgtgcttcctttatggggttaaagcgagaaagtccctgtagggccaacattactgcaggaacaggtgcagccacccatttggctctggctgccctgggactctatggtgaagtgcgtgttggcttcctttcctggccaaaggtgtgtgggctgggtttctgagtgggctcgcctgagtcacctccgttcccttcacataagcttcatcggaagtgactgtcattrtactgtaaattatgtttaggaagaaggtggctttgagcaatttttgttctcccgccactgtaatcttctctgccattttctgatagtgaataagaggactgaacrgttcaggaatgaagttggagctcaggaaagtggctgcctggcctcgagtttcttccgtggtgtaatcagaactctctctgacctcctgagcatctgtttggctcttcacaaggcctgcagcgtcccgagaactrgagagcaagtcactatgaagggacttagagagtcactgacttggattaaaggatgagggatgaggagtgagtctagctggtggccagagagtgggctgagcattctagcaggtggggcttacaccrtaagtcaccagagctcccgacagactttccaaggttttacctttcttgtaatttaaaaatgtttgctagtttgtacccctgtttgtatccagatagtggtgatctttaagatccttagagaacttctagctcgctagtgaggtggaggtgtcaactaattcagggctcattatggggcacaaaagagagccaggaggtggtgggccttgggtggaaaggaagaggatacgagattcctaaagctttcctccctgaggaattgccagcccgtggctgctgtcagccccagtgagagatgtgtgctggaggatacagccaggtagccaggaacaagggcacggggagccttcctagacagcagtggaaggccagccaggggctctaaggctccctacggtggaccctgcgatgtgcttcccgatcccygccaggaatgcaggactagtttccccacatgctggygtagggcctgcagaagcctcagcygcctatggggtgctcctgctgaggrgactgccttgcctggcccacgcccctccccggactgatccacaggaaatgcctgaccaggaaggggttccttcactccagcctgtgacagctgtgcaggccaccccatctttaaccctcccatcgtggtcagcactgtgctgcagcctggctctccctctgccccatctagctttctcctgctcccagaggtgtgrgtccccagagctctccctactcagcgtcctgctgcccttctctacctcagaggctgcctcacaggaagccagcccacracatccccttgcacgccacacaggccctaggtcatctctgggactgttcaggtctgctcggtgagtggcatggaacatcttttcagagatgtctgacatgctggggcaggggaatgggaagcaggctgcttcccaggggctgtgtctgtggctgacgggtgcagtgggcatgctcacactagctcagcaggccagagaacacacccaggcgcctcgctgcttgcgcttgaatcttgccctaccatttgctccctgggtgatctggcaggttatttaagccctctgtgcctcagttttcccatctttaaaatggagaaaataattggacctccctcatggtgttcttttgaggattaaatgggggaaatctctgtaaagccttcagaacagtgcctgcagggcatgcagtaagcactacaagcttgttggttaaaaacatcgcccaagggcactggccagggactctctccaggggcctacccacaggggaggaaggcggttgtgytcctgctccccagtgccagctgtttgcaccctggctgcctctagctcttggacccctcctttggtgacytcttccgggtctttggctggcagacctgatccagtgtcgctccttggacataaaaacccacctctgtcaggcactgggaacagtcactggctgcttacactgtggtcatggcccatcgttacccacagactttatatacctgctaggagcaagagtaggagagggtgggttcccagagcaggcctccaggttttcctgcttgcagtctcatggatgggctccagtccctccttcccctggttgctcctgcagtcagggcgagatggggctgagacaggggaatgggagagtgcctggaaggtggtggcagcagtgggaccacgagagctctccraggggagataaggcagttgatgggggagtgaaagaaagatgcaaatcaggctttccctggctggcccatatggagaatgggttcctggcctaggaggrttccctttgccctccacatccaytcctcacctttcccaacactgcttttggtcccagaaggctgatctctacggactgcatcaaacaggcttccatgcctctggctcacaggtgggcrtggccgtggaggcatctggcagtggctgtgctcttccgtgaacaatgctcccagccacagctcttgctgggctcctggaaggactctctcccttgaccccttcaggcctaatgtggtaatggctycccccttttgctagccaagggtgcctctacctctgttgactttccttaatrctgtctgcctttgtaaatagtttttaaattaaactcagttggaaatttcatgctggggccctgacagatccacacccctctgggctgatgcatcccctgggcttatggcctggcgagcagggtgtgggctagattgcagcctccctcatccccaggtgcccagatgcagggcacagtctatcgattgcacctagtactgctgggtggactgggtgctctttcttctttatgtgtggcatctccattgccggagaagatctgggtttggttccatcaaggaggctggcatgatcttttagctgccacagcatcatccttagagtggaaaggggacagaagaagcctggcagtgctggcatagccacagccaggagaggaggtaccaggatgttctgaggaccatggccctggggcctcttcctattttttctgttgtgtacttagagaagctggtgggtccagtgctcyctccccatcttctatgactaacactttgctcctggataattgatctactggttctgacttacttctcaactagaatcctttcttaatgaaaagccagagaccacagggrccccaaatctgtctttttctatgtctgtgtgttttcaagaatttgcatctttgtgtctttctaacttttgggaagaccaagagcaaccctcactgttttggtttagatgccaggatctggcatgccctgcactccaccctcagattttttagtagaaaaccaaccctggtaaccacgacacctaaaggtacatcatctctactaggaaggattcagagcactgggaaagccctagaaatcccaggtccaattaatmattccataggacaattcattagaatgcacaagtgcttaactaaacaaaaccataatcraacttgtcagaagtgatccacggttgtgttaaaattttctcattcgcacatcatttcctctacaatttagttagataacaaacactacttatcccatcactggctttttcagccatgaaatgcagtttgtgtctgtattgggcaccagagaaagggctttcagctggctggtgagagggaactcagctgaggaacaggcaggtcttgtgcagccaagcccaaagtcagcctggtgtcctgtgaagttctctgcagcctggttttatgtttgaggatgacactcttctgctggtatctttagggctctgccaccttggagactgctggaggatgacagctctacctttgggacagaacgttttaaccaggccagggtaggcactggcgcatagagaaagcctacttttcccaggatgacttacaatgcaccattatggcttcattcctttagctgaagctggtaataatgggaaaytgcagatttcttttctcagggrcatgattttggagggttatcagtgttcttactttggttagaatagtttgtcaagccttcttctgagtgggttttgaagcttgggggctggggtagggaccacgggggtgagaagagatggtcctagatggctcagcaaggacaggccaccgggactgagcactgtggcaggggccctgtttctgcggcctcatctatgtagctagtctcgcaaggggataaggaggggagtaaccactcatttttaaatattatttasaacaggccagatctgtacagccccagagcagggatgccagggctaaatgtgagggtctctttagttttctggggataactaacacaccacaaatatgcatttcaattgattaaattaagtccatatatgtgcatgtgtggatgtatatattgctatgcatcctctttcttccccctctttattttttcccaggaggaagaaagtatttgtacttacaggcaattaaaagatattttagtcctaacaggattcagaatcccagtaggtttgggtgggtggaggctgaatctcggatctcacttgagctgtctaattgcctttgcagtataatggtgtccacctggcctgttttacacagctgaccttatctgggtatcttagtctgttcaggctgctataaataagacactgtagactgggtggcttataaacaaaagaatttgttttttatagttctggaggctggaagtccaagatcaaagccccagcaggttcagtgtctggtgagggtcctcttcctggttcatagacagccatcttctcaccgtgtcctcacatggctgaagggacaagagagctctctgggattccttttataagggcaataatctcattgatgagggctctgccctcataacctaatcaccccccacctcctagtascaccaccttgggggttaggatttcaccgtatgaactttktgggttcatatacattcagtccattgcactggacatattgcagctcagtcagctagcgtcagccgtggccatgatttaccccttagctttagcacatccatatgtcctaataggagtgggaacagtaaccaatagtagagaacctactatgtgccagcacattctgggtgtttggccctgtctagccccaacagtgcccctgcagcatgggtcttattaatgatgaggaaaggcagactctgaggggttacaggacttttctttttctgttttgtttttgttttgagatggagtttcactgtgttgcccagactagagttcaatggtgtcatctgggctcactgcaacctctgcctcccaggttcaagtgattcttctgcctcagcctcctgagtagctgggactacagatatgctccaccacatccagctaattttgcatttttagtagagatggggtttcaccatattggccaggctggtctcgaactcccaacctcaggtgrttttcccacttmggcctcctgaagtgctgggattacaggtgtgagccactgtgcccaaccaggaattttctaaggccacttagtgctgagacgagaatttaagtccaggccttctttgctccaacattccagggatgggctatttgggagaaattcctttgattttcagggtgtctaaaggtgtttgctcttcagtgttttacattgtataggttgactgtgctccctgtccctacacatccttcccttccagctgggcccacttagcagctctgagggccctgtgcctgatcaggggctagaaggcggctgtggtgacggcccatctcactgctgtccctgtcacactcagggcccagccccatatactcctagactgcttccctgctgtttatcccagctcctcagggacctcacctgtcacttatcctgcaggtgactgggcccgcccagaaactatgatcctctagctctgcatgggctccttgctgagttgcctctctcccgttgagggacccacctctcctcccactacctctctccctcatggggcygtgctacctggcctttcagggcccttccttcctgcccagtgatctgctcccacgaggggctctgcatttgctcttcctgctcctgggaatgctcttcctcccagacagccacaaggcttccttcctttcccgtgttcaggtctttggttaggtttcatctggtcagagaggccttccctggccaccgccatcagagagcccgtggcccatccttctctatctcccaacccaactccatttctctgtgtcacttatcgcccacctgactcatctcatcattgtgggtttatttgttttgttgtccctctctgcccacacactagaacgtaagccccacaagggcagggggtatgtagttttgctcattgaggctgacaggtgggcagcatacagagagagcagggggaattggggcacacagagacttaggttccaacctgtgtctgccagtcacaggtgtgtgacctagggtgtatccgaacctcccaggaattccccatcccccccacccttttttgtaaaacaggagtattaatctatttgtctataaaatgggactatcaattcctggctcttgggttgtgaagactcatactaatagcccacatttactgagtacgggtcatttgctgtgcctagtaccaagccctttgcagggtgacctcatattattctcatggtatcttaggagaggcccctattctcagtttacagagtgcatagctgagccaacagaaaagtgaagtgacttgctcaaagacccgcagctagaaagtggcagattcaaaacttgaatgcgggcyctggatctggcctctgtaatgcctctcatttggaccacacaagcgtagtgcacagttggctcttgataaataatggctgttctccttcataggatctgtcttttcccatggctraattgtctcttggtttcggtccacttttggattcctggtccttcatcctcccatgagcaaccaaacctctgcctcctggtccagatccttcacttgccctcactcttgggaccttcttaggctctgggctccagcctgctctgctctggttgctcctgcctctgctgccactcagttgagtctgtcttggtgccatcagcctcttctgtaacctccagtccctctaccagcagccagatggaagcagctgggagcacaggtcagctggcaggccaaaagtagaagtctatttgaactactgatggtttccttgagttttccatttgtagggcaagagtaggaaggggtcgcaggactagtggcttgtggctgcaatccgatgggtgacaagcaatgggaaatgtgaaatttcacatttagaaaactgattcctctgtgtaacagctgttcttattcacgctcagagatgccaggattggtgacccttggccacaagggaggcctgccatccattgtcattacaaggggagtgctcagggaggctgcttccttggaggtggcttcaggaattctgctgtgtaaaggaaagcatttctgctattccaaatggggagcctctgcctgcaactcagaggggatttccctgcagggccagcctggggcaggcaattgcaagcatgggttttggagctccagtacctagatatggtttaagcataggccccaacacttactccctgtgtgacttagataagtgacttcatgtttctgagcctcagtttcctcwtctgtgatgtgggaatcattggatgggtttgggtccaagtttctctttaagtgagcrtattttagaaagcycccttctctgttccagcctcctcctctgtaatcacaaggcatctcacagcaacagggtcccctcactcccagtggcttctcctggcccttggggggaaccagcactcagggtctgagctgctcaccagtagtttgccccattttccacccgtgacccattcaagccttgtgccttttttcctagaagtcccatcagagtgagttccctgtagctgcctagaaacacatttcagtcccacttacaacaaaagaacaaccacctttaaagctttacaaaaaaaataaataaataaattatgttccccctgaacagtcccagaagaaatgtcattggagacataaaactgttttactgtgacctatgtaaacgtcccgggaaataaactgacttctcattccataaaatcctcttgtcctttgtcttgaacaaaacagattggattacttgaaaaacaggagcttgaggcttggcagagaagacaaagttcaatcataatgcagaggtatggggcaaggctttccattctgggaagcacagctttattagttttattgcctaagtcctctttgagatgtgccaatctcagcttcttgtgggatgtggaaggacaacccacgtctttgaaagagatrgaccctgtggccagtggagggttgaaaaaccagagtcagattctcccaaaatgattcaatcaggagttgctcagaacagagcaagggacaggaagtcaactgatgtttatcaaccctctgcaatgtgccaagcactgtgctaattccttttcttcaagcctcgtatctgttgctgccagcctttggagggaggtttatgattcccatattacagaagaagaactgaggctcagagacatgcagtgccttccctaaggtcacacagggagtgagcactcaagtttggacttgagcccaggtctgagtgtccgtgactccacactacaagctcatcttcatccagctgcccttttctcccctagatgtatttctgtggtccagaagggaggggtgcctgttgttctgggtctgtctgttgggaaatctacatggagtctcatctgtacttaatatccagtgccttttctgttttcatgcctgtatgtgtaagtacacagatgcacacgcacaggtaccacgcacacagacacacacacagatcacacacacgggccacctgagtgatgagaggagttagtgtcattatgggactttgtcgagaggcatcctttttctaggcagcacccgtgtgtcctggtgtccatgtgatagatgggttaggagagtagcagagcatggtaataccactgtgttaaggcacataacgagcccaggcctcaggtgccgccagactctccgtagcaccttctaaacacagtccctgtgcaaactgccaatttggatgaagaacctgtcactaaaattaggttggataaggtctgagctgggctgagctataatgtagatatggctgatttactgtcacagcactgggctcagaaagaaactatgtgtgtgtacctgtgtgtgtccccatatatgtgagaataagggtcagaccccctttcacatcttgttcctaattctttgccgcactcagaataaagaatttccacaggattggatgctttcctccatctctgagtgaaatccagagagaatctgtaaatgacaagcaccatgaactatttccacaaggaaaaacagtctgtcctcctggcggatctgggtcaggcggagtctgacagctgtgagatggggtcaagagtgccaggccatcatgagacagactgctctccacactgtgtgtgaggtcacatgccacttggacctagggctaaattcaccctttactcctgcccaggagacacggctcagccctgaacccatgggggcaggcggtttcagatggaaaaattggctttcgtctttggtgactttaataaagaattcttaacttagacttctggatgggctttagggaatctgtgaatgtgtaaaaattatgggagtaactctgtgtatgtatatgtatatatgtaaacatatgtatgtgtgtatatatgtagacatgtgtatacatatgatggtatgcatacatatacatatgtatatgtgttgatcagtttgagctgctgtaacaaagcaccatagagtggatggcttacaaacaacagaaattgatttttcatagttctgggggctgaaagtcccagatcagggtaccagtgtggtccgggtctggtgagggccctcttctgggttgtttactgccaacttctcattgtatcctcacatggcaaaaagagactgggagagctctctggcctcttcttagaagggcaccaatataccattgatgagggctccacccttatgatccaatcacctcccaaaggccctaccttcaaacatcatcacactggggattaggttccaacctatcaattttagtggaaacagaagctttcattccataacacagtgtgcacatgtatgcattttctggagagatagtccaagccttttctcagattttctgaggggtgagtggctcagaagtaaagaaccactgcattagccaggtctcctcaggattgtctggggcctattctggggatcacatgtatggggtcgctctgttagctgtaggggactggctaggtcatgcttcagccttggctgcggggacacagcaaccttgagctgtagctctttgcagaccagtgtgtaaggtctgagaccagggcctggtggcagtaattagcttcaaggagccctccctgcgtgaagctggacagccggtcccttcagtcttcagcagattctttggctgggattccatgattcagctcctgaatgcagcccttgaatacttcaatgccattattcacagcgagaaacctcattcagtccaaaaggaggggcagcctgtttttacaacccccgggagagaaggccttcagctgcagcctggccctctcttgcatcacctggcaggccgcatgtctttgtcaggagtcaagtggaaggcggtaccagctgcacgccccgccgagaggaaagagtgccggttgtgtctgtccgggcaccatcctcatgttagagctacagagaggcatgtagaggtggtacacagaagtctgggtcaggaaggcctgcagcctgaaagcctgaggatggagctcagcgaatgcatatatagggctgagctctgggactgtccactatcacagaagcctggctttgaaatgatgttgcaatgtgcccagccctgagatttgccctggagtcacagagatcccattttctagagaagatcrcagcctagaagaaaagayagatgggccaacaggtcacacaaggtggtgtgaaaagtggcacartagctggataactccttaaaggcaggcaccttcatttctatttcttgcactgagccccaggttagacccaggaaatgcatctctggaaggcagctatgctcaccactataccaccaatgcagggaatgcatctctaaaggcatgagtgccttgcatatagtttgtgttctaagggactttctgcatgcccaggcctggtacaaggcctggaaatgagctgtactcatggaaggtttgcagaagtgacctgaatagaggttggaacatggtgaggccttatcacagagacgacccagggtagggagctttacctggtttcatatttaatgcttctgacctgcccttctcacagggcccctgggagagtatactgagacagcagatgttaaaatagtttgtgtactttagtgccaggcaaaatatgggctcccattaaaggtggttttcctattgtgaggctttccacacccttcatgtcacattgccttgtgtgaatcttgggtgcttcagatccatcagcgtggtctctgtgacttggtggtaatgctccttttgggctgcagctgagtcttcccttgtgttgagttttccatgctgtggccagcatctgcatgtagttggtactcactgggccatagtgaagtgtctggagtgttctgatgctgtaaccagggaccttgggggctctgctggaaggtcctgccctcagaaggcttctcagaggatgtgaccaccgatgctgtgtcttatacaaatactctttctgcgtggtgctgggagtgaccccagatatagccaaagaagggagattgctctccaattgtcaccatgaacaggatctttcagtttcccacagaggatggagtagcgcatgtgttaatcacagggcagtgaaggtcttgaattcagatatgccagcatgtggccaaaggcctgtggccagtcctctgctctctgccagtggctaggcacaaagggctgaggcctctatttatttctgatgagatgtgctgagggagaaatgactggaggcatggagaggggggaaagtcattccgtcttcaaaggagcacaaacaattgatgtgactccaagctttctctccattgttcagtaactacttattgagcagttaccatgcatagcacatgatgctaggcctggggctaggggagaaataacaccaattctgttcttagagttttcacccaaggctagattaagatgtattgggtcctaagaatcacagtgctcccttcccctctttcctgaatgtaatgcaaaataaaaatatattaaattatgaatatataaaaacaattccagcagttctaattgttcccatgataactacttaaatgtttaaaaaatctttctttggatatcaaattgtttcaaaaatattttggtattagaacttcactgatgttctgaaaacaagctcagtgtgccatttagataccaagggccctaattgtcacagattaagagaagtcagaaaaggaggaagcttttttttttcttttctttagcaaacacttgtgaaagatgagaatcggggcattcaagacagaggattcagaatgggcaagggaaaagcatgggggtgtagaagaagaagagaaaagttcagtttggtccgagaggtagggaagtcatgggagaggggtgggagctggggccagatctggttgagcctgagtgccagataaggagtttgggttgtatcgggtagttcttgggagccatcaaagatttctgagcctctctttgttattgtaaaccaatttccacattcaggatattcaaaaccacccttgcatagcatttaagagtatctacagtgatggagtgaagctggagtaattgagtattggtaattgctttcactgtgctttggtggaatgcattttagaaatggagttctatcctgtaagtgcatctataggaaaaaagtgccaaaggcttcattatcattaaccagtgccaaatgggatttgcagagagagtgaagtgaatgaagaccatgcctctgtcttctgattactgcttgaatctgtaagggagggattacaataattgcagcgaytaaaaracaacaacaatttgggraagcagatattcacatggccttggagtaacacccacacattacttattaattacaaacgaatgaagtacttttacgatggagaaatatggcagatgccaccttaatcaagtgaccacacttagaattaccaataatggggcaaactgacattatgtggcttttgatggagtgcagtgggatgagcacaacatcacttatgtagtatttgccaaacatctttgacctgaatctaataaagagatattaatcagacacattcacattataagatctcctacctcaaatagcgtatcctctaaaaatgtcaatgatttaaaaaacaaaaaagggtatatgtgtgtagagggaatgttccagaccaaaggagaccaaaaagatatataacaagcaaatgcaatgcttgagctcagattggattatgaatcagaaaatgaacaaagagctataaaggacatgattggataattgggaaagtttaaacatggaatgtatattagataataggtctatcaatgttaaatttcttgggtatcatatggtattatggtaatatacaataatgccgtcatacctcaaaagtagagaagctaacagtgcagccttcagtctgtggtcgaaggtagaacttggagtccaatgttcaagggcaggaagcatccagcrtgggagaaagatgtaggctgggagactaagccagtgtagtctttccaggttcttctgctgcttttattctgaccacactggcagctgattagatggggcccacccggattgagggtgggtctacctttcccagtccactgactcaaatgttaatctcctttggcaatgccctcacagacacagccaggatcagcactttgcatccttcaatctaatcaagttgacatgaaatattaaccatcacagaggtggagcaggatactcctatagaaagggaatatatatgttttataaggtttgtagaaatatttcacactttaatctttgtgcatataaagcttggatctatgtaagaactaaaaagttagggaaggggaagaagaaaagaaagaggaaggggagaaggaaaaggaagagattaaagcagaggaagagtaggaggaaaagaaagaggtgggagaggaggaagaagagaaggaggaggaaaaataaaaaggaaaatgcactggggcttgtgtttgggagactgactcagttcagaattttcctctgagactcagcttccatgtttctaagatagggaaaatcatatctcctttggtgggtttttatgataattaaatattcctgatataaagtaagtcttcagtcaatatttgtttcaatgatttctccttttrtttagaatgaatgagagacttaaaaagtggaaattctaacaatagaaaaattcatttattaattcactccttattcacttaacagtagtgtccaagtgatgatcctgaataacagtgccaaggaagccaaccaactcacagatcactttcacctctgtttgtttgcccacattttcaggttcccagtgtacaaggaatgtgttctgccagagagtaactttcttgcaggtgctctttctattgggagcgascctgaagggttttgtcctgtactttttcttgtctggggcatctactgtggaagatgaagaagtgaaaatgtggtttgggaagggacataggattatctgagagaggacaggctggccattttccatggccaactctctaccctcctcagcagctgcacattttccaggataccagggctgtaccttccttgggtctttggagttattttcttgcccattgactggaagttttgtcccctcagtatctggaagcagcatagtcttcagagttatttcacatgccttcacttttctaataacacagttctttctcatagtccttttaaaattaacctaagacaaataccccactttctaccagaaaatagcaatgacgggaatcaatagttctggttgatgcatggccagcactactccaggaagcctgagcctgggatgagcactgtcttcagtgcaagcactctgggaagtcgccctgcacacgaaacgcttgaaccaccagttgcttttccttgtccccctcatrgctatttgggggaagtatagtcatctggacagggtctagatggtgtatttgacatccttgcctgactatcctgggtctgaagtcatcccactttaggaaaaaagaagccacctgtgaagtgaacacatattaaatattttgtagtggtttctcttttgcaaaatacatgaatagcttagacctagcaaaaccatgtggggttttatggtgtgtatgcatgtattggttgtacattttttatattcacttgccagaggagctgtatgctggagttctggggacatagattgtttgaaatcgataaataaattcttaattttattttcactggtagcttcaccctcttgcttggctgtgcctttcatcactgaggctcccgaggactaaagcagccagatggttctgggcattacaagttgctgcagggtgactgcaggaaacctcaataatacataattttgtccctgaaagctgagctgagctttaaatgcttgctaacctgtactgataaggaaggccataggggaggatgacttcctttcagaggagtgaggatggatggctggcttctctgactcggagattagatcagtaaggcctgggctagaggatttactgtggaaagggtccagatgtgaaacagtgggaagaaagcatagacagaacttgaaggcatgcaaatgaaggagagagagcaggtacactggattcagggaggaagcagcaagagtttgcaggaggaagcgagtgtggtattaaatcagaatggggacttctgaatctggtgaggaggaaggcaatggaaatcttagtgagaatgctttcattgrgatgtcggagactgaatccagatgatgtggcattgatgggggaggaggtggtaaggcaatggaagctgtaatatgcaacccaggatgatgccagctcctattactttgtggtgatggcctagagctctttgctgagcaggttgtttctgggtgacactggagagagtgctgtgattgattacttggatctgctgtgggcataggagtcagtgctggtatgcatgccatctgcctgccatccttcatagagattcaagaatctggtaactcacactgttatcttagtgtggtctgtcctttcctgtcttcttgtttttacttaaggttgatattcataatatctcacaaccaatccatgactaatcatagcagacactggctataaacaaccagttgcctggagtgtgtgtactacaaaatatcatgccatttactctgcctggaacatcctttccctgtgttcatctactgaactccactcattcttcaagccctcttcaaatgtcatcccctcaaggtggcattttctttaaactttgctccttttcctatgttcccatggcactttgtacatatctgggttctagcgcttccaacactttgatgttgcagttgtgtgtttatgtgcttgtagcttcctttagctgggaagctacttgtgagcagcaagggtgcctccccagatgaggcagtcaataaatggaaaaaggacagggatcttaggaacttggttcatctctgagtcatccaaggcaaacagaatgcccagcacataattggcactcagtaaattgcccctcttgcctagcaagtataggctctcattaaatgttccataacccaatatatatatatatatattttgagatggggtcttgctctgtcacccaggccaaagtgcagtggcatgatcatggttcaccgcaacctccaccttccaggctcaggtgatcctcctacctcagcctcctgagtagctgggactacaggtgcataccaccatgcctggctaattttttgtattttttatagaaatggggttttgccatgttgccctggctggtctggaactcctgagctcaagcaatccacctgcctcagcctcccaaagtgcagggattacacacatgagccatcacgcccggtgatgacctgatttatttgtgatcaagtttttttttttcttttcaataagaaaaatatgaatatgtttgagggcagaataaaatgcttgttactcactagaacttcagggagtcaggagtgtgcccagggctattcagtccagagggacagaattacctggaaaagaggactttgctctgcaattccttctcagatcttgtacactgtgctctctgccctgcagctgttggctctgatcctgcctttgctggggtgtatggagggatcctgccatcattcatttacttagcacatacttactgagcacttactatgtgcaggctctgtggcacatgccctggccctcaggagctcaacagaaaagaaaactgtgtaaaggcagaacttcatgatatagaaggaaacctattcagtgtttgcttttatatgctcaggccaagagagagaagaacccagtacaaatcatttttttaaaagataatgtcaaaatggtaaaacagactaaatgaacctttgctgttagaattcagtatcatggttacccttggttgagtagtggtggaagggagaacaaggggtttctgcactgctggcaatgayttgaccagggagattgctgtatgggggtgctaaacttgagaaaattcatcggattgtacacatgtatttggtgcacttttctgtatgtacatttacgtcarcaaaaaggggaaaaaagatgatgcctgaatatacagttggaacggtcacagaaggtggcgaagctttctcataatccgcagggaatactgtggcactgtagtagttttgactcaaaattaggaaatcttttcttactgtcaaactcacactcaagtgaactcagcttcttgggagcttactttattagcggctgaacacatagtgcctagcgcagggcctggcctgagcaggcmccatggagtctttgtgaaatgatgggatggatgaacacctgcaggctgtagcatccctgcaaggattcaggtacaggtaaaactggaaattgcagtggaggtgggcacctgattagactgtctttgataataatcagagcaatagctattctctgtcaagcaacaacagtgagccaggcccttcagatcgtcatttctaggcttcatagcagcccacattaaccctgaggaaacaggctcagagaagtgaaataatgtatccaagaccactcagctaataagtgtgggaaagctggctctgggaattaggcttctctgactccaaaatctcactgttcctcctaaagcatattacctccgatgccttcactatctggtccccactcacgattctttgtactaaaatccgtctacttcctcaggggtggcttttgagaagaggaatctatttttctccgtcctaagggtagagatctgactgtcagtgtgtgtatgagtggggcaggaagccctcttcttccatgagatgcttgcctggtgtacatattacaaacattttgacgggaactgcaatctgggccaatgtgtctgtatggggcagaccaatatcccaagaaaatgagtgactgtgcttccttttcaactattttgtgtcttgggctggaaagtgcccttcattcggagagcgttaaggactggagctgggaaggaattcagccgtgaatttatctgaggatacgctacgcctctcatgactggcaagttgttacaaatgtcacaacttatctgcagctggaaggataatttagcaaagtctgcggctgccaaatgaggatgtttgcatttcatacaggcatgctgttcatgtgctaacagaagcgatcagaggaagaggcctcaatcaaacaaatgattaaccttaaaaacagacacataaacagacccacaatggatgaattatgcagcagaccatctctgctgctgacactggcccacatctggtttctccactcaggctgttcctgtaaatgactttccttctctgtttgcttcctggctctctctacctgttttcctttgcacagaagccaacagagtatggcgaaggcytcttgtctgtgtttctgagcagtccttccccagagggaaccagggcctctcaaaggccacacatgctcctgcctgcctgctcagcctaggcataccccagacaaatacaagaggcagtcttaggagccacgtcagatggtacacagaagggaaggagaggcaggtactgttggtttaagcttgtttgcaaggggccccaggagcgcataaattctgcaagcctcacttcgccttagagatacatcttattcatgccgtctgagcctcgctttatgaggtgctgagctgagctcagaggtgggcactttatcctcaaacgagctctacactcagcactgtgggtgtgttcttgcagacttcctgctttgggccagacaggcatttggcaacattgaaggctggctcttggcttcttccaactgagagcctcgtcctcagaggcctccacagatcttcttgcaaggcagtgggcaaaggagcaagcaacgtagaagcaagatctcaggcctctctgaagctgcatttgctgcaagarggaagtgtcttcctgtgctgtgtcagctaagagggcagaacctccccaggcgaggcagtcaataaatggaaaaaggacaggcatcttcgcaacttggagtctggcacccagaagcacaaagccaagcctcattccttctacctcccaggaatttgaaaattatgatggctgatatgagtaatagaggccaacatttgttccaggtcttctggttgtcaaggcactttcccttgcattttctcacaaactcaggcaaggtagaaacaggccttactgaatttaggaatgagaaccaagtagctttacttgggccatctctagggaagacacattattacataatataggcaaattgtgtcttggaatagtttgctcacgaaagagtaggattttaaaaatactgtgcttcagaaactcaatgaatcacctctgatgccttaataaacagagagtgaataatggaataatattaactttgaccactttatcagctattttcaccatttaaaatgaggctagtcagatccaagattctgtgagatttaaacatttccttccctctgtcacttattcattcccatcgatgtcttggttaaatagttacagagtttcaaaagtaataacactgaatttttttttctaacacaaaccacgagggtgctgtgcacaccaaagcatgaaaccaatgtttgttgaataattgagtgaattactgaataaatgaattctgacttttaccttctgaatatgggattgctgtcaagtctggggaaaatggcacacttaaacagttcaataggagggtcattttttatctctgtgagtggaaacgagagggcgtctcagaggtgctgcccaggcttggctgtctctctgcagtcagcctccttggagttgctgttctgcccagtttccagtctgcgacaggtgttgccccaaggcccctgtgctagtcagctagcaaatcggcctgaggtgcatccctgctgtgcacctggctgcccgctcagcacggctctgcaaaaagacagggaaggaaaggaactcccaggtttggggagagcctggtgctgtgcccggcctttttaccttctttatttgtacagaaaatacatgaaaaggagatccttgactccttacctgaggcaattcactatccataaagagaagtaaggagaggaggggttgtgggtgctaaaacgtgctgaggctgactctgtgctgtgcatgggaagggcttctctagctcggcactgtcaccattttgcactggatccttctttgtcatgggaggtgtcctgtatcctgcaggatgatgaccggtgcttgccagcatccctgctgccttctactgagagatgcccatggcgcatctccatccacccaccrcgatgtgacaaccaaaaacatctccagacatggctgctgatctgggtattggcctgaactcatttaagcctccacaatcctgtgaggtaggtgttaccatcaccactttccatgtgaggaaatgaagcctcagaaaggttcagacatgtacctaaagccactcaagaaagaagtgaagaaattgggatttgaaacccatctctgtccgccagtattagggactcccgggaggccagcctcctgcaggttcttggcagtgaacgctacctgtctggatctatacttttctagaaccctgtgctgtgactttctccctataggctcctatttccttatcacttgctttgagatcctatttgaggttgctaattaagtcttttcgtagaaggaaatgggatgagaatattaaatgtgggaagatgccatgtttcaacaatgcttggcctctctttttgattttgctccctttctcttgatcttttttctttctctgtgtctctaggactgcatctttctctttgataattggaaccagtaagtcctttgaatttaagggtcattggtagttaagttctatggtcattggtagggttttgtctatctgaagctgccaccagaattttgctgatacctggtgttggagaccctcttcccatccacattacccatcacctgtgagccaccccaaccccaacaatttcctgtgctgtgtcagtactaaattgggtcagcagaggtctgaatctttcttgagtcaccaggaagaggtrtagctagggcaccatgtagagcacagggtaaacagaggccasgccatgctgtgggttgtacttcttggagggcaaggcagaggcctggggttyctggaggtcagggctggaacagggcagaagcacaggtgggcagatagaggggacggggacacagatagcagatggcagagcaagaaggaagtccacagtccaggaagggaagtgagacagggcaatacaggcacaggcyctagagggcaaatgctgatgmagctacatctgtcccaggtctgggagtcttgagcccacaggtgggggagggaggtaacaggctgcagtcaggggtgggagggcagtggggaaggccagaacagatgaggaaagactttatttctaatcaactcacaaagtagaggacatgacagtgaaagaaaggaggatttggtcagcgctgatggctcattgacttgatgtcctgccagctgatggaaatactgactacatttggtggcttttagaccagaggagggaatacagtattgggatagagaactggtcttaaatgttgaccgtcataagtgaacacagtcatacagttctaaggctggctgatcatataataaagctgattatcagtttgctgagtgaccacgaggactcgaggtaacatatgtaagttgctggcataaagcagaggctctagagatagtaactgtcagcagtttgtatcctttgactcagccaagagcacaatttgctctgtttttgtgaaatattatttatggacattgtcaaaatttgaaagacataggaaagtgttaagaatataacaatcttccagggaaaacattttggcatatttccatttaatcttctctractgtaactacaattacattgctaccatcatagaatctctcttaacccacttcccttcttttatttatttatttttttgagatggagtctcactctgttgcccaggctggagtgcagtggcatgatcttggctcattgcaacctctgcctcccgggttcaagcaattctcctgtctcagcctccccagtagctgggactacaggtgcacagcaccatgcccggctgattttttgyattttagtagagatgaggtttcaccgtgttgcccaggctggttgcgaactcctgagctcaggcaatctgcccaccttggcctcccaaagtgttgggattacaggcattagccaccatgcctggccaacccacttcttaaccaagtcacaaattcatgagttttctcractcttctacagaagccactgactgaagtccacagcctgctgggcattcatagctggcatggaacccatagtatttctttgagtgcccccatttcctctgcacttgggtgaatgcttaccaagggtyacagagctgggtttcttcccagtccttcctgtgcttgctgagcttgttattgtactaacataatctaattaaatattgagtgacccagtaaaatatgagcgaaaagagaattgcttcttagaaaaaatcaagttgcatgcattgaacgacttgataaaagtcaattactagcaatgatggctgtcaaattagttgtaggcaggrcagctgataaagattagaagacatatgtacataatcctagaagaattttgccctcaattggtttcacatatgagtttaaattccttctccattttttaagacgagttctccagttttttagttcattttaagccaaatttggaaatcatagatgatataaaaagtcatgaattataattttattttttattttttttaccagctgaacaaggcctgaaaaatgaattataatttttaaaaagggaaaayaaagatgtagaactccaatctggagacacagctcaaatagaagccttggccttacaccaaaatattagcatgaaatrttttaagttgaaatagtgtttatggtttgtgtgtatgtgtgtgtgtgtgtatatatatatatatatatagaaaatatgtatatgcacatacacatttatctgcacaatttcagtgattcctgctttaaactttttgcttaccctattagctgctcctgaccatgttagataagagagttgttactggaaatactgtgtgtttggtgcttatttggtgccatgcctccacaaaattctttatagataataatctcatttcattcatacgagaaccttttggagtattctttcattcagcacaaatttattaatcagctattttgtgcctaacactgttccaggttctggaggtgcaggtgaacaggccctgcataagagcagggacccataaagtcttgctccataagacccataaagtccctgctcttaaggagccccattctaaggggtgtgtgtgtgtgtgtgtgtgtgtgtgtgtgtgtgtgtgtgtgtgtgtgtgtgttgagacaggaggtaaaacataaataataagtaggataattttaagtaatggtatatgctatgaggaaaacaggacacaaggctttggtagagggactgacaagggtcagttgagggtgctgatgttggctggttggggaaggttgtcctgtggcaagcaatgattgagctgagacttgcatgacaagaagggtctggccctgggtcacagcatcccatactgaagaaacagcaggtgcaaaggccctgaggtgggaatgagcctggaagcaggaaggcccatgtggctctagcagagtgagcaagagaaggatgggatgagcaggaccgatgaggcccttggagaccacggtggagtatttgggtgctctaccaggtgagaagggaggcagttgctgcattttaagtgaggtgtgatgtgatctgatttgtgtttctagaagttcactctggttactgtggttgatgggtggcagggggtgagggaactggcgtagaagtggttgattaggtgggaggccattggagagacccagaaatggagggggttcagaccactgcagtggggatagcagaagcagccaggtgggtggattcagagtagtgggggatcctcacaaggaaaccgaggctcagtgtttcccatcagcttgccctgcaggtcctgcccttccttcctggtgcagtctttccttcttcccaccctctgtgtggtagcccttyatctacttctctgtgatgttgattagaacctactgagagatagcaagctgcttgttctttagaaaagtagaattgatgaagaggaaatcttttcctaagaaccatcttctgttttatttttccagcatgccccattattggagttgatagcaatgtactgctgggtaagtttgggctaaacttgaggggctgctagttgggttcaactgagtcaggcaagagctgaccctccttccctgtaattggacccagtttgcagtatggmagcatgtggagtgttgctgatgctagggtttttggtgataggtgaaccacagaagaggggcctgtcatttttcaggcagagggttgcaatcaaatgaagtcagcagatcatcaaaactctattgctatattctaaaccagccctttaagttagtggagaagtgtttgcaagagacgctttctccatatttgttcattcattcattcattcattcaacaaacacacaagaagctcctggctcttattctttgctgtgtgtccttagacaagttacttgttcttcctgagcctcagttgctttagtcatgtaacagggatgctgatagcacatatgttttaggattaggattatgaagttataatgaaagaatggatgtaatactctttgcaaagggtctggtgcatcatcaagttgggagtcttagagaaggtggcagaggactgccttgagaggaggacctgcccatctcttggtcacagccttttatggtgctaccctttctgctctggcatgtttctagcagaagttcccagtaccaggggacttctgagagcctctgctaccgcttctataatgaggattgccccaactcaggattcacaagggctttctggcttgttcctggtgggtcttcaagttttctatgtaatttttgctttggtgcttttgggcactggtcttctctttctgggtgttactgcttgctctctgatgtttttaaagtctgcttgaatggagkctgccacacgtgactttctgtcataactacttcatcttagattccacttatggctctttgctcctaatgagcaaatgaatatggctgcttaagagtggagctcatttggtttcctctggaggaccaacaaccctgtttttgcaggttccttgaacccctgatttgatgggtcttgatatgtcctacaagtcatccctttctaaatgttcaattcattttgggggaagtttgcgtacccaaccccctcttggagattcacattcattattagcgtagtgaaggctctgagaagtaccttcggaaagaaacatgtttagctttgtttaacctaacattcctgtatacaccatgcaaaaatgctgctcttcatcttactttgttgagtggactgtaggaaacaaagttggaaacctacggttcgaaaccccgagtccaggccctgagctcagaacttcaaattgctgacaaaatgctggcctgatttcaaatactttttgattcacatctcatgggctggattggattttttatttaagatgtaatttcggattttttttttttttgagacactcctcaaccttccccttccctaggcaaaaccaggatgctcttgaagattcatgctgggcttctacatttatatgctcaaatcacagagcatgtgattggcttataactccatgttattgcattttcctttggtggaatttggcatctgatttgcaacactcccagatgatcatggttggagttgtaagattaaaatacttcccctccaatgagaacattagtcttacaccagctttgaataatagcacgatgggccggattcatctctctgatttggctatagtggaaatgccccaggatgaggagtgtgtgtactgacagaatagaagaggaactgctgtcaaatccaccccaatcctctgcacttaaaagcaaaaaaggctgaggctgtgtagaaattcatgtgtggcagatagcggtggaaagaaggggagctgcagtgaattgtgaggcatgactctgccttcagctcacccacaaggggtctttcatatggctgagtcatgtctaggtggcagtcagtgctgtggaagagatggcgagtttgagctgagctttgcaggacactaagatggtgtgaaacctcttggatgtggcagtcctgggcatggccccttgaagtaggttgtcattctcagacaagatggccactggcaaatatagactggggaagcaggctctcagggtcacatgggatcctagacaggaagcattggggaaaggacccagtttttaggctctagtgtctggcttgtttatgctgctgcttggcagtgcttgttttctgctggagacttgaattcatcctcctgtgtttagctcctactcctgggactgtattcctttcatcttatcttattcctgatgttgataataattctaatatctaacatttattaagatttcctatatgcaaggtactgtgctaagttctttatatgcatggcttcactaaatccttgcagcagcactctgagctacttttacaatcccattttatagatgagaaaacagaggcaccgatggcttaggtaatgtgtgctcctyggatctgaacctaggcagtctgattctagagccaggttctggaccattatgccatggtctctgtgacagctccccatggctgtggtctctgctgccacacgctgggacaggagcgggttggtgaaggaaagggggaaaattcctatgatcaaagggacaactggctcaagccacaaacagacaaaagcacagggatggaaataaatctccgttctgaagttccagagcagaaaggcacgactttccaatttcttgggccttagcagggcctcctacttatctagtcaccaactgggaggctcagtggtgggtgtacctcatggctttttttccaaaaaatcttgagacgtagataacatcatttctattttgtaatcaacaatcacttactgagcatcactgtgtgctggagacttactacacactcacaatgttatccgtaattctcttaacaattcctcaatattggctaatattattaccactcacagatgggaaaactgagccttctagagatcaaggaacgtatcaggcttatgtaggaaggttgagctggtcacgaaaccaggaggttttcatgaatgggagatgttgtttcttgagtagtctctggctttaggctgtgaagagaagctgcccaaaaagatccacccaatagaggaaaagctgccctactgaggtccaagaaatttttttttttttttttttttttttgagatgaaggatggagtctcactctgtcgcccaggctggagtgcagtggcgcgatcttggctcacttcaacctccgcctcccaggttgaagcgattctcctgcctcagccttccgagtagctgggactacaggcacccaccaccatgcctggctaatttttgtatttttagtaaagacagggtttcaccatactggccaggttgatcttgaactcctgaccttgtgatctgcctgcctcggcctcccaaagtgctgggattacaggtgtgagccactgcacccggcccaagaaattttaaagtcatggcctttctgctctggaacttcagaatgcagatccatttcttttatttatttatttactttaagttctgggatacatgtgcagaacgtggtttgttacataggtatacatgtgccttggtggttttctggagctatcaacccctcatctaggttttaggccccagatacgttaggtatttgtcctaatactctccctccccttgccccccaccccccgaaaggccccggtatgtgatgtcccctctctgtgtccatgtgttctcattgttcaactcccacctgtgagtgagaacatgcggtgtttggtttcctgttcctgttttagtttgctgacaatgatggtttccagcttcatccatgtccctgcaaaggacatgaactcrttcttttttatggctgcacaatrttccatggcatatatgtaccacattttctttatccagtctatcattgatggacatttggattggttccaagtctttgctattgtaaatagtgcagaatgcagatctatttctaaccctgtgcttttctctgttgtggcttgagccagttcttccctgtgttagcagcattctcagcttctatggcagtgttattgttggtttctaaacaggcagctgccaggtaccagagatgttccttgtgaggccacaatgagtagaaaagtgacccagagggcagcacctggtgtctcctcatttctgtatgcctattgcctggcactaagctggcagcacagcagtacgagtaactgttggatgaaatggtggcctttgcctgataccaggatgcctgggtgacttaaacacgaggatacaatttggagtgatttcccctgccccgaagaaagttttttttccttttttctttctgttttcatttactcattaattctgattgggccaataaaacagcatcccacattcttcattttagaatttaaaaatcaaaatttgagtcaatgctaaatgaatcataggtactcttcctttctatgagagatgagcttttcattactgattttgtccatctgaatctcctgtaatgggtaggctttctttgttccttgggctctgcttggctgtggatgccaagtgagattgtcttgcttctggaggggagtgactggctcagaggtccccgtccgcacctctgtggtgtggtgtagactgtgccagccaacttggcctggtccatccaatctgctgccccagcacttcgctgctggccttcccagggtacagattccagggtgaaagggtgaagtgaaattgtgttgaatgattaaatgaatatgcatcagaaaaatgcctggcaagtgctttgaagcatagggattatcaacggactctgtgcatagccatatgaaaaccaaatccatagggaggttttagatctgctttaggaaatgcagagaaatggctcagcaggaagagcccctgcagccaggagtttgctcctttgagcaaatcaatcggctttttaaaacccaggctttaattggttatgccctgggagatggtttttgatacatgccccatctggcaggactaattgttctttgctttcagtgactagrttggtgctctgaacccgggaagaaagtctgraaggtgttcatgcctgtcaatgtcactgctcatggctcttggatgatagtatatcttttttgacacctgtttcttgcaaatgattcayaggacatgtcttataagtgagcagctgccacagagctcctggaatggcagagagttgaggtgcccttgyatgtccagggcatgtgatgaagagmcacctcatgttgcttgtctggcttctgactccctagtgacaacgaccccacctggaccagggagagaagtgatttggactagagatgaccacctctctctggacacttgctagacctagatctggcctctgtggctgtctcactctgcttcagtgcacaccctgcctctgtcaccttgccacccacacctccactatcttccagagcccacctttgggtactggactttcaggtctgggagtgtggctatgccagaataatagtgcatttaggttgcattatccagttctagatgtgccagasaaacctctgacaatccgcgttggagtttcattagggagacccaggcccagccctgcatgatttggagagaacacaagtcaaatgcagcacagggcttcttggttrcatctgccaggacagaccttctgagcacacmttctggaccttctgggctgtctctgacgcacaagtcagagatggtcccayggaagacttgcatttccttgtaactctggtcacmccattggccatttgaaaacaatagtacctgtccctataggcccctggactgggctgagtgctctatcactgagcctccattcatttcttatgtgtttaatatttatcatatttggcatgtattatatactgttattatacatgtgagacactgcatacacattacatagatatcttatttaattcctaacagccttaggaggtaaggcattttcttagtctattttgtgcactgtaacagaatacttgacactggagaatttataatgcacagagatttattggctcatagttctgaaggctgggaagtccaagatggaggggccaacatctggtaagggcctttttgctgtattatcccatggtggaaggwgtgtgtgtgtgtgtgtgtgtgtgtgtgtgttagagagagagagagagagagagagagagaatgagtgaaggagaagaggccaaacttgcccttttataagaaacccactcccatgataatggacctgctcctgcaacaatgaaacttctcccatgataaaggcattaatgcattcatgaagtgaatgaccccaggatgcaaacacctatcattaggcaccatgttccaacactgtcacattggagatgaagtttccaacgcaggctttttgggggacacattcaaaccatggcagccatgttgtgaggcagtatagagtagtggtcagacccctgaggctagagccagactctaagtgtttaaatcccagctctgaccaccgttggctctgtgaccttcagcagattgtttaatataaactttctgtgtctcagtttcctatttgtaaaacaggataacattaatacctaccttattgggtygctacaaggaataagagttaacacatatgctcgttgaccaggaccttgcacttggtaaacacctacataaatgtttgctattattaatatcatcatcatctgatagatgggaagtctaagcacagagaaattaagaacattcctaaggtcacaggtgttttcatggcagagctggcattaaaaccaggcccaactcccaagctctgcctgccaaactgggtggaactgattctatcttctctctagggagcgacctgccaaggagattccatcttcatgtggactggcatggacagtggtgggcacaggtgggcattttcctccttgtgaaaggcccttgcctcactgctcctgctcacactattatctcagggaggttcagctcagatgcataggtttcaatgtaatgtgtactagtcctctcctagcaccgtatccttgagacctgcccamgtcaaaggatggaacttcagggatcccacatctctcagctatcagtttgctaacagcaagctatttccacccatgtgtgagtgcctgctcatttcactgtcrtaataatgctcccccattcatactcctgtggggatggaataagataaactccatmaagcttttcattcagggctgggcatgtaggaagtactcaaaaaatgttagctactgatggtattattattaccaagtcactttctttccatgtttggggcacacttcactgtgcctggatcatactccacagcagtgggctctaatgttgctccttaatttctatggctgactaagcccttctttttattcttcattccatcactaaaggccacgtgggtcaagggcaaggtcatgtttgggccttggggtctacagtagagctttccttgtgaagaacaaagaggttaaagctcttggcttttcaggtgggccatctttggaccttactcatccttctggtaagcatggccttttaggaatccatgtggtgagttgggtccatagttatcacccacttggaagtggccctctcactcttacagggcccaggagaaaagaagcttggatcagatagaccagactggctcccccatgtactttgctgccaagggccaggagttcacacaaggatttggaaccaaatacagaaatttccaacagttaaagagcacttatgtgccaagtattgttcacttgactctccaaacaaccctatgtggcaggaaggatgatggcccccaaagaggtccmcatcctaatctccataatctgaatacagtttattccatggcaagagggaatttggtttgctaatcagctgaccttgagttgggaargttatcctggatcgtccacaagagtcttaacaagcaaaagaggcaggctggagagtcacagtgattcaatgcgagaaggattcgatccacctgggctgactgtgaagacagacgaagaggaccccgagtcaaggaatgcgggaagcttatagaagctgaaaaaggaaagaaaatggattctccgcgagagcctgcaggaggagtacagccctgctgaccctttgattttagcccagtgaaacccattgcagatttttaacctgagaactgaaaaataataaatttgtgtcatttacatcactaagtttgtagtaatttgttaccacaacaataggaaagtaatatactctataaaataggcacagctattatcccctgaagtttagggagaataaatagcttgcacaatgtcatagatagtaaggcttggacctaggacccatacccagctgttcatttatggagcttgggcttataaccacctttgtcctgctccctcactcaagccattattttcatcaccttattcactgtgcacttttcctgcaggaatttgcactaggggcaggcagtgttcaagaagtcaggattcagctcttggttgtctctgtctttccatcagaaaagtgagctcaggtgcagtagaaaggaggacagagtcccagcttgcaggaggtgctgtgtggactggctagctctggtcatacctggagctcttgcatggcactgcctcagatattgtggatggagtttctgagcaatgcttggggctgccactgttcttattagaagccaacgtatggaaaccttcaagctcagctgctgaggaaaacctgtgcagggactcgaatgagaggagagaaaaataattttgatttataaaacagctgaaaggatgcacagatgaatgagtattttcagtgggtctcaaaacttacatattcactggatatattttatttgtactagcatttcctaatactaaataatgttgatgcaatataaaactattttttattttattttttacattttttatttccatagttttttggggaacaggtggtatttggttacatgagtaagttctttaatagtgatttgcgaggttttggtgcacccattacccaagcaggatatactgaacccaatttgtagtctttcatccttcaccccttcctaccctttctccctgagcccccaaagtccaytgtgtcrttcttatgccttgatgcaacataaaatgatttttataataatatcatgaagacaacctttcacagaaaaagggaagtggaatggttaaataaagggggaggggagatgagtggggaagattcagagcattaattgagtagcttatggatgcaaaggaaagaaggctgaagaagaatgagcaaaggcccagagtttgggggcatatttacttattggaggatgatgggtggtcattcctggagaggactgtggtggctggggaaaccacagtgaggggccttggccatcataccaggtcaagtggtgagggagatggcaggaacatttattccttccctcacatacacagctcttatccatctccctttacatttgggctttggctgcttttagcacatgggggtcttggctgtgctgggggaggagccgtcagcttggacaaagccatcccgggactggtctttttcactaagatttaccttggctttgagggtcctggtagcagagcacagctcagctgcctgaagccaaaccccatgctagaagtcagagaaaaggcagggactgccgttggctgtcagacatatcttcatggagggagtggagatttattgagtgttaaatgtcagtatggatgtaataaagatagtacactgtaagtaatcagcactttccaggtgaggaaccatttttaataagttgtcaacctgtctagtactatgaattattttttargtagaagaagatgaagaaaacccatttggagtgatttaactttcagatctactcctcatctctgccccttcttgacaggggtgcaagtgtcctggggtgcccaaagaccttggggcttacacacccttcrtttcacagaaacccaatattccttttgttttatttcctaagatggggatagtcctgatgcagcatgggcttctgactttcagagcacattgtgacaggcagagaagtttgaggaaatgaatacagggaagaaggyaagtagggcgggaggtacaaggacctgggatggtgccaagcctctgacaagggtggcccaggtgccagcaggcctactcgctcctcaaagatatatgcataatttcagataatctcacagcttccagcatgctgagtccttcttgtagattcccacgcactcccagggactcaaggtggcctctgcctcctggstgtccatctccccaccaaccatctctgtgatgctctcactgtgctgatagtctgcagattccaccaagagaattcactcatgtgcaaggttcaggatcacaataggcctccctagagaagattacatagggcagcaacttttactggctccagaagcctccaagttctgaaagcatctgctggcccctttaccacacaaggtttccctgccccacagttcatcctaggctcatgtcagcttgctggyctgccacttgtggtcctcccttctctttgtcagaagcaagccccctgttcttcatgctggcccatgaaggtcaactcctcccctcttttgctgtctggtccacagttggtatacagttggtgccctggtcctgggtatgtgtatgtgtgtgtttgtatgcccacctgccagccagcactcaygaaattggtcttgcaaagacttctccctaaaaggaattgtgtctggccattgtgatattatgaaatgcatagttggtcttcatccccatttctggcaaaaagttcttggaggtggascacccttctgccatgccttacaccatgcatttcttccatctggctgtttatctatatcctttataatacactggtaaacataagtaatgtgtttccctgagttctgtgagccaccctagcagattaatcacaccgaggagggggtcataggaatctctgatttatagtgggtcatcaaaaggataggtaaccacctgctacttgcaagcrgcatctgaagtggaggcagtcttgtgggacttagccctcaaccaatggtagatggggtcggaatggaattgaattagagaacacgcaggtggtgtctgctggagaactgattgtcaaaatgttgtgttgggtggtttgtgagaacaggaggaaacccttttttcccctttagccattaacctaataaacatgttgtccctacattgtcttctgacaggttctcctccagattggcatgatgatcacatgtcaccgatggcttggaaatgttgagtgacttgcccaaggtctcatagagccctgactctagaatcagagctgggattaatcatgggcatggcagatgctgaagctcatgtcgcggctgcctggccctggctgctcccagctacaggccctggggcctcttcttttagtctcagtgcacygatttgtgggctccactccttggggacctggaagagctgttcagtttctcctcacytgctttggacctttggcagggctgctaaggtccccccataacttgggttctgtccttctagtccctgggactcttgtttttgtaacccatgtgactttctgcacgctccatctagtgtccattccatcatttgaaggcagcagagagacccctgggggctttattaacatttcacttgggtattttttyttttttttttttttttgagatggagttttgctctttttgcccaggctggagtgcaatggcgtgatctcggctcaccacaacctccgcctcctgggttcaagcaattctcctgcctcagcctcctaagtagctrggattacaggagtgtgctaccatacttggctaattttgtatttttagtagaggtgggggtttctccatgttggtcaggctggtctcaaactcccgacctcaggtgatccgcccacctcggcctcccagactgctgggattacaggtgtgagccaccatgcctggcctcacctggctatttttgaaatgaagcaaattgctcagaactagcttaggtctctggtggtcagcagtaggcttgttgcattttgcaagagctctgccttacaaacaggttcggatgagcagcctgactccagcactcagcagctaggcgaattttgataatcctttctttttaattgctcagagcttctgtttccttatttgtaaaatgcaggtaataacagtaatctcactgagctcttgacaaggtgaatgagaaatgcatggaaagtcccccgcacagagtaggtgctgtgtccttccggggagggggttacacattggacccccatgtcccacgatggaactttgctcggggccttcatttcagtctgcatctgcccacacacagctcacggcttctcttttacagctgcattaatcatccatccaaaaacacacggaaaggagcctaaataccaactcgcccacggatattgagctcattatttattgaagtaacgtctgtgcatcctgaaagcacacctcccatcacagcccccatcacctgccctcccacagctcattagcgtcaccamgggctgcctttagagccttctgccattcagggtcttgcctcaatcggaagagaaagagtgtgtggatttcagaatggtcttatgaagttggcgtgctgacctttcctgaaccctcctcaggccttagctcccagaagctctgtgtggatggccaggagcaggctgggccagggtagggggcacattttcagatccatctgccattggctcctccagaatgaatggcctttaccctcagaataatgtccagtggacatcctttcctcttcgaccaagacgtttcaagtgtctgtggcagcarttggttgtatagagctgaccgcatagttccccatgtgatgaggagacttcagagctgcacagtctgatgaaagctgtgctatgactgaggacagagtcatagcatagactcatgggagaccagaggagggcttcttacagccgggggaatcaggggaagctgcccagaagggagccctagagctgaattttagcaggctaagagtagrgctggcaaaggaggacagtctaggcaaagggagcagcaggcatagaggcaagaggcaagacagtccctctcttaggcacagcagtgggcatcagattggaccaaggggaaggtgctcaggatttcagactggcaaacccatagcttcttatggtttaaaggggagaatcctgagcaaatggagtgaatctgagcaaaggctgaacttcgcagattttaatgtccatatgaatcagttggggatttgttcaaatgcagattatgatgaggtaggtctgggctggggtccaagagcctgcatttctgacatgctcctcagcgatgcccatgctgctgggccatggaacacactttgtagagcaagsgatagctttgtagcaggcaggacaagccctgtgcatctgaccttggagggtttatttcygttttccctgtgcctggaagtttggctttagctaatttcataagattgctgaagaactgatgtacmagcccatcaccttagtgtgcctgggatactgatttgcttttttcttcttcttaacacgtttgcaatcagtagccatgtttctgatttcccaccggcacagggcaggggcctccaagaggaagacagactatcctgtgtatgggaatccaagctggtgtgactgtcctcatggcttctgtgtaaccataaagggctgggtcttgctcctgggagaggatggcctccctctctcagtgagcccaggatgccacccctcattctctctgcctctgtacattttccctcattgcagaacagtccaagctgacccatctgcccagaggcctcattcccttgccttctggctccaggggtctgtgggccagggtggagrgctttcataaatggggccttgggatcagtgtgaagagcacagctctagggcagagccaaatgcacagtgacggcgtgcccactgcacggggctggcacagctgggggaggrtggcaggcccctccgactgcacatgggcttcccagcagacaggctggagctgaatgttctttctcaccctgagtactccacaccaaaggccccagtggaactagctccatgcagtccaggagctgcatgttaagctcctgctatgggcctcagccctggkagacaaggatcctgctcaggaggcccgtagcccagtagggaaacagacaaggatgacggcaatcatrattcagtgtggctagaggggagcaaagagggatgtagggacttagacagggatgattaattctgtggaatggggtaggtaattcaaagaaatgtatttaagctrtgctttgaaggatctgccattcaacaatactatggggcctgacactgagctatgctctggggatacaactgtgataattcaaacaaggtctgtgcctcctgaagggcctgttagggtaggaggggtgatgacatcctcagaggtgcagcaggtgctgtcgtgctatctgtgctttgcccgtttccccccattctactccttcagtgcacactgatccaaattccaaccaccagcacctgagtttctttgcctgggtgctttctctttccattggtgtctactacactagggcaggccagagtgctgggaaactcacagtcctgccctccacacagcatgagctgatgactgccgggagatagtgtataaataccctagttcccttgtcccttgggaaagtcagctctgaggcatgtgctctacactgagtgtcaccatcaggatttggtcctaatctcccagcatgctggctgcataaagcacctttactcgctgccttcccttcttgtctcatgtttcccccttaccaggttttcttcatctccttcttgagctcaaatgcttgcccaagagtcagcttctggggggatcctaagctaagaccagcgaggagggattcaygctttagggagcacagggcatgtagaggtgtagctgtagccagggcaaggggtagcacagactgccttctcatgggaatttgcagatgaattgcctagtggagtgcagggggctgtttgggtggctcagctgctctctcagtcctgagcttactcaccagctatgcacagccacccagacccatagaaacctcctgccaggattccattggagtttccctctggaagcagtttgagcaaattccattagattggaaagtcggtgctgaggaacttggagaagatgatggaagacagcatttcctatggcacatcagtcctgggatgtgtccacaaagaagggctccccagtcacatgaggttgcccagggctgtaggtacatttcactcttggaggttcccaagaaaggcctgagaagtcctgagtcaggaatcattttcccctaaccaggattaagcagtaattcccttagccatttcaccacagaaccttctatcacatagcacttaataactctgcacggaactagggttctgtagagcacgctgtgagaagtgctgatacagggatgaagggactcatctggagagtcagggaagactctggaggctgaagccagcctctcaatgtcacttctctgctctcagtgatccccagtaggaaggtgccactgcattacagaatcagatctcaaaaccagtactgggaccaggtggtgaccagagactgctcagagcctctttctaccagacactagaagcagagtgtctgatacgttcacaacgtgcttcatggaccactgcagctcagaaggcagtgtgagagataagagaaaccactacctggaaccaattcagaccattaggccagaggaagatggacagataactgagaatgaatagatttcaccattatccaagggacagagtagaactcagaatgagatgccccaaaagaacaaataacagagactgagggtcagttattgggatatgactgaggttggggcgaggggggcgagagagagagaaagagagagagagaggaaggaaggaagaaagaaagaaataaagaaagattgaccccttcttttagtttattttgtggctaccacccatggcttgttctgggagatgatgtttcagataggaggttattgaataaaaggaagttgaagctcaaggtagggaaggtgacaaatagcagtattttctgcctcctgtaccccctccccgctccaagatctacaaactctcccatctctcttctctagcctcctggtggggcttggggtagcagccttgctcctctctcctcatcttctctatcactcctggacccgggaggtagagcatctaggtaacttacctctccacagtgcaatttgagtttagggacattgatgagagcatagctattttaaatgagctcatgtttctggcctggattttactagatgaggcttccagaagatgaatttgcagaagaaaacattggtccacaagcttcagagtgtgggatagagaaggactggggccagaggctacagatgaatcaatgacgtgacttccacatggggcacaggtcagctttgcaaactgtaggttagtgagtttaatgtcatccctcagtaaaccacggaaataaatcattatttttagattattttttgaattgtatcaaagtaatcctttacatagttaaaaaaacctcaaatagtatctatcataaaataaaatagttccctgcttcaccacagtcatcttcccagacctgggaagcactattgaaccccttagctatttcaactcatatttgctaccatatttctaaataatttgctggcaccactgttttctgattcaatagtattagacattatgtattgatttcttattatagtcgataaggatttggctgccttatattttctatctycttaaaacacatacctcctcttcctcaatcctsaaactttgggttaaaaygktagacagtattaacattatgtactgtgaaaatattgttccctgttaaggagacttccatgatgtaaactttatttttcctagttgaatcggtgtccaattaggaaaacattaatcagtaagcattttaggcagaatttaaggaatgggttatacaagtaatggaagaattgggaagccaaacagaggcagtcaaggcaaccagaaattaggcacagcaggaagctgccaccaccaggcctagggctagagagccaagggcatggacagtttttcsagagcccaagacgcagggccattggcagaaggtggaaccagggcagtcctttctgagaggagtcagccctgaggaggtgccacctccgcgggagatgccgagatgccgcaagagacagacagccaggggcagaaacacctaggcttctcccctccccygcccccatctctcttcagtgcctcctgttggccaaattcacatagaagccaattgagaaacgcggcttgcaggagtcagcctgctctgctcgcttcaactcccatgaaacagaacgggccagagaagagcaaggaatggaaatgaggtcaaacaggccaaccccagacacagtcatattaatatttgcccttttataaagaaaattaaataagcatttagcattgatttttttgtatgtgctctatcaaatctgttttatgaatgtgatccattcatttcatttggtttccaggagtgctccatccttctgctgcatctgggctgtttgctcaggcckgcctcggtgctgccgtttggggcatgaggacggcttcatctcagggagtcccttatcctgctcctgggctgaacccctgcgttaattccttatcttcctttttcttggtttactccctttttataggaacatgtcttccagtagcttcccaagaaagaggccatgggaaataaatattttgcctttgcatgtctgaaaatgtctttattctaygctcacatttgattggcatgttagctagctttagaactctaggttgaaaacaagtttccctggaattttgaaggtgctgattcattgccttccagctcccagtgttgcttctgtggtctgatactatccaggttttgctcctttctatgtgacctgttttgttttcttttctctttgtatgttcttagaatcttccttatatcctcaaattatctttgcaaatctagacaaacaaccccaaatatagatttgttttgctgagagcataaagcccctccctccacagtcaggaaaatattatgacccagtggatttgaagcttttgatcttagataaagcctgatgtcccaaagggatcagttcctaattgtaggactttctggcaaaattagccatgggtgatcaaataaagcctctccttgatgctctgacttggtacatctggtactttgaataaacaagactcctggggtgtaattacagaagcatctgtatctttgttatcactatccttttaaatgtgctcagtaagagtaagtcttctgctatagggtgaaaattcagacaagaccatgactttctttgtcataagtcgtatataaatttataccaaaacacagtcttaagagggtccagtgctatttaatcagcaaaacttaaactcgctgttaattctrctagaggatctgtagtccaaggaggggaatrggttcctgcttgtctctcccagctcttcctccctatttgccagctgtgatctctcaccattctagaaagraggagggagaggaaaggtgtggagggcaggaggcttcccacttgactgatactgtcttgaagtggccttgtgcctgcaggcccaggcagatrtttaagatgactcttctmttgtgattgtgtgagttctctggagatgcccctgctgggccaggtgactgcagcttctttgatagagccagggcctcagcttcaactggctactcccaaccctcacatggttcctgcccctttggtccctcatagtggcttattgagggatcccatgccctggaaagatgccttcctgggcaggatgcctactaaaacaattgcaggctggcrttccctccatgggttctgggtttggccaccttcatcctgccattggaggaggtgttagtggcctctctagctttctccactatgagtcaggcacagatgcctgtgttctccaacttcagggaacccaaatctattctgtaggtggttccactgaagcctmtcccactaagtgtgsggtgggaggtcggtcatccagcctttccctcgggkatgggtggaccccaactcagaaatcctcttcatagaccctcttaatcttcaacaatgcagtcctttgtccctcaatctaagtgaatcactaattaattttcagtcaccttctttgaagtgtcatgcactgayttgtctgagaacttgcttgggcatctggtatccattgcatcttggtgccttagtgaaaattcccagcttaactttcttgttatgtgggcatctcccagaatctgtcttctccttgcacctgtcacatcatgcccaagttgctatgaaatagccatctcaaatatctaaatgcctgtgagcaatcgstcctgaaaagagacagtgggggctggaaatttgattccttcagaaaaagagtttcctgagaacaggacattccaattagtgagctgatagctcatccttgtcaccggagctgtccatagcagaacaagagtgctgggcaatgctttatgagncaataaagaaagcacctccagagtcctaggaaacacatttcatttgcttatttattgcctttaattttataggctataggagaaatttctsccttctgaatgtgtccaactanctctgttcacctgagaaatcanattccccagctctgggtatccctgaataaccacaggagaacagttccaggccctgataagtcagctattgcaaggtaagagtctggaatccygggagacatgatgangaggggtcmcttctctatgctgttattaatgtttggatgtctcccaatttcactgctactcataagaaccttatcagctggtacagggaaagactgaactaattgatttctgatttccagggggacctggctggaagatatgaaggaaaaatatcattcttgaactartaagttgagagatcacagccttcaggggaccagaagggaaggctgaacagrgaagggcaatttcacgttcgccatgtccatatttctatcgtcatgagccatctcaccttacaggcagggaagttttgagcttagagaatgggatgygtcmagaaaaccgtggctcccccagctctgttcctggattcagtgcctgttgtttcatcctgtgtagactggagtcagggtctacacagttggaattctatggaaccaagatgctgtgtggcagatggatgtggactccaactgtgacaatccagaaggccttggggacttgtttcatgaacagctccctgtaggatctctgttggggtgggggattctaggggcatctccgcagttttcttctgaaaacaaaacgaatacmagttgggcaggtgcaacaactgtgcatgcagtcccctcccagggctggctagcagtattgttgggtaccgtaagcacttagcattgttaagtgagcataagtaacaagatgcaacagcctctggccaagttttgaagattttgttttaaagtatgcttttagatgttgrcattcatgattattaaaaggaacaaaactcaatttggggtctcaagagccacaattctagacttctaggatgtcaggagccatgctcttaagcttctcaccctgctgttttaatgagattaatgattattttccactgagcacctacctgtgatgttcataaaaaagtgaaataaatgactcacatggagatttggaaggatatcactgtggaaagtagatgttaacagcctctagaaatatgataattatcagctatttgagatgcagtcactgtaatgtgataacaagatgtgttgtgcaggtagaaagcatggagagaaatggcacraagtagagttataagaaaaaagaaagaagagatcttgtttggttattcactttattgtgataaaattgaaatgggagaaagttgaaatctacatactgaaatttacatggtattcagtagtccctctctgttcatttgtggaatgagcacgatattttcccctaaaagatgcctaccctgtgctaggcaggaggcctgggtgtgtcaggaggctgtcagactcagggacattttgctcatctacgtgcccatttttatattgacattcccactctggggaaaggcaggtcagggcattttagacagctgtggagtcaacactgtctctcatgtcctctagtatgttttctagaatagattaaatgtatacatatatgttatctcatctatggtgaatttgaggygtccctgtttgcactgcagcaactcttcccatggttaggagcctctgcaktcctaaagcattgttgatacagtgaggaataaatccttggccttcagatttcttgatctccaatgattgttgaatgaatgaatccacctttacttaactttaaagcccagtgtttctacttccaaaatatactttaaatacttccctccatatccaatactactagcatcatccaagccacttctttcctggactactcaatagttacgcactggcctccttccattcattcttttgaactttcaattatgktaatcggattctgttcctcctttgctgaaaacccttccaagttttcccattgctattagaacaagagccacactcctcacaaaggctcacaggtcctgtacgatctttccccagccttataccttacctatctttaccactctcagccaatcacactcgtgccattttggttmtttgagccccctgagttctttctggccgcaagtcttttatacttgctgtctccttagttctgtggctggctcattttcatctttggataccacttcaaatgggtccttcctatgacctgtgttgaccactctatctaaagcagcagctctcctccaagtttctcttactatttcacaatctgtgatgacctgggttcttggtttattttacttaatgtcttggtttgttttattaacatcggttttgttgttttttgttttgttttgagatggagtcttactctgtcgcccaggctggagtgcagtgtcggatctgggctcactacaacctctacctcccaggttcaagccattctcctgccccagcctcccaagtagctgggattacaggcatgcaccaatatacccagctaatttttgtatttttagtagagackgagtatcaccatgttggccaggctgatcttgaactcctgacctcaagtaatcttcccacttcggcctcacaaagtgctgggattacagacatgagccactgcacctggccttggtctattttattaaagtctcaatgtctsccaggtgcctgacaggcaataggtgttcagttagcttaacaaacttgctggcttagaagtgaacttgcttctctctcccccwgtgtgcatacacactttggctttgcaaaaaagacagccctgctgctgccctcaagcctaccttctgagaaggcactcaggatgctgaaagtgaagctcacatatttcactctgcaccgtctgcacactctgccatctttaggcccaaaacgagccttctggaatcctcaggctttctaaatgctaaatatacagcattaatcggatcttgcatctctattgaataactaagacacctttatgttgaaatgcagattctccattgaaaggcaaatctttcatttcgaatgtttgaatgagactgggtttgtatttataaaataagttgtatagaagagcatattctgggcctggagtgctttcatttgattgctcartaaatacattttcactcatccaaagctcttgccttgaagtattttgcactgaagaagtcaaataagtgacagtagccctattgaattctatttaattttacttaataatgtgctgtttagttccggggtatttctgggcctgtatgtaccagggatgggttgagagtgccttgtttagagggaggtgggtttggggctgtagtaagagcagtaagtgggatagggcagagtgaggtgggtgctgtggatggcacccctgcctcctgcttgctgtagaatcttttttatttatttatttttttgagacagggtctcactctttcatccaggctggagtgccatggcwtgatcatggctcactgcaacctcaaccttctcagctcaggtgatcttctcacctcagcctcctgagtagctgggactacaggtgggagccactgcacccggcccatatayagtctttctaagacatttctttgagtttctatttccttgtatacaaaatgaggatggtaatacctatcccatggtttattctgaaaatgaaataatataatgaagatagaaatactgaacatactgtctggcatttagtttgtgtttttataaacatagcatagctgatttcaaggtaggtagacattgtaatcattagttttrttactctaactagactcaatgtataagagtctgtatctttgtttcactctgcacattcagaaggggctcaataagcacttaacttgtcatttgttaccgatttcttattacagaatgaataatcatcatcagttgcacagcccagaaagaactaccaacattttagtgtattctstgcctccctctctctctgaatatacccatcttgaattgactttgatttactgggggcagaaaagggaagctctgagaaatacatgaagtcagtgagagagtgaggaaatgactgtccctgcggtacccctgtccccgtgtgacccctcttacccttccagccccagacctgtcctgagcaagggaacctgatagccaggcattggcaccaggccctgcaaatccctctttctgctccagccaggcagtgcagaacagtgggagacatggcccccatccaggtagtggagcccctgtcctgtcatgggaattggttgctatcagctgtgcctagtgtgagatagatcatttgatctttcctggctgcacactctgcacactccaragaaacctacttatcttgcaagcaatccctaaataaaacccaaattgtttcctgcaagtggctttctgctgagcctsrtcttgctgtcctccttgactcagccatgtccccatcactctctgaccagctcttcgccaggcccttcatggcccccagacaactgtgctgctgatggggagggccaggctgcaaagctgtttgatttgtcaaacagacatccagtcaggtcctgggcagggcaggagccaaggggactgacttatggccccactggtcaggagatgatatcagaaaagtactacagaatttctatcctgcctaccttattttcttgctgagtacccccaggcaggtaacaaaatttatctgagcctcagtttccttgcttagtttgcttctacaagggttcttatttttactttgtgtgccaagtcctgtgctatggactttatatacatcacctctattaggctaaaaatttcatggtggagctggtgcatgccaaaaagcacaaggaaagggggaagcattgaaagagacctggggaatcacagcaagaagaatcttgcctgcaatttgcattgccaccagcaccatgattagcagccagtccccacctacctatcatgatgccayggagatggaagtcccagaacaatactatgtcagggctggaccagtcctacatgactcactgctttataggtaacaaattgagtcctaaagtggggcatgacttatcgagtgggtttatttgttctttcatttatttaccaaacttctcttgtgcatctattaggtgctgagcccgacgccatgttstgaatgcacagtcctgcccttggggaactgctgcaaccatgagagaggtagaaagccaaccagaaggacggatggacaggcrgaagccagggtagacctcttaaaaaaggagtggaatggaagcaagtgggggaaatgagaggctaggatgagagtgacccagaaaaggttttcttagatgagggagactgaagcacaaggatgatggaagaaaatggtcctgaggaaaggcagggaaggaagatacaggagaaagagggatattgatgtgcccgggcccctgagtatgaatggggagaaatcaagaagccatttggcaggacgtttgattctcaggcaaaggtttttaggagggggacctggagggggaaaacatcccactgagcacagtagtgtcctggggccacagatggtcagaggctaagaatgcagcatggagacaccatggtacctgacttcctggcagtccttcctgttctgtagtctggggagatgctgcccagcacagggctcacaggggcaggaagaagctctctggaaggaaggggtctgagaatttgccaagggacccagctagtggagcctgaaaggggtctttcagtcaatcccctgtctctgccaatatctcagctagcttagtagtagacaggaatcatatacagatcaaaagatcaaaattagctagcgattagtcatcctatcactatccccaagcctctagcataggaataatggggtctacagcatgctcacttgcctagccgactgcgtggaggatagcgccttcctcacacactgatgacagagggaaagtgagataaatggagaaggatagggggcttcttcttgtcttctaagatggaaattcccatccatagatcaagatatgaatgtagggcatgaccgtacaatttcctccatgcctgcacaggactatgtagagacagaatgtggatgtcccttggtgcctgggtcttaaccttagggcctgaggactgaagacctggccttgaacctggtggtacagggtctctgcccttagtgacacaatgaaagtaacagctgtggtcaagcatggatgggggctggctgtgagacttctcaaggcagggaaacatcttggtcacagcttcaaaaccatcctcatccaagtgtccctgtcaattggcaaaagtaacctgagaggcagaagcagattggagggacagtctttctctaaaggttcctatgggaagcagttacaaaggcaagcaaacaggacttcgattcattcaaagaacaaaatcctcttggagaccagtgatgttttggaaagcttgtgactagggaccctgttctgggggcctgatggaatgactatgtccttaaatatgctcttctccaatggagctgagtggaagacaggctgagggggtccttggaaaaggccccatgtctaactgccacctgagcccctaaatacctttggaaaagtctgcaagaggaagctgaaaacacctaagggagcctatactcattccccaacaaccaactcacagtccaccttttagcaaatctgcttaacaccgtccatgtagccagccctgagaccctcagctgacaagggcatggatgatccttgctttcagagagctcacagcctatgtgagcagccctaaatggccctcatggatcaaactgaaaacaagtcagaggttgatcaccaagatgcagatccagtgaggtttagagaagaagtgaattaggggtcaggggaccagggattgctctctagaggacaggggcttctgttgagccctgcagcagcctgtctctgccatggagatctgtactggaccctgtaaaagacatagccataacaacaaacttgacraggactgtctattgctgtgaagcttggaagtgcttataatgaggggcaggctttcagcgctgtctccatgcctttcatctgctccctctgtgaagtccctgggaacagtctggtaccatggtttggggccttcgttagttctgcactgtctgagacattcacagaggcaagaaagcagaygggcttctttatgtttatagcaactcagactgcttttcttggctaccgggatccaaaaaataatatcatcagagctggctgattcacagtgacgtggttaaagagtgctgtgtcctggtggcctcatctcaagaggcagtggttgtgcccaacacactgtccctaccaaaccctggcaaccgctgtatggccatctgtctataggactgtccatctgtccagccagccagccagccccatgtgcaatgatggtccaccagcaatactcattcacctatccatctcacactggagaacgaaggtcgctgaaggcagggagcctgttggactcctgtatccttctttcggtggtttataacattttctccagcaccagcacctgtagaatctgccacacccccttcagtgacagctgcttacaaagctggtcatccttgaagtggagtggtagaccagcattagcgagcatcctgtttgaaaaagcccccagacccgagaatcttaactacaagtgactcaggaaagtggggctcaatgaagagtccctgagatcctctgtcctgcaacctggcctggctttgactcccagcaacctccctgcagccccagcctcacctgcccttagagcaagggctggttggaagctttttttttttccatctgtttctccaagtgtatgctggggagcactgcttcagaaacacatgagaagtttgtggtatggagaaaagactcagaatcttaaaacaagacttggctgtttcttagagctgcatggcaggcaggaaggaggcgagcactcaccagtgggggcctggggaccgccacagcctgtgtccttgacagacttgtctttctacacctgagtatattcaggagccctcaacaacttgccttggggaggtgggtctttccatgctcaggcagggaagatgaaacattatgaygttcagatgaggaaaayagaccttgcagtcataagttattaaacttccaaaggctgtgggacagaggagaatgataacatattactacatctgaaagaaggcatggtattttaccagtacaacatttatgatatataaaaggattacagtatttttctcagaggataagacaggaaggcttgctttgttatttgagatttgagatgtttctagttgacctgaagttctgctgattagggaggggctaatttcttaagacttcttagtaattatcctgacccagaccttcttccctagaatctcttaggatggaacatctcggggtgatctgtagtcttaacaaacttaccaggtggattcttgtatacacactgaagtttggaaaccactatccttaatccagtggttctaaatcttggctgcatattggaatcacctggagagttgagaaaacaatgaaaggaaatactacaaaagagatgccccaaaccccacctccagagattttgactcaaccagggttgggcctgagcattcttaatttgatgtgattatctcattcccagttgacttaatgtgtagccagggttgagaacttgggttaaactgtgttctcagccatggtgcctgtctgtgccctgaatgtgcacaatgcatgagcgtgtgggcgtgtctcctgggctgattccaacccttggggacatttatggctgggacctgggcttgctctggcaaacagagtggttccctttaaatgcctgcatctggccatcagactggcatggcgcctgtgctgtgttcagaggatgttgctggaagctgggagaaaagcctctgccatatcacctctctcatctggctctgggtaagaaagggctctgtgaaggggcaggggtggcagctgcagcggaaccagtggcactgggaagatttctggccatggagccatgggtgacctaggttggggcagcagcacctgatgtagtagttgctatagagctatgagccctgatcctcagtgtggcttctgcgtgtcagtgtggagagacagcagaaccctcctgcctgccgtgggcacacgtagcatatgcagccggtgggcacacacggtgatgtctatcttctccccattaagggcctcctgcctcccgggccccaggttcggaagatgttctcctccgcacatactgcctgtgtgcagagatgagcagttcattttccatcttttattaatcaaagacacatgtagctgttaatcagggcttctgactcccagtaggtaagaagattttctactctgagccttctagaaattgcacataagccaagtaatgggtcctttcattgatctgcgtgtgtcctattgccaggccttttggaagcagtttgaagagctcaggaacaccctgcccaggtctcccttctgtcttgcttcccgctcattcctgccccaactttacctctctgtgtcatctttagcaagtcctccaacctctctgatagaaaaaatgccttggcctcatcctttcccctgagaaaggagacagatgaactcattagctttcatggttcaaagcaccttctttggccacagaccctttctttaaagggtttcttatgcaaaatcctaataggtaaacagactgaattagagctattctggcaaaggaggaaagaggggtctcagactcccctcacccctctctcagggtccactgtccccaagggggctccacagactcttttggaaacctcagttgtaaataagttattttcaatgggggatcatccctcctttcctgggtgtccgtatcaaaatcttgggaaagtcaagtggcacatgtactttgaaaaatcatatttcaaaatggccattgtttctrtttgttttcatttgtgatacctaatttattttcaaatttcaagtaacatgaaaggagggtagggatttcaatattcacgtaaaggtggcactggtttataaaggttgcagtccgttgatctacatcagtgttttgcaaaatgcagtcacaacccacccagcaggccatgaaatcaatttactaggtcatgaacagcattccttcttaatagaatattacagaataaaacagaatgtgtcagagttaatcacacatggtcatgctraagattgttttgtaacctcgtttcccttatatctgtttgcgtataatgggtgaaatgcaaaaaatacagttttgtaggttatgattgagaagagctgagaagcactggtctggatggatgcctcctgtggttcctttgggccctgactttggctcacatccacatctgggagaccttcctaccccctatgttgagcasagcactggtgagccatgcagtgaggccagggaagaaggcagaagtactcagcagtatgacagtgcaagcccctcccctagagatagctgagtaccctacataaatatcgtgcagtaattccacatcctcctggggcctggcagaggagaagaggttaatatggagccagctgaccttgcccaggtccatggtccaggagctaaccgtggtatgtcttatacaggtgggtgaagcaagtgtatgaagtggtctgggcactccatttctctacccctgatcagccccagcagcagagaagcttgtcacctccaggcctctctggttcccggaggccattctcaagacccttcctaagctgtgcttcctgacctcatggccaggtggctttggyttctgtggctactgagctgccatggatacggatcatgagccccaggatcagagggcagcgtgacaccgtccgtgcagcctggaggagcagcactcaagctttgagtaatccttggtgttttcctgcacagtgacagctccataaggtgggaatctctgcttcctagccctgggctacacagtgtgatggatgaccctgcccacccaactccccagtctcaggggaaatcaatctaaatacagaccctcccactgtggcattcagctcccggtgccaatgtggcctccttgacatcccttcctcccctgacctcagcaggaatggggctgaggatctgggaacagaccttcctcaggcatcccaaggcacctcgcccaggttaccagtgggatctgtattctctctgtcctcgtagagaggatagagaagttgccttatgttctaagttactctgtgtacttgactctggtggggaagacaagaaataataagcagccaccccaacaattccccactgctcataattccatccccagctcccagcccagcacctgaccastaacaataatagtaacaacagccggtgtttatgttgcccatagaatgtgaaaggctctgttattaacttattcagtcctcacaataaccccacaaggaagtaggtaatatgattatccccaattttcaacattagtaaatggaggcacagagaagttaagtgacttgcacaaggtcacacagctagtgagtagtgaagccaagctccaaactcaggcagtgtgactcagagggttggcacttccccgctaggctatgctgctctctgcactgctgtatcttgatgcatattaatcaaataaatgaatttcattttatttacaatgccaaattcatggactttaattttcacttttctgtgggtactcagaaaaaagtagggcaagccaatgtgtctttctcagtgtgccagggcccacgagggagcttctttctgaaccacccaccaggaggaaatggcattagatctgggcccatgcctccttcctgaagaggagatgttcatgggaccaagacaggctgtgcatcagggtgccatctctgggtgcccaccaactttgaggcatggtgtggaggaggaacttcagggctgcagggcctctgagcagagtcctccttagatctgagcctaggagacctcgagtctcccgggaaggctggcttggcctctcaagatctttctgggcataggcttttttgttcactttaaaaatccatttgtggagcaaaaactcatgattatggaagaaagtttagactttgtggaaaatcctgggacccactgaagaagccttgcctgaccttgtacaggagctatcagtatggatgcttttcaaagcccatggctgacagagatagataagcttgggaccccattcactacatcttggacgtgcagtttctttgtccaaaacctttgcttattttgtctggctgcaggccgggactgcctccttcctctgcttcaggtgctcacagagcaagactgggttggtaaattaagaatttgccagatggaaaggactaatttttccccctttcaaaatcatgagcatgacggtttttgcacacattccgccggacacatactgcattcataatacagagcgtcgagacagcataaaggtttcacatctttcatgtgataaatatttttaccgtcatgctcaagaaatggattttgtttgaaaatggcctatttcctttgatggcttctttgacgtggattcaaagcctttccctatcctgccagggcctggggttgggagggcctgtttgttcagttttttcgaaggacaaatccacttctccctgatgaaatacagctgtgactgctgggggtgagagatttacgacttaggacagtaatgaaaagacgtccagtgagccgacagctgctgggagtgatggcacgctcagccctggggccacaacagctagggctcccaggggacgtgtaagcagacctcaacctcgctggggccctggctcgtatttatccttctgcactgtacactacatttaaagaatcagatgtgggctagttaactgaataatatttcttctcacaagtttgtttttgtaagtgttcttttctcatctttgaaatgacacatttttaatgctcttgctataagcagtgagcaaccacttgggactagaagaatctgttttcaggatgagcttttgtaggctgctgcgggcttctggaactctctctctctctctstgtgtgtgtgtgtgtctgtctgtctgtctgagtgtgtatgtccatgtgtgaggatacagccagtgataactgagggaagcaggaaccctgttctcttgtgggagactgtactaatagttccagggtcttgtgattgatatcctctctctccacactgcagagcactgcttaccctcccacctgcctgtcctgtaggggcaggtgcatgctatacatctagacccasgcaccaacacagttaaggggtctctgagagaggaggtttgctggtgtgcccagggctcaggctctggggtttggctgacaccccaaatacttgttctttgagcagattgcctttccccagagccattttgcaggacccctcccgggtggtggagggagcactgagcaggaatgagggcattaagacccttttttacttcccggtcctagaatcagctgctgcctggctgtgtgacttcaggtggttccattgaacattctgcttctgagtgaaagccaccaggccctgtgtaagccacaatcagtgatctgagcaccttagaattgtgacattttagggcatgaagggatcttagagatcaccttgtgtttactgatgagaaaagggcagcctaaagaaaaggaagggccgggtgcggtggcttatgcctgaaatcccagcactttgggaggctgaggcgggtggatcacttgaggttaagagttcgagaccagcctggccaacatggtgaaaccccaccactactaaaaaaataaaaaataaataaataaaaaattagccgggtgtggtggcaggagcctgtaaccgcagctacaagggaggctgaggtgggaggatcccttggacccaggaagtggaggttgcagtgagctgagatcatgccactgyactccagcctgggcgacagagcaagactccatcgcaaagaaaaaaaaaaaaaaagaaaagactttgccacagccacacactgaatgtactgagagccaagactaggaagttcctcctctacagctgagattctcagagtggggaccgtggaccggcagccttagcatcctctcataacttgctagaaatgcacgatctcaggcctcccctcagactgctgaatgagaaactctggggtgggaccccacgatctgtaatctgactgccctctgggtgaagtctgatgcttgctgctgttcctacagcaccccgcttccctttaagaccagaagaaagaaactggaaacaggcaggcttcctgggagaggctgtttgagacaggggagcacatgatagagtaatattacagatgaaaggtacatatgatttttgcagcttcattcaggctgcaggtttcccaaagcaaggactcttgtagcagagccttgaaaggagtcatggcgtctggcattgttctgggctgcaggctgtcctactggcaagggccacactgctttctccctgtctagcccagctgttcccatccgtgtgtctgtgtcagggaagcatgcctctttaacattagcagggttggtcyggcttgttcattccaatagattgatgtgtggaaacactgggaacactgttttatgtgtgaacagtgtagtgtatatttagaagtccgggtgtcagctccgggctgtcagctcggtggcgggcgggagcgggggggataacggtatgtgcttcagagtttattatatctctcctaggcagaattctagctttaaaggttgctttaaagtagcaagtaatggcacatataaattctgattcctaagatacagacatttgtcactctctaaaatgagttttttcacatgtactttatatagttggcatggagtgtaaaaacttgaccctttaatrgcagctttcattctgcataatttctaatcaaggctatttccacktctgtgagtgtgtgtgcacatgctgagccctgctgctcctacctgcaccagccatcctagccgcacactcagacacacccaggcccagaagtcccccttgcaggggaggaaagacccagcagtgccagcccgtcaggagtggagtgggatttttctgacggagagagatcatcctgtagtatctggactaagcttgcagagtcagatgtcttcctgtcctttgtctgccatgtcagcccggactgaactgactctggtcttttgctgggacccaccacccttcctgagtcctagcccacctagctggagttgccttccctaactcttgccagtacctcccagagtgcagggccaaattcctgtatccctggctgtcttaatctgttttgcattgctataaaagaatacttgagactgggtagtttataaagaaaaacaattttaacattttttctcagagggttctgaatcccccctccccaaataaaagcaacaacaaactaacaatagaactgcagctttagggagttttgaaagccacacttaagagtagccaaataccaacaccgaagtccaaagaacagtagcaggaagccagttggacactataatgattccgtctgtgtgggtcaggaagaaacagggaggcaggagggcgactgcctcagtccctgccttgcaccagctagggctctcctttctaccttgttagtgagtgtacgagggaggaaaggccaaaagggcttcaaggtcagggaggagtgggcagagataaggctccttcacagctcatggccacctgcagccctcaggtgcgctgcacctttggagaacttggatgacagccctgcccagattgtacggggtgtgttcacactcagtgagtgttggggtggacagagccattttgctcagagtagtgttggacatggtaggctctttgcaaatgtcagctattggtattttgcctcactataaccctgtgagtgaagtattagaatctctttttaatagatgggaaaagccacacaatgattggactcttgctatggtagcagagtaatggcccctcaaagatgtacacatcctaatccctggaacctgtgaatatgttaccttacatggcaaaagggaactaaggttgcatagggaattaaggttgtgaattcagctgacttttaaagagggagagtagcctgtattgcccaggtgtgcctaacgcaaccgtaggggtccttgaatgtggcagaaggggctgaagagaaggtcagagtgctgcgatgtgggatggacttgacccactgtggtgggctttgaagacggaggaagaggccataagccaaggaatgcaggcagcctctggaaactgggaagagcatggaaacagaatctctcctccagagcttccagaaaggagaatggccctaccaacaccttgattttagcccggtgagatgcctgtcagacttcttactttcagaactgtaagatagcatgtctgcattgtcaagctactaagtttgtggtttttgctagagcaccataggaaactattaatacactttaccacctatctgatggtttgctaagcactttcggggtgtccatcatctcacttaatctttgcaacaagcttagacatagacattattatccacattcgacagcaagctgagcttcagagaggtttaagagcttgatgagggtcacacagccaatccagggcagaggtgcctccagagctcctcagtctggtgggctcagcccctaatggagtctgcacttggccttgcagtgggacatctcttggatggcagaccccaccctactttgggctgaggcaccctgaagaagcctctcttcttccctgcaacactgttcaggtgtcagaggaagccatcctagatttcctttgccatgctgaataaagtcctcgcacagaggattttaatggtgttggacctgagactgtcagggctccttcctcctgattagttccaagctctttgctgtcagattccacttcgttcttttggcagctctgaggattccaggaagagaaagcctaattgtggggaccattggcaaaagaccttcggctcatgtttgaatgcaactctagaaacagagaagaagggaagccctccatcaacagaatagtgcatttacttaccattattagggcacttgacatattcaaggatgttttcaaaaatctgaaaattgtcctttgggagcctaatcacaagcagaggcataacatcttgctttgctggatataagaagagtaccgctatgatgtgccgaagtcccccttctcgctcaagtaaaacgcaaacactggctccatcttacagaagacaagcagggcccagggagctgggggtttgcccagtgttggagatgaggttaggccaaggcttyctgtctcccagaccagccagctttccacgggtctcagtgcctggctttggctgggaccaggcacaaaggctgggatttggatctcaaggctgggtgtttggaagacaggggaggtcaggcccacaggccgtgaaggcgacacagcagatggcaagctgaaggcagctgaggctgaacgctgctgttccggctgtttatgatgtgatccctctgcatggtggtgtgagtcctgccctcattagcagtgctcgggtgaactgggctttgatgctctgcaaacatggtctgggcttctcgggcaaggcscaagcatcaagctttttaatgggaataatggtgacttctcatcattggaagtcagcgggcaggagtttactgaaagccgacaagagaaatgtacatttctgaacattcaattagccctcttctttttaacccaaaataaagcatgcaacaatgcactgcaggagtggaagaaaagtttttttaaaaaaatcattgaattgtacatttaaaatgggtgaattttatggtatataaattatacctcaataaagccgcttttaaaatgargagtggaagaaaaggaaaacmttctttatgaattcttatctgggatattcagcaatgcttgctgcattatttgatgcttagctttcatctttcccaaagctgacttcacagtgacctctgacagtcggtttccatctcacaagtgaagaaagtgaaggcttgaagggactctgggtctttcccaaagagagcgaatagcagacccagaagcggggagggaaggggtccccagtgcactctgggaggaggaccaggagacaggaccatctgggtctgcaccccaagtgtacttcagactcagggtctcggggcccatggcagacagatacctggcaccccaacctgcctgacctagtttctcctgcctcctctcactgggttctggatcttatcaccaaacaaccagagctttgctataagcawggcctgagggcagaaasagaaatagcagtggctacagaactggctgcaggacaaaagctagcccccactccccacccaccctcaaagccttctcagtgatcccctctgcctgagagagggacacagtaaactgagtaaaccacaagaaacaagaaggctccagtggtttcctgggagcacatccctaggtgcacaaaccgagggacaagaagcagagctgccgctcccagagagtgcacagactagcttgggcagcgggccaggggtcctcagccaggtgagctgcgttctgggtggctctgtctgacccttcggtaggacttgaccattcctgcggcccaaccttgaggggggagccctaaaccactttgacctccaacagcaaccatgccatttgactcctctgattcccttgtcctccaatccaaggagcagatatgagtgctagattcttgcctaggaagaggtccaggctacagcctctcctgcagttcctccaaaaaaccaccagcacctcagaatttctatctccagcgatggcaagagctggcaaaatgactcagcttcagcagaaggggatctgcagggatctggtcctagaaggtgaggcagtcagacctagacagggctgggcagcattacaatacccctttcactctgaagcccgtttcctccccactccattgtgcagtctcagtaccaccacaatcttggagcacgagccaktggggccagtgctttgtgtggactgcccactgaagcagaacccttcatgcaggaattcctactttcagcatcactggcttcaggagcctcaaaagccttggcagggcctccagatgtgctcctcttgcttggccaattagcccatgcacaacgctcagagctgtggcttttgttgcattcattgctcaaagctttgcaagctatttcctgccccacttcccacttgtctccatgaattagcatggacctgtcaggatgtatctgtaagctccactcttatcaatgggctgtgtgtcaggcactgtgggcatatcactgagaccacattatggcatttcccaggtgccctatgtgatcattggtagaactttttgaaaaacagtcatgcacaataaggactgggcatgatcatggggaagcaaatgacctgagtgagtgggtctctagaaacccatcactctcattcacaggggcccacctaggaaggactcaagcaactggtagtcaaaatatacttggcaaacaactgtcaagggacagtactaaccaactgacaggaatgctcaacacagcctagagcaggatcttggggttcttggctgggcctttgagttgctgattggtgaaaagaactggagcattccaagaaaagggccagagcacctggggttgcaggggggccctggaggtattttaggcggcagctrtttgccaccgctaggaaggtatttcaatagtttaacaactagtttgaaccagtacagaccaagtgagtagcctcctggggactgaagtatctccagtcctcaagtcagacaacaagtcttggtgcataatttgcaggtagggctgcagtcaggactgtgagctcagcaataagccccttaatgtctccagctgcagttttctcttatctatgatgggattgattaaacctacattctaggagaggtaggtgcagtgcaatggaattggggtacactgtactagggaatcagctccagggataaagcttttagacacccaagatcagcctgcagttggaccccaaataatgcactttgccactctgtggtttgtttcttttgtttgagacagggtcttgctctgttgggctggagtgtggtggcaaagctcactgcagcctcgacctcctgggctgaagtgatcctcctacctcaacctcctgagtagctggggctacagatgtacaccaccatgcttggctaatttttgtatttttagtagagatggggtttctgcatgttacccaggctggtcttaaactccaggcctgaagcaatatgcccaccttggcctcccaaagtgctgagtttacaggcatgagtcactgtgcccagtgccactttagagagtacctttttgtgatgcttaccatgctgagctttgggatacttgcttgtaggttcagaaactatttccaaataataacgctaatcccaaggctttcagactcgcagtcttcactgtggttcttcctgcccccattccatgggctacccccagcctgctgaggctctggatgctctgggtctggcttcttggtttccgatctgtacagccacctgtctagcagctttgagccccacagagtgctctttcctcctcctgcatcctggttcttcttggcctctactttggggtgtacttccctggagtgagcttgaggattgcacttattcttcaattcaagcatcttttcctttaggaagccttccctctgccccatttcccctcacttcaagcatcctttcctttaggaagccttccctctgccccatttcccctcacctacagggacccaatggcatcttatatacccttgatcagagcattgattacattctctacatatttgctcttcccactaagttggatgctatatgaggatagggaacacatctgagtaatcttaatatttcaatacccaagcaataagcttggcatagaacaaacttgctgaaatatttgttgcttagatgataaaagggattaacaccctttgtgggcaaagctgacagtgagctccaaggcccagcaaacaaaggaagcacagctatcagggagcatctctgaatagggctggccaagctgcagctccccgcaccctggggatgggcaggaatgactgcttgctggttccctcagggagaatttcaatgtcaacaatgaggaaggagtcagcctgtttgcctgttaatgtcagaaatgtcatgctttgcacagacccatcaactgtacctttctcttcaagggtggagtgattagtgtcctctggagggaatcctcccctcagggcttgatggtgaggatttctgtaatgagcaccttggagactgaggagactcaggagggaagatgggtatcaacgtgtctgccagagctttgaggacaccgcgggctgggtttcaaggaaggaagagcactcctggcctgactctctggctctctgtggttctgtggtttgagctggacacttcctgagggcatcttaggccagttttctagagtctctgggtcttcccacctcattgccctttgtgcctgggtttctgggaagagggatgtttggacccttcagtggaatctttttgattctgagccttacttggtgagatttgaaagagagagagagagagaggcaagaagaagacacagcctccttctctccctgcctccctccttatcttccttctccctatattttgggggtaattactccatgcacagtcctattctggatacytgggagagaagcctggtaattctctggtataagagatttacagaggagtcctgggagagcagtggagattgcttaccactgaccgtattttgtggaactacctgagaagctcttaaacatgcygtgccagtctgcgtaactgtgcacaatcatttgcttaagtgaactggggaggaattaactgcacacagctggaatttgccccggccatgccttcactggctttgtgctcctacctgctggcacaggactgcagccccctttctactccctctgaaagatttggggaatctctagtaggcagggagttttctgacctcacgacgacccactgctaatgccctattcgttcattttactggtattggttaagcacctactaggcgccagatgctgttctgagtctgagggactcaacagagaacaaagcaaatgcctgacctcacagagccacgttccagtcagggaarcaaacaacaagcaaaatgaatggagactatattagtctgttctcatgctgctaagaaagacgtaagtgagactgggtaatttataaagaaaagaaggcttaatggactcacagttccacatgactgggaggcctcacaatcatggtggaaggtgaaagaggagcaaaagcacaccttacgtggtggcagggaagagagcgtgtgcagggaagctcccctttataaaaccgtcagatctcttgagggttattcactatcgtgagaacagcatgggaaagacttgcccccatgattcagttacctccaccgggtccctcccacaacacatgggaattataggagctacaattcaacatgagatttgggtggggaygtagccaaaccatatcagagactatatatgtaaaaactggggagagggctggatgttcaggatagggtttgctgagaaagtgacttttgagtaaagacatagaagtgagggaactgaccaggaggatgtgcagggaaatgctggagctgaggcactcaggtgagatgtgcctggtgagtctgatgagtggccggtgtggctggagaggagaaaaccaggggcagagatgggaggtgagtgctgggccttgcaggtgtttaacaagaaggtggcggaaggcccttggagggttctgatcagagaaggacgtggcatggtaatgtttcccctggcccaggggtctcctcaggccgtacttggggctccccaacctgccctaatcacatcatccctttccttccaccttccctgactcaagcaccgcttggtccccaagcatggctgtctggtgaagcagccccttcactttccctttcatcctatttctccctgggacccagacaagcactcagggctgggtgagggcagggggcgagtaacagcctctgtgttgtgctcagaatcctccaaatactccccttcacactctctggctttgcagctcacagagttcattgtgccctgctcaatctctgcctcgaatgrgccctcctggggagtcctcagcccctggagatgtgcttctcttaagtcacctcatcagttggtcagacatgcccaggtaggtctgaatgcctgcaggggcttcagccagagtccaatcctggaaggtgcctcatccctagatgccagacatcagagggtctgggtatcaccagatatgccaaacaccccaggacccctgtagaagacccagcccagacacttctctgaggcctctttgcctgtcccccttatgtcaaaggtggtcccctttgctggatgaccatgtaggcctgctttctcactggagacgggagtggagtccaggtctggttaagcatagaccacttgtctatggacatggaaagccttcatgtggggctggaaggcgtcagcatcttctagagctggggaccttggcaaggtcaccttcctgtcccaactccggcggcccgatagggctgtgggctttgtgcgggcttcagcagtgtttatggagagcttactatgtgccaggcaccrtgccaagctccttacctgacyatctcatttatcctcacacatgttctatgaagaaggcactattgttatcaaccccattttccagaagaggaaactgaggctcagggtgaggtggaccaaactggcaaatggtagagctggaggataaaccctaggattctgactccacagccagtgttcttaaccaattctttggaagtaaagaaaattaaatagagttcagagaggcaaggcctccttacctcaggagagtcaactctaaggtacagggcagacagggctcgggaaaatgttgggggtggcacacttttttttgtttttaaagaatcagatagtgttttcagattctcgggtcatatcatctctgtcatacatactcaactctgctcttcagctccaaagagaatatgttaacaagtggatgtgactgtgttctaataaaactttatttacaaaaacaagcagtggcccttggaccatggtttgccacccctggtrtagagaaaagaatgtggagtttggaggagccaggcctttattcgatgtcactgacacactgggtggccttggattagacatttaaccttttcacttttggtttcatcttgtctaaccactatgggttacttattaactgatgtattttgaaatgatcgattgagtcccttgtaagaagcagttactgtgctaggagctggcagtccagcaggggtcmagtcagatgtggtcctgctctgtggagttgcaccagtgaggaggaagagaggcaacattcgataaggaaatgacctatcgcagtgcttgactcttggcagaaattcaacaaatattacayctttcctgctgtaggcccycyacctcatctttcaggactcactggctttgagtttgtcatccttcgtgcccatactgagtgaaaaggtaggaccatgtggtgtcaccaggactttaatatgtttataatatattattatgcaatgcaggcctaattttggatcataattttccattaactgatctcattttacttagtaatatccacttaggtattcgagagcaataaaactacatttcttttaaatattatatgattcagttggttcactgatttagatttttactaccccccattccaaacgaatgagtcatacatctttttagagataacaaggaccttcaagatcatgcatgcttgtgctacccttcaagcatgcctagtaggggagaagaatgagcaagttctgagatggagatttgggcaagccactgcaatcctgacaatgctgtgtcttagaagagtttgcatagtttgcattttattcttcrgtatatcctaatctgtttaaattttccgactttgcttttatgtctttaaggaaaatcagtcaccgagatggtatgccatgtttgtctttgtacttcacgtactttagcagctcattgccttatagaggctgtatagcatagtgggaggaccactgcctggggagagccttcccaggactgaaatccagctactgcactttcttctgtgtgaacctggacaagttttttattctctctatgcctcactttctttatatataaaatgaagatgacaacaattcctaccttatagggtgagatgagttgataagagaaaatgcttaggacagagcctggctcgtggtaggagtgagcactcatcaagtgttagctctgatggttatcccaagagttacaggggtgtcccatttggaggacgtggcccggagaggtaccttaatgcatgtgcacccagtgagttcggcacctgggagtttgttgacagatctttttgcatctctcacactgaggtctctggcatctctgctttcaggatcgtgagcttgctaagtccccttctactcttgatagcctctgcctgcttctggtgatggaggcttcctgccactggagcaccccttccatggtagggggagcctatgttttggaagcctccctcttttgttcccaggcagtctcctctctctcagatgggcttttaggagagcaccgcatgaggaggtggcagtccatagccccagcactccagccttgaagacttcagaaccctagctccttactcatctccagcctgtacctaggtgtgtcatacacccattgactccatacaggccaacaaggggatgtgggcaggtgtcccaagcctgcctctcctgtccctgacctgcttctgttttttctgatcactgtctcattccaggctcctggctccatctcttacttccctcatgaatttgtgagcatagacgaccctgtccagtgggbttgccaattctgtccaatttctctgatttctgacctcaaatgattcacctgatggcctgtcccagggaagtaattccaaagtcctrgactatcagcccatgtcctggcaagatctatcttttagcccccatcaaagagagatttcaataaccttcccttgctataataaccctaattgccattggctgtgcacttgttctgagacataaactgatctaaatgctttatacactttatttaatggaatcctcacaatctctggaggctggttgggtattattatctctgcattctaggttggggaattttggccttgggaggttgactgtgctatggtcaygtagccaggacgtggtggagcactgactggaatccacgactgtgtgacttcaaagcctctgctctcacagttagtgattcccctccatttttctgggaagttcctgggaaaccatgtgctggccttgagctgcctccaccaagtccacaagggctcccatgagcagggcccagagcgcagggcaggctgggtgtggcttggctgtcacctgtgtcatggatttgctattctggtgggcagtgtctggaagcagcaggaggcagtctggccggggtgctgacagccaggtgaatgtcacatggtgcaccaggcaactcactggaggaccagacagtgaagagggagaagggctggcaagaactgggtggaggagtagactcccagcttgggtgcctcaatgtggggtgggcttgggaattgcaggaaatgggggtacaggctagggacagagaagcagatgcccagtttgagggctggggccaacatctctggcagggaggcagactggggaaaaagggggtcctgacttgaagccatggggcatcaatgtcacatccattagcttctcagcagaccctgtcaggtgtatttctctaactcctgtgcctggtggttgtgggttagatgaatggatggattcatggatgaatgggtctttgggaagcatgaaaacccaagtcagcactgaccccgaaagaaggggctaagattgttttaccaaaggctgtttgtgaggaagggaaagggattgtcatggcacatgcaggggtgcactctgacccactgtctcctgttccttctttctccagaggctcctgccaagcctgaggaggcagaggccgagcccttcacagactcctctctgtttgcacactggggccaggagctcagccccgaaggccggcgcgtggccctgaagcaattccagtactacggctacaacgcctacctcagcgaccgcctgcccctggaccggcccctgcctgacctcagacccagtgggtgagcagagtcagtgactgggcccttgtcgacctgcctatggggagatggggtccccagagtgctgggaacagagcaggactgggcgcctggattcttgggtccctttcctgcttcagccagggcctgtcccctcggcttgcgttcagcaagtcactctcctcttccctcagcctcagtttctccattagctgagtaggggcaaagctttcttccagtagagattttgaggattaacaacttaatttactcgttaaggacactacaatcatctcacattcctgttaatacgtcattttaacccaattagttgcattttatgcataatcttttttctgtaaattagtttttaaagtacatctatcttgtggggctaacaagtcgttacatctgacagagaagtctgtcttgacttctctctttgttacagaaggatgttcctttaaggttcagtgagaattcttactactcccaattattgaaaatgtgggcatgtacctcagctgagaaaatctcattaatttttgtgagctcccccccacagtgttttcccccttttctcctcatttttacatttttttaaaagctgcaaaccacagtgagcttatatctggagtctttgagaaagatcttgctgctgggtttggaggccgtgttcttttagggagaagattcagttcagctccacagacattcattgaacacctgctgtatactgtataattgggtatggttgtttgtggctcagggagaacctggctcggctaggatgaaagagcagctgaggatgtccaaagggagagaagaatgtgctttcacttgcaggtcatttattaagcacttctgtgccagcatagtctagacacagggatgatacggtttggctgtgtctccacccaagtctcatcttgaattgtagttcccataatccccacatattgtgggagggaccaggtaggaggtaactgaatcatgggggtggtttcccccatactgttctcctgatagtgagtaagttctcatgagatctgatggttttataagcgtctggcattttccctgctggctctcattctctctcctgccaccctgtgaggaggtgccttccaccatgattgtaagtttcctgaggcctccccagccatgcagaactgtgagtcaattgaacctctttcctttataaattacccagtcacaggtatttcttcatagcagcatgagaatggactaatacaagggacaaagcagtgaacaaaacatacagaaacccctgcttcacagagctggcattctagttgggtggaggcagagagtaaacaaaacaaagaagtcaaatatgcagtatgttaggtggtggtgagtgctatggagaaatataaagtcggagagagagagagacacctgggacaagagtggggagctgcaatttttcctgcgtggtcagagaagacctcagtaagaggtaacatttgagcaaagacctggaggagaagaggaagcaagccatgagggtactgttggaggatggggggagtacctttcaggcagaggaagtggcaagtgcaaaggccctgaggcagaagcacgcatggcacgtcatgtttgaggaagaggaaggaggcccctgtggctggaatggggtgtgtaagggggcagtagttggagatgaggccagaggagcaacaggaagcagatcattagggccgtggttctcaaccttgctgcccattctacacatcacgggagccttaaaaaacaatcctgatgccaaggccacaccccagaccaattagataagtgtttctggggcagcactcagcttcagtattgtttagagctcctgggtgattccgatgtgcagtcaaggtgaatcccaggagaagggcttcataggcttttgcaaggagtgcagcatttactctgtgagacagagatccatgggaagggcttgagcagattagcaatatgctaattgtcacttgcaaaggtgcctgtggctgctatactgagaacagaccgagggggcaaggctgggagcatggagaccaattaagaggcttccaggtgagaggcagtggtggcctggaccatgatggcagcaggggaggtgctgagatggggttggattctggaaatatcctgaaagtgacctcagctaagtgtcatggggcctcagtccacagaggagctgcagagaccactcctgggtctggagaggagctggtctggtgggggcagcacacaggggctctggagaagagatcatcaggaatagggccctctagttcctgcaggggacttggccatgaccttggccagaagaagagccatggacttttcagtcaatctgttacaaaacacaggcacagctcaatccatatttgttcaaaattaaagggaaaatggaaaggaagccaaggaaagggtggattttacagattataacctggttataacaacaactgggattcccatagtgctggacgtgccgataatgcccttcccatttggaccacattaacagggcagtgaaggtacgccaggcaatggtagattcttccggtttgagttgaggaaactgaagagcggaaagagtgttgtctgaggtcacacagtcagataagcaactgagctgagccttgagcccatgtctcagatgccggatcgtggctttgacatcggcccaccattgtttatttgactgtgcacaatgctgcacaatgagagcgcatgtgggagcccttgatctttgactgagagaagcgccccacccactctcacctgtgggaggaatttgcctgagagagggaggaactctgaaggactttaggtgggcagaattctacagttttcttctgagctgctggagaggagcaatcgtccttacagagagaccttccctctgcacagaactttacagtctgtggagcttccacacctcccccgtggcaccaagcaacttctgtcagcccctttttccagacagaaaaacagaatctctgataaaaggcagagcagagcctcctcactcctcagggagggctctgtgaaagtggctttaacagtggagggttctctttgcacatgtacttggaaggctccgtctagctctatttcagctcacgtgccagacgcacgcccaagattggagagctgttggtggaccacacaaaacaagtatgtgcttaggtaaaacagtgcctccttttgtctgttaatttccataaaaacatccctgccttgtaacaaggccattgcttggctcatccttcttaattcattttggaaacatcttttcaaaattttactctcatcctatttcaaacgacactggcaaacatttatataggataagccatgttttcaggcatatgtttgtcacttaatttataagaactccttgagtcttcacagtaaaaccttctgaggtaggtcctatgattagcctccatcttacagaagaggaaactgaggcatggggagatgatatctcctgcccaaggtcactagtggcagagctggggcaggtggtctggcaatagaatttgtgcatgtaaccactgtcctcacactgccttgaggcatctatttgtgtcactctaatgggagtggcaggcccgctttaacaatatagcactgagcatttgctgatcagttttggagggaggaaggtcggcrtctacatgttggaaaaaactgttttagtgcacatgaaaccaaggcttgttgccaaggctcagaatgatgcctgggctctggctaatgttgggatttggactgagaggatgtgggtcagcatgtggagaggaagcccacagtcactgcagtctctggaagattcatgctgtgtggctcttgccatagccggagcccctgtgcctcttgtgaattccagtttgctcttcgggacttctgttcctgctgcttgtattccacactttgctcttggtattcttggctcttttcttccaaattctaaccctgatgttattcttggcttcattcctagatcagaaagtgagtgttcagaatcctgcccaccctcctttctctcacctctagctagtcacttactttgtctcctttttttcttggtactgaaagatgtaatctgacccagcttgtcatgtggctgagataggaccatgctgtgccagtgccttatagacaagacaggacacaactagaaggaaaaacatcggtccagccagttgctaggcctcgtttatttttttatccagccaacatttactgagcactcatgatgtgcccggcacccaacaaagcgtcggacggatatctcctggagtttacactgagatgggaacccagacagaggttggtgggagggcgagtctgctgaccatttcccaggctccgtggcggggaggacttgtcctcgcaggcttttagtaaggcagtggcctggatgtgatggtcacagaagcactgtccctctggtgcctctgtggcagggaggcagggcctggagggtggcatctgcaaggcacctctctgtggcagggaggcggggcctggagggtggcatctgcaaggcacctctctgtggcagggaggcggggcctggagggtggcatctgcaaggcacctccctgtgccggcttccctggggagagttgttttaacagtccagactctagagagacatctgggatctttgaactttggggggtcctggcttcatggataggcagaataatggcctcccaaagatgtccacatcctaatcccccacacctatgaatatgtaataggcataggaagtgtgccagtttttccaacctcatctgcacaaagaggggaccaacttcctcaaggatccaggccccttggctcctggggaaatcaaaatgccattcatcctccttgcagttttgtagcagcagtagggcagacccctcagccatccaggtgggaagaactgggggaggcaggacacttcagactcctctggtgaagcctcctggacctcatccatgtggggccttggccaggactgggcaggggttcacttgcttccttcctggtctgggaagatacctagtctcagggttgaagggcagaaagtcttcatcccagcctggctggacccggctccatcccccatggccccagccgcaggctccagatgtcctatggctctctctgtgtgcttcctcctgcctctcggtgtccaccctctttctccttattggtaggctccaaaataatctaggaggggcaagaagaggaaaaggaaacatcaagtctcaattggggtgtggactacagaggcgtacacatgccaaaactcattgaactatacactgaagctctgtgcattttactgtgtgtaagtgaaacatcatttctttttgaaaaatggagatgtgagaaagcgactgaagaagtcctttgcccaaggggtggagaggtaggaggaggggacatcttttgggaggtcactgaaaagatgggtgtgagttgtggagaaggaggacggcgcagggttgaagtgagctagccagtgtgaggtgatttgggaaggtgggcttctcaccccagccgggccaggcaggtggaacatgtgtgctctccagttctgcggcttcggcctcagactcatgtcacattcttttctgcaagaagtggctgtttccaaacaaggggcacaggaaagtctaagggatcgtgggtgtggatagaagtgggggctctggtctcaagctccagggttgtgtttccatggcaactctatggcctccctccaaggcagctcaaggcagagcctctggcacgcactgcctcctgcctcttgccagcagatcttcagaggctcctgagccttatcagtaatgactttgcccttctcaccagtgtcccctgaggcccatgtccctccctcccaggggttaggatggactggctcttgggtttgacaggtgggttagggcgtggggctaggacaggaggcgttggcaaaggtggtcagaatatgttytgcagccctaggtgggaataattgggacagatccacacacaggctcacaacagagccctgggtctggagctggaggtaatcctttgtgagcaccaaagtgataagaagcaggacaggatagtagcaaaggaagaatatagcccagagccaggggcactggtcttcctgggagcaggttagggaccatttcatggggctctgagtgttcggtgggcaagattgttttaacagtccagactctagagagacatctggcatctttgaactttgggggtcctggtttcatgggtagacagaawaatggcctcccaaagaggtccacatcctaatcccccatacctatgagtatgtaatgttacatagcaagggggatctatggttgccgatggaacgaagattgctgatcagatggctttaaactaaggaagttttcctggattcattggctgggcccaatctaaccccaagggcacttaaaagtggaagagggaggcaaaagatcaacctgagagatgacaatgtgagaaagacttcatcggccactgatggctttgaagataggagacagttatgagggaaggaacgtgagcagcctcaagttgctggaaaaagcaagaaaataggtcttcctgagaaagtaatgcagtgctgcacaccccgattccagcccagcgagaactgtgttggacttctgacctccagcatgatgagatgataaatttgtgttgttgtaagccaccaagtttgtaataatttgttacagtgacaatattagtattaggaaaacaagacagtgtacagcctgttgcacaggatcctggaagaagaaaggctctgtgattggtttaaggctctgctgtcactatactaaagttcataacaataatttttaaacagggcactgcattttccttttgcactgggccccacaaattctgtagctggccctggaggaggagggagatggctccagcaggagcaggtaggccatgactgctggaccatcccagagttgctaaccatgagcgaaagattcacgagccgtcacctgctcgcttactgtgtgccaggttctgtacaaatgcttaacatacactttcctatttaattttatcctcatgtggctctggggttgttattattattcccattttataaaggggaataccgaacattcacaaggttaggaaatttgttcaaattcccacaggcgctatgtggccgagccggtatttttactggggtcttatgattccaggacactattttatcagcttgccctgcccagccctgcccaggtgaactttcctagtttgggatcttgcctctgtggaggagacccagaggtctatggacaatgtgttctccatgaaggcaacttaaggacaaagggttaaaataaacattcttaatcatgattttgccattgaattgaacacactaactgtacaaacaaaggggaattactctttaactaaagtactttgggaaaatacctctggttctggttaatattaatttcgttgtgggccaagagtataatgttattcttgaaatgtaatcttgagctatattaatagaagtataatgttttaaaagagggaggtgatagctttgttctactctgctgctcagatcacaactgcagaattgggttttaagagatgttgagaaagtgaagtatttacaggaggacaacccagaagagaaattcggtagtatgacaaacaggtgaaatttctgtttagattatagagtagtagttaaaacctggttccccactttccgaggccaggtctctcatttataagctgggtgaccgccaacaagttgcttggcctctctgtgccttggttttcctatctgtaaattagggatggtactgcaaagtttgtgtaatgtttgtagagctcatgggccactgcctgacacataggaactgctatttaacttttagtcacttttattgtctgggtctctgatttgtaaaaragaagacttgggggaacatgttcatgagtttaacaacctgaaggactgctatgtggacaaggagcacatgggacagggcactgccctggcagtagatgagagcagggccagacaggcactgcaggacaggttacacagaagtccctgggggagtaatttctctccagccccagaattctgggcgtcagaggccgagccctgagccaggctttgctagagagcaaagttgccccattcttccttagaatccgccttcccttgccctgcggatctatcaggacctgcctttcccggccccagcagatctgccctgccccaccttcctcagctgtaggtgctatgggcctggcctgctcactgacaaacccaccacacagagtgtccctaacgtggcttttccatcagagccagctggcttttgttccctgggtggctgttcattcagcccagggatcccacattccccagatttctaagatgtcttagggacaaatggtatccctgcttcctgttggttgcttacgttgtaaatgattctctttcctgatttcctattttccgtctacattttacatagcagagcctttctctaaattgataaattcacctgaaaggatgatggttgaacttctgcctctggatgaaagttggatgttttgatgatcacatatacttagcagtttactcatcagcaattcttgcaccaaattctgctcttagatgcaggtctggccgatttctcctgcattgcagaactcccagttcgcagatgtccattgtctcttccatatctgggacagatgtagtgtcttgccaaatctctgaagtcctggatatacttagtatccccaccctgcctccatcatcctgttcttcacccctttggcttgtgggatgatctagtcttatygctgcagtcaggcagggagtaaatgtacaactcagtgattccattcccatcaggtcatggtagaattcccatccacagagcccttatggacctgaattctttctgctgttcatttattcatgtgttcactcagcccatcaccaggtgcattctgaatttctactcygtgctgaacttcatacccagtattagggatacctgatgagcaaagcagacacggccctaaccttgtacagcttatagtctagtggagacactgacgtttgttaaatgatcacatataaaaacatgttgcaatagcatgtacatggcatgaaagaaaagcagaatctgtgagagtctcacaggggactggactccagcccaggaagggaattggtctttctctactgggttatgtacgtgttctcagggagcaaggaaccaaacctatgcaggtgaccacaggtggttgggattttttgaaggctgatgaaggcccacaatcacacaatgagaagccacacaggcaggctctggaggaggcagcgtggttcaagacatcctggacagctccagcctgccatcctctttgccccacttctgctgtgtttctaacagtgacttcatgtccacgtctacagttcactcactgacaacgcccttcttcctattcatcatttctgctcccctgcgcctcacttatcatcttcttaggatctcctacattcaacccctccattgtccagtggctggacagggccactggtcattctttaaaattactagatccagctacgcagagcttctgtgctaggctgcctcataggcctgcagctagctctttgatggctatttggggctcaggaaatcagtcactggtcctgttaattgtgagtcaaatggagatgccacacaacagaagacacagcagcctcggtgcaaggagtcaccgggattgtacatcccagaggcaggagtgtcacaggaagaccatgttgggcttcaaagactcagtagtgttgatcgtatttgtccatgttgtcctgctagacagaatacagcctcttcattcttcatgcagatttggcagcctgggaacaactccttcatttcgcccctcgctcaaggtctctgggttgccaatgacacaacaccactgtctcactgtcagcacttctgggtgggtatggaaaggaagatatagaaaccatcattcagcagggttatgaagacaagctttggaatcaaatgagcccaggtttaaaccctggaagataacttaccatctcgactctatttccctcaactgttaaatgggggataataatgctgtttaccgtacggaattgtagaaaggaataaaatggggaaaatagtaaaaacatctaaacaagtttcagcatggtttctggcatatggtaaacagtaaatggaagtttttagtattatttctgagtattccgcgtggggcagcaaacaccctgcagtctcttagccccagaggctatggggatacagataccagccagaaggagggacagtcttgattgttctcttggccaatgggaacctccatactgccttcatcctctggttttattatgtcctgcmatctgggagctgacaggcctgggaatctaatctggaaagatctggaagaarctagatgtatctgagtaaggccagaggataatcaagctagtcccatgcatacaggtaggagacagaggctggagtgaggccatggtggccttgagggccaagaagacagtgccgatcctggggccagaccctctccctgggtgtatgtcccagggggttagtgagcctgaacccttgtatgctgactacagccgagagaggagggactctccaggaaaagcctggggagaaagcaggaccaggaagatcccctgaggggagtggttgcctggagtgccaccgtctcacttgctttgtcaggtgggccccacctccactcccagaaccctggcatagctggatgctgttcctagtgtgtcttggcagacagaccccaattcacagtctactttgatcttcattctagaaggggcctgcttactcttcccaccccccacccccaggtcaagcagcttctatgaacaattcactctgatagactaggaccttgcagacttgctgaggtcaaagaggggagggtctgccagtccaagacggaggtgtctggctatagcgcatgaggtttggccaccgccccaggtcttatctggtggccgagaactgggctttacctcacttattcctccactgcttccccgcctctcacatgatcgtacagcactgaagcccttgttgtaaatttgcctcatacatatctccaaacagtcctgggggatctctgcagagaagccccctaagttgttgctccccatccctgcatctccttctgtgtgcagagctcaatagaatggagtctgtcatgaccatcaattccggcttattagacaaccatatccctcccctctcagaaatgccttgttttttttatctctagtggaaaatggctcagctttcaacaagaataaaagtaaaaagggaggtttttatggcttaattttacaggagaatatgcctgttctcaaaatgagcatgggctcggtctcgtgcagttgtgagttctcgaggagcttaaacacggaagggctggtcccagagtgtgactcccagagctctgtgtcctcagcccttctctgcagaggtgagcagagaggcaagtgcagaggcagacatcagggcagaggggagggaggctctgggcgagtaggcagggtcccggctgcggcaggactggagcagagtgtgtgggtggcccaattctggaaaatccaggtgctctgggagggcatcttagcagtacagatttgggagcaaaggccactgggtcagtgctgggttgccaggccgagaaagtggctggactctgsagcaaaagctctgggcttgggtccagagcagtcctctcccacgcagctcttggaggcgtgttcttttcaaggtgacttggactacagcacaaagccctctgtcctgagttcagtgtctgcagtgatgaggatggcatgaccaggaaggatgtagatgtcttgcttgatatgctcttcttccctctttttgcccctgcccttcagcaatgtacattctgcttcagtgttgaggtgaagatacgaactacagaccgtgtcatgatgtggcatgaacgtgtgttttgtggaaactgaaagggaatttattcaacaaacaccaatggaagacctgctgcttgcatcatggtgtgaggcagtgggcaggaggctgtgagcaaggccagtctgtgccctcagagctggtggtataggyatgggggaccgcctgacctggtgtgcctaggactttcagtgctgaaactgggaaggtcctgggcaaactgggatgagcttgtcaccctacatagtcacgatggtggcaaggggatgtgtcctgtggcatttgtgggttgggagggaggggaagttggaaaacgtaagatagaagagcctcaatcttgtggagagaagccatctgagtgatcctttcttcccatttccttattctgtgaccaagacatagagcagagagggaaggtggctcattcatggtcacacagcaaggtggggcagaactgggaacagcacctgggtgacttcatccccttcaaacgctttcccaaaaacgatccccccatatcatcttccttaccctgcccacccctygcctctctgctcacgcagggccacattaggtcaggtgtggagaaactgaaggctgaggaaaggtgtctcctgatgccgagagagaggccasagcggcagcatggctgtcgccaggaggccccagcagtcccaggagrgaagagaaaagaaggatttaaggaggtcagggcgtttggcctgaagggattacagtgtaaagaaactgagcacttctggagactgcgaatgtgaggaattggggccattcacgcaagaggagggaggatgggagaacaggagcctgctggtcggggggaggaccgggacctgactctccttccaagggaggaggtttgtaagaaaaaggagcagtctgacatcagcggcagacactcaaaatgtaggccgtagataaaacaagcaagctgttaggttcgtttcattccaaaaacattcatggagtgcctactaagtgccagactgtggtccaaggttgggagacagcacagtccaaaagcaaagttcctgctctcagggggcttcattctagtagagaggggcagacaataaacaggttcgaatgtgatgccctagagaatgtgttcagctatgttcaaatgagttttcttatgaaaactttatgttcaaaagtctttcttgtgaaaatcgtgatcagcagggcttagcttattatacaaatacagcatttcattctgcgtggagaaagaccatccggagaccagcttccagagactggcagctcaaaccatcagggctgctactgggaggaattaaaattggtctcctcagaagggggagactgggcaccacgttcagaagtaagaagggaagagagtagggggaagtagttaacccccatctctgaacaccctggaaatttggatactgaggctctgggaacgcagtgcagaccccatggggaagtgcagagagatacagaagcaaagtcttcattgctggtggagttttagtagggaggacagtgaacttgtgccaatccattggccttcttgggagctgtctattatactttatataaaagaagaattcatgtactatttgtttggccacagatggtattactttttaaatgcaattagcaagtggtgtttgtgttaatactcatctctgtcagtttccatgcctagggaaaacccaactgctggtcttgatctccataaataaatactagctagaggacttatttgactgtcaaccataaatcttttaattgctgttctaaaaattgtattcacatttttcttttccaaaaaattgaaaaagatccgatgagcttcagaaggcataccagtctttctccttcattcaagttcctcccctcacctccctattcccttcattctttcaccatggttaaatcagctggttccctcctctccagccacagcactggtttccttggatccacagaacccttgcacgactcacttttgcatgccatttaagtttctgatccaatctctcttcctcagagaggccttcctgaccaccccttctacaacagctgccaggacatcatctcattctcttgcctagagtttcttttcatcttagcacttatatgaaattgtattttttcttccgtatttatctgtttttctgtcaaagcataagctccataaggacagggactgtgggactgtgtccacttcctgctgtaccctcagtgcctgtagcactacctgcctagtggaagatactcaataaatatttattccattaaatgcaagaacaaaggaattctacaccaatctattaacttggttttattaaaatcacaagtacgaagtagatttaggaaaagggtcaactccttctttcccccattcctctctggcgagagagaaggagagctggaaatagaatgggaaaagtttctgtaaatttctggtaaccatggagatgctgatcttagtttattaatctcatgctcttaagcaggctggggccccatggtgatttctccaaattgctcattgctggttatcctgcagccttcctcattaaggaagagcaggcccattcctattctgcaacacttttttctgcaactgcaattaccaacaagcagaagccctgtgcaattatgctcattattgcatgttctgacctggctgcacctcccactctggagcagtggaacatggtcaccagccctaacgccctggagccttcagtgggaaccctcctctccaaacccagggcctgggacagggctgtgattgctgccccattctttcattcatctacacagaaaatgggagcttagtgccttctagaacagcatttagtatcaggcagggaagggcaccagcagtggtctcctgcccataaagactatgcttgcagaggagggaactaccctcaggagacacggcacttttcatcgtctggcctctcatgggatctgatttcagaactgtgtgttcctcttcatgtggggaatacctcaagtcctcaagagaccaccaaatggcttcaggatttcagcagagctaaggggaaatgggccagttaggggcattctctttcatggccatttctgcttcaaggagagatcctggtgcaggtgtcagaggaccagagttgggattctgtcatggtagctgactcagagtgcagccataggtgggaactcaacctctttgagcctcatgctccctgtctgtgaaatgagactggacctggtccttctaccttttcctcatgttgagactgtttctagctccaaccctgttctggaaactggatttctgtgatgagtgagaagcaggagaagttgcaggcagtatgccttctggagtaaagggaagtagattttggcagaagtctctgggaggaggcgtctttgtctcctgaggctggatgcctgaggtctggcctcacctaggtgttggttaccattttggaaatactacgaatttactttggttgcattccccattctactggatttagaaacattgaatcattcttccagtaaacaatcagggactacctgccagctgccatgtgctgtcctaagtgctcatggcattactgttcagctggcatagtcactgacaacttcaactcaggtgtggggtgaactggtttcaatgcttgtgggcctttctgctggacatttagggctcatcttaagtgcatcaaagaaggggcccttggaagaatctggactcccgagccctccagcaaagctggagccaggacatgggctgggtcagctcctgagatgactccagctgagtcacaaatctaagcgcttggctgttctttgcaggtgccgtaacctctcatttcctgacagcctgccagaggtgagcatcgtgttcatcttcgtcaatgaagcgctttcagtgctgctgcgctccatccactcggccatggaacgcacgcccccacatctgctcaaggagatcattctggtggatgacaacagcagtaacggtgagtgtcggagcttcccagggcccaggccctacttcctggctgacatctaagctgatggttcagcgtcgtggttcacatttgctcaaggctgtctgtggctgctctttctctggagcatagatgagaaattcatggtggccactgcttcagaaggttcactccgtctgagcatggcctctgcatcccagaggggtctggtccttaggctttttctcctggctggctactctcccctcccatattccagtgcaatagataagatagaaggccctgacctcctaccctaccatgtacacagtgaacatgtccagtgactcttttccatgatgcatcatttcacctagtagggttccacagcctctgcctggaagattgttcactggtgttatgttagcagtggcagtggtgatgatggtgctggtggtgatggaggttgtagtggtggtgatgatggggatggcagtggacacgtaactcaatgacagcaacagacttgttgaatgtctagcctctttgctggatcccctgttccctgttccatctgtccctagccagaccctgggtggcctgcaaacaccttgttgaagccatcaaatcactaactctctttctccagcactaccagccaccccttttccctggtgtacatttcttggtctctgattctttgcccccccatatgccatcatataccattccagactgaaagaccacattttgagacagctgaaaaaccagtgttcttgataggaccatttatatgaatgtatttctgataatgcatgatttctcaaaatagactgctgggtcactgtatcatagaaacactaagcttgttttatcttttgagctttctttgctgtcaggtaataaatttcctagtgaatcagttgctgtaatgagaagttcagatgggcaatttgtgatttgttrtcaattaaagctgaaatacattggataattgaaatgtatttaatctgagaaagcaaatcttcattttcattttatcatcatgtggtaagaagtgtgggagcagtgctgtaaggggattttagaaatttctgaagggctttgctggagaatcatttgactttcattgttccgtggacatgaagaaaggaaaaggcatcgaggatgcaaataggcaacatagtcttaaaggtaattgtctatcatgggggagacaggaagggctcagctcccatctctgatggctgcctaccatcatctagcctgggacccaaaaaacgggcgcctaagaaaactcccattccctagtgactaatgccagacagcctgactarcctgccccacacactctatccctggacttcacctaggcctgctgatcctcctcaygtcttacattgtaaggaggcacaggatggaagaaccagcattcaaggatgaaaacattccccaagcaagaggctgaactcctcacataataagagagaagagtatggagcactaggaggaagaaatctcggagcctttcatttcttccctgtagtgagaaccttttcatgtccttaaggatgccatttggactctaagtcatatggacaaagctgatattgagtctgagaaatttagataaggaaagtgaatcagatatagaggatttcctatttgaacttaaagagtttgaactctattttgtaaatggcaataactatctaaagcttttggtcagaggaatgatggggtcagagttgggcaatggaggaatttggtcatgctttattatattggcgggggaaaagggcatcttgaagaagggaaatggatgagaaggctattgcagcagtagagagagaagtcaagaggcctggagtcagggagaagttayaggcctgagaggtattatgaaggaaaaatctgttggaccatttggctgagaagccatgggcaggcgggccaacagaggggaggtcaatgatggctcagagtttcaagccagggtgattcagaggatggcaatgcattgccccagaagaggcaggcagcaggagcaatgccctggtgcagtagtccgtcatcagggatgcagacgagcagcaccctagacctttcacaaccaaagctctagagcattgtggtgatggttcagtaaagtatcttgattgtggtgttggttacacaaagctgtacttgtcatcacaactgcatcgagctgtatatgcacacccaaaccagtgcctgcctatgtaaggagagatccgaacaagctctgtggatggtagccatgtcagtggcctggttttgatattgtgctgtggttgtgtacaatgttaccattggggaatactgggtgaggggcatatgaaaccttcttgtacacttttgtgaatctataattacttcaaaatattaagttaaaacaaacaaaaagctctcctaggagattctggttcagtgagttcaaagagggttctagacatcgctgttttaaaaagcattcttttttttattttggttttttttgagacagggtcttgctctgttgcccaggctggaatgcagtggcacgatcacagctcccaggctcccaggctcaagcaatcctcccatcttagcctcccgagtagctgggacgacaggtgcatccaccatgccgggctaatgttttgtaatttttgtagagatggagtctcactacgttgggtagccaggtctcaaactcctggactcaagcaatcctcctgcctcgccctcccaaattgttgggattacaggtgtgagccactgagactggtcttaaaaagcattcctaatgattcacagctctgttagagaagstttagtttcaggaataacgtgtggcttcacttttgaacatatttggtgtccagtgcatggtgtgaagggccagagctctggactaaagcctgaagtcatagattctggaaccctctccaccatggatgataactgaccacggaaaagtccctcagcctctcagcgtctctttctctctctctctggaaaatggagatgataaatcctcctttgcttgcctcacctgcctgcagtggtcacatcatgtgtgactgtgaattgatccctgtcactattaccctccctgagttctaccccatttccaggaggcaagcacataagccagcaaactgcacggcgggagccccagaggggaaatgtgggaatacggatttggagtctcacgcgtggagtaattaaagccattgactggaaggagaggaggtcaaaagggcagaggaaagaaccgaaagttagaagcttgagagaatactgagggtaagatatgtaggcatcgggaggaagagcgttagcaggtgagagaggaggaatgctcgggagaatctggaagacagcacagtctccgtgggcagagagaatttcaggaataagagaactgtctattcacatgaaaccacagacaggtggaaggacaaggaacctgagcagaagccactgggtgtggaagggacagacctgggaaacctcagcgagaagctttagtggaatgttggagatgggggctgtcgaagccagatgaagataaagagcaggcagtgaggggagatttttcctcgaggattcttgactgtagaggagaatcacaagctcaggcaggaactggagcaatgttttccaaaaataaaaattaaaaattaccatcctctacagtaagaaataaagttacatcatgacccaggatgacacacccactcacacccatacacacacgatgggaacacgacttttaagaaacaatacttaccctcacaatgtgcaaagcactctgctattttctattatattctgttcaattcaattctattgtattttattgtgttctagttctcttttcttaaaggtaggttgttcttgagaccctgagtgcatattagaatcacttggagggctttaaagaaattcagggcccaggttttactgctagtgatttaatgggtctggggaggtgggcacctgaggccagagtttggagcagggcctctgaggaggaagatgggatccagggcacagaagcaagagttgcctccgaaaataaaggacttgtctttctcctgccctgtgagggaacagggaggcagcaggaggcaatgtggctgtggtgatgggtacccagagtcaagcgcagcagcaggctcagtggcctgatggccaacagggccagagcggaggccagacatggtgggaaggggcctggccctggctagagttcccatgtggaatgggacagggaggtaaccaggaatggggttccttgaccccaggctgagctgaaccctcaaaaggggaagaagagacactagagtgagctcctggaggacgtggcccctctctagccttaggacatggctaaaggcccttcggatctcagcctgacttggaggaaagcggctatggccagaccctgtgcagactccacgcggggagctgcttctcttgggcctctcagtgcaagactttcatgtttttcaaatcaggccaactcagctcggttcaactaagatttctgtagtaccagcctgggctaacggaaggaagagggtgatggatcagacctagtccctgccatggggagttyggcagataagtctaaagtggggatgaaatgttctaggacttggtttccaggctcggttctgctgctttctggccatgggtctctgggcttaggttttctcatgtgccacgatggggacatcaggccctgccttgccctgtctgcctcacagaggcactggggatgaggtgggggaatcggagtgaaagttccctgtaagcttctgggtgccaagggtgacttaaaatgacagtgataaaaataacagcaggaacaataatcatgacaacagctgacaagtagccactgttgaaagacagctgttttggtgggaagagcgcagaatttggcattcggccagcttttccattccagctctttctgactttgtgctacctgtgtgttcttaacctctgcgaaccctattttccttatctgtaaaattgagatgtataattcccacctcaggggttgttgggaggcttgaatgagataacacaatggaagggatgttggtgtttaaaactctaaattactcagccgagcagagccgtcggaatgtcttcctcactaagccttccttcccaggcttctattactggttccgtgcatgctggcgcctcgtgtctccccaagctctctttggccacacctttgctttgggtcaggcctgtgcttcctcaaacacaggaactgaggaacagggcaaaggaacagggcagtcaatcactgctttcttcttccaagcctctctagacctttagctctcgctcagaagccagggactgaaggctctgtaagtggccgttatgtaggagcctgaatccctgttctctgtctccttagcaactttctcaacaagctccactttttcaggggctggctccgatctatcatgctgtcactctgctgcagcagtctcaaactttagcatttgagtttggttaaaaatatggacatttggcagtgtgtggtggctcatgcctgtaatcccagcactttggtaggccaaggcaggaggatcacttgagcccaggagttcaaggccagcctgtacaacatagcaagacccygtctgtatattattaaaattttattttttgaataatatggagattcataccaggcatgccactgcctcaggacatttgcccttgctgttttctccacctggaatgttctttctaccccctcccctctaccctgctccatatctgcacagcttgctccttttcctctttaggcctttactcaaatgcctccttcccactagggaggtcagtgaatcactccgtttaaagggcagcactcctccctgtcactcctcaccccaccccttgtttcttttcctctgtatctccaactgccttctgacataytgtgctcactcatttactctctcctaattatttgcacatttccctcccccagtgtgtaagctccatgaagacaggggcatttattttgccacgtgaagcatctccagcacctagaatagtgcctggtatttgtagttgttcaataaatatggatttaatgaaagaattttgaatctgtagatctggggcaaggcctgaaacctgcattttagcatggctccagggcactctgattctttgtgagtcactgttctaattgttgtcctccatctgtgctgcagctgaggagcctgggacagctgcctccgcctcagctcccccagagctagcctctggctgcaggcaccactgggtggagtgtttcttcctgggccggggtccttggggcttccctgttgcatcccagggatatggcatgaatgtggggtggagtgcagaggagaaggtaagtttcttttcctggcctgaactcacttcccatcctcagagtcagatgatcaaccctgagcctccctgcgaccacgttacccaacctctgcaagcattcctgacagtagcgaccaggctctgcctgctctgcagctcgaaggccatgtttcccctcccctcctcatcttccttgtcaaatcaagaaaatggtgggagcacagctctgagcctgctggtttcagttaccagacttttcagcaaatcccaatggaccaatgtctttagctgggactgcatgattcaacctctacagacttccagagggagagaagcaacaggattttcagtcaatagaggcatctctgcctttgactcttggcattcattgcttcgttctttcagtccttcaacaggtttttggtggccacgtgttttgtgctgagtgcctggctaagcactttgggggcttgttcatgtgacacaggtattccagtacctggcacagagcaagtgcccagtgaacgtgaactctttcaggttccctctccagctgtcccagctgttccctcgccccatcccacaattcagccacttccacttctggggraaaaaaaaaagttttctttgctgtagtcagtttctgcttcctttttgaactcctgtcctcttttgataaacataaaaatcacatacccttctttcatgccacttgaaatttcaaagttaatttgaatttgtgattaaaagcacatcaaagcaatggtaatatcaaatattcttttaagaatcccataccctggagatgtctgtctgctctgggttggcagtgccttgcccaacctgaatccagcccatcacttgtctcctgctgctgctttcaagcaaggcaatggctggttcccagcycttcatgtgcttgaaggctggatggaatcttctgtctctcccagaccagggatctcctttgctcacggaccyggtcttcatgctggccatgtttgctagaaacctcccatatctgttgccaggagaaggcatacaactcagcgggcctcaagagatgggcagaaggaaactgtccctcccaacaacagtgtcagatgggcagaacccaaggtcagccaattaatcctagctggctcttgggaggaaactgcggacctacattgggcagaaacctgccagtgtgccacttctttgcatggcagagctgagctagggccctgggtcttctgactcccacagaagaccacatcctcccgcacaggcagtctcatcgctttgtccagcatgcacttcttcctgcttgtctgcactatctgtgggcatggtggcccatagccagaccatcctggtttgttcctttgctgggaatgaatgtcctccrctaccccacccactttgcttagctccagacttccaaagtcagcgttactaccactgtttccagaaactcctccatggttctgcccctagcaccgccccagctggattaggaggttggcctcagtgctcccacgcaccctggctcctccttatcctgctgtgttttacctggttattgactgactaaattacagtgagtagtttaggtcagactagccaaggtgaccagtgtgacaggaacatgatcctggtcatctccagaccccaacaacaactaacccagtgtgccgctcatcgtagtcattctrtcaattttgttgacaaaagaatagtcatgatctcccagggaggtagatgtggtcaccatctccacttcatagatgaggcagctaagtctcagagggtctaaaaaagaaaaaagggacaggctcaaggccacatagccaggaagtgctaggacaggaattcaaatccaggcccgctggccctggaccttgtatctcctctactctcccactcctggaagcctgggaggcatcaacttgggcacctcctctctggttctctcctgacagccagcccaccccattgcttcttagggagggcagaccagagccaggacagccgccacatgmactaaaatggcaggtccaacgtaggtgagcctccctggtcctttcttgggtgcaggtgatggctggggtcctgcatctactttgttgggggcagcaggcaggcttggccaggaagggtttcccaggctggtgttcaggcttccagctgggcaccactcagctagctgccactggcccgggctggagtttgacccccacttctccaggcctgggcctgagactcaagtgacccccagtgcccctagatagaaagagycctgaccaggcgcycccagctcattgagcgcttagtatgtgccagagctattttaagtacttcaccataaattaatcagtgccatatgatggtggtatggaccattaccaatgtcacctgatgtaacagggaggcagacccagcgaagttaaggaatttgtccagagttacagaggtgcgatttgactgtttggtttcagmgtctacaccctttaccattaaacaggctgcttgcctctggtacaccatgggtctctgattccaaacaacttatttgaattttgtccttatcccttttctccattccctctggagagagagagatgttgggcagcaggaccagtgaagtaggagacaaaaagggaacttcagagaagggtgtgtctgtgtcctagcctcaagctttgcctggagctttgcctggggtttcagtaagaaggagagatgggttgcatagaggctttctggcttctgttgggtgagaggtaattgaacagttggcagccatgctttaggtcaccttgtgagagggaggcagcttcctattctctytgaaatagggagaaattggcatgcctgtgtgagtgtgcatgtatgtgcatgtgtatgtctgcacatctttatacatgtatatgcaagtactctgttcatgtatgcacacatacgtttgtgtacatgtgtatcgtgttacatacatataacacatgtgtttgtgtgcatgccttgcatgcayatccatgtgttcatattcatgcatacaagtgtgtgtgtgcatgtgtgcacacatgtatgtgttaatgcatccatgtgagcactgtgtttgtgtgtgtattgtgtgtctgtgtgtgagtgtgcttgtgggtggatgcggacctgtgtgtgygcacttacgcagtagtgtgcatgcataagcagcatatacaggcacatgggcacgtgggcttgtgtgtgcttgtgtgaacagtggtgtttcagtccccactaacaatgggttgagcctctttcaccacccactgctacctggagccaccttcaaaatcctgatgaatgacaaataattgcwcaactgtgaatcattgttatttttaattgttggtaagaaagtcaatgtagtgatgaaatagaaacagagctccccagattgcttgccaccagctgctgggtccttccccaccccctgcagaacccccattatcccttggcccagagtctgcctaatcattgtttaatgtttcaaagattctgtcctacacaagagatactcattccaggctgtaaaactaccaacagctttgcatgcagctggaataattgcaaaagttaaaaaaaaaaaaacaacaaaaaaaacagaggaaaagaatggtccaacagtattgtgctttatggagcttaaagaatcccatgtagctaatcaaattacaaccaagactcaggcagcttaaaggtgtttacacagccaagcacatgggctgtcagcccgttcagccaaaggctctttgccactgcctgcctctatggctttgaccagtgcaactaggctggctcaccctcaagactggcagcaaatacctggcaaccttggggtgcacaccacccagtaccacctgagtcctgggttctcctattgttgctccttgctgcctgaggttgcctctgcctgccacatcctataccaggcctgagagttcctcttgggcatggccactgctacatctcctctggtggtgtccagcagcactttcccaagctcttactgtaatgacttatatgactcttgagtttctggctactctgagtattgaatgcccatctctccctgttgattcaagccctgacccyaggcctgggccctgctttggccactttctatggaagtaaagtttctctcatagatatagatatagatatagatgatatagatatagatgatatagatatctgacagattcaactgattcaactgtgtccatttctgaacctacctctcagctgccatgcatgattctatgccagggcacccaggccaggggcacgtaggggctaaaataaagtmtgtgctgtctatttgctaaattatgcatcctggtgtgagtctgtctccaaagtgccttttctaactgcatagtccagagaaggcaccttttggccaagtacatcaagatgctgtgtgctagcagcgtggccagtcctgacctctgcagagactctgcagagactctgcagagaagtattgtttcttcccagtgggtggccttgacttaacagcagtgcagcagcctgggatgacttccctgtacctgctggccagcaaccccagctttccccaaccttctctgcattggtcctgcstttggcctgcctctgtttcctgtcaacttgctgttctctgatggaatggaatcttgctctgatgcctgcctcatccccttagctgggccccagcttcccagctagccctggtcaatcctcttccttgaggggctagactctgttccctgtacaccaaactggggctctgcttccacggttcgatccacctggcttcctacatcatgggggctgggacttcccaccgataagctcctcctgaaatgagcatccttagtgatgcctaagtatatcagctcttgagtcacccgcctctttgtggaccagccccagggctcaatccatttctccagctctagtcctgcatgttgccagcctcttctctgctctcaccggcctctctgctgaggtcccaacatgctgcaccgctgaagctgcctgagcctggcagtggtgtgggtagctcatcactcctcttgtcccctttactcgatacaggaaactgtcttagagaatcaggaactccccagcatgctaccctgctgacgaaggacagcacctgggagggcaaaggaccttccttctttttgctcatgagctccctgtagcaatctacagcaagagggctctgtaccattttgctttacggactagccaaggtgaccagtttttgataaatgaagctggcaggaatcaaatacaaaaaaaaaaggccttcttcccctggtcagctgtgtgatcatctgtcaacagggaaagtccccaaactggagctgagtgttgggagtaaatcaggaggggtttctcytgccctctgaggggccctgttgccagccactgggatcaagctgtccctagaaagggccagggaacattacttagggccacagtgcagccagcaggaaaggtctccttgttcattcttggcacccagcctatctttctcagcagcttgaaaagacaaaatcaggtgcagacaatagttacagctgaacacagggcactccttgtatgccagggtcctccttctgctttcctgaatagttaaaacagttaaaaactcaacaaatcaaatgctccctactgacattaaatctttggagtatggaataacttctggtggaattgatttcctgaaaggctgccccaaaccatgcagtgacccaagtggcctccagtagcttcagagtctcagtgctcggcaaaaagtggagcatgcggatgagagttaagtgctgtagccaccccagctgctgcccatatctgtcctgcataattatctttcggaagatgagcacctccttgttggatggtgagggcgggaggtggtgctagagacagcactaggagttggggaagctggtgcaaatgactgggtctgagggtcccacagcaggtatgggctcccctgtgctgcatagcaacagaaatctgctctctcccgtggtgactgggaagccagttttggtgagggaggtttgtttgttctgtttttttttttcttctttcaaaaatgagagtcctaatcgactctcaggagacctaaattgggaaaccaattcaatttttttcaggaactgtctctcctctctgctcaagcccacagggacttgcaccccttctgctcttacagtcatgcattcatttaacaaattgagtaccaggcccaaggctctgcaagagggaggcagcagggaaccagatgttgttcctgccgtcagagaatgatagcaggcaagtagacaggtgttccagccctcatttggcacagatgcagactgtgcccaggttatggttgattttaggagctcatgtcccaagagcttatggcataagtagaattttagggaggagacgyaaaggcagcctgcagcagggtgttctagttaggcctggtcttggggtggctgccatgagagaaatcctgakaatcatattgacacaaagattcttactgcacttgtattttttatgttaaagtttgcatggttttttttcctcctctctctctcttttttttttttttttttttttttgagacaggatcttgctttgttgcccaggctagagtgcaggggcatgatctcagctcactgcaacctctgcctcctgggttcaagcaattctcatgcctcagcctcctgagtagctgggattacaggcgtgcgctaccatgcctggctaatttttgtatttttagtagagacaaggtttcgccatgttggccaggctggtcttgaactcctgacctcaagtgatccacccaccttggcctcccagagtgctgagattacaggcgtgagccaccatgcctggccactttgcatggtttctaataaaggattgaaacagaaaaaaagcacaaaacaaagaaatgtctgactagtgagcaggaagggtttttaccagcaaccactaacagaaggctagtttttctggatggccccatggctgactctgaccccttctgtgctgctagagtagagacttgatttgtagccaaccaaagagggcatggcctgcgtgcagagatatgtgattctctttgtgttttccatygccggtgcccatactgtgacttccagtggccttctccagtggctcaggtggttctccactgagcacctgacctacaactagggtagtgacctggttcactgtgtaggtccctcccactctaatgggcttcccttaaggggcattgggcagtttggggcaggcagccctaaaaactaatccaacatcctcatttgactggagagaaaactgcgatccagagaagttaagtgagtttcccaacatcacacacctaattcatggcaatgcctagagaccaaccctggtccagtgctttgctagctggactcattcattcaacagacattcacagagtgcattctcaagtgtcagccatcacrctcagcacaccaatccaaagaccgatgagaaagtgtttctgtccccagcgagctggcagccgagtgcagatgataacactcaaataagcaaagcacacaaagcaaagtgctgagtgccatgagccacaggtgaagggaaactgtgctggagaagcccagaggagagatctcagtcactctgggagggcttcctggaaaagctggcatttgaactgggccttggtgattgaatggatttgggtaaatggagatgatgatggaaaaagacagaacctgcctttgtttttgaatcgtcttaattagggaaggaatcaacatgataatttattaggtacctgctgtgttccaagcactgtgccaggcatatttacacatggcttctttaattttttcagtatttctccccatctcatagatgaggaaactgagattcagcagtaacttaatcctaaatagagacaacttctttgattccttcttctctctttcctacaaagcctcacccgatgctgtatgccccatgagggctcagtgaatgactctgaggactgaagggaaacagagacagaaacatggggatagaagagttttcaaagtcataggggaaggcagcactcctcttccttaaacaatgcatggctgagcacagagccatttagtagttctatcatcagaatacatgtcttcctcgcaggtatatacaccccgccttcaggctggtatattaacctaagtgaatacagacaagagctatttgttttagctaagcatctttcatgtgttagctcatttttccctaaggacattcataggagatacatcttagtattattaataccatgttcatttcacagatgagaacgctgaggctcagagaagctgcaggttacacagctgggaatggcagacccagcatttgagccctagttggatccagctgcagagactgagtccttaaccttgttctatgctcaggggtcctaaactcagttgcctaacaaggctagacagtgtgaatatgggatgtgggccgatgcaaggcaataaggagtggtggaaactggtgaacaaaagaatgagcccaagccctcctgagaggggcagccagsactgtctccagcctattgctggcctgcaggactggcaagttttctcaagttggagattcacacttttatgcttggtgggctgaacaagacacatgggcaggtcagatatggccctagtctgtctgtctgcagcttctgccatattgactcccactttgagaagcagaagcttctcttgaaatgctttttatctcaggcatccctgttgaaaaccccctcttgcactctttcctcctttctctccgtctctctcataattacttgttcttcacttctcagaaagtagccactccagataggctgaattagccactcctctgtgcaactttccttcactgtgtgcacaatttgagggcatcatcgttggctatatggtttagttccactgattcagggaggccccttctgagctgagcagccgtttcagaaaggcgcatggttttgcaatggtggtgtggattctgtccctgggttgtagactcagatgccatcctgggtgagtcacttccctgaatcttgagacattggaaggaacttgaatcaggttccctggtccaagtcaggagtaggaatagatgtggccagtgcctgagaaagccgaccaggctgcagaggagtcacatagaggaagggtcacttargacagcttgtcagtcaggtggggctcatctcagcaggactctgcccaggagcaagggctgggggaggggatggggcagggctcagtcctattcatgggttggctcagggtttgggctgctatcattttgaggtgccatggctcgccacgctgccctagcttccctaattcccttcccctgtgtggcttcctcttcctgcactgcctgtgacccgctaccctgggggatggttgtggagtatgtctgtggtggctgtggttggtgtggtggcggctgccatctgggagtaaataaccacagcacgtcagagctgaacaaaactcaggaatagatcttgggccccgtgcttctctcatccagggaaaggaatgtgagttggagctttacaaaagcaaatctttaaacctttcctcacctgatgaatttgatggggtgacagaaatgaattagaaattaagtaggggctcagartttacatgagctccatgccaaatggaaattaaaaagagtgtctccaacagggttaatggtgaaggtcaggttcccagcatccttggcagggtgtcccgaccctggtctcgggaggaaattgactgaaggatcctgctgatgagatcaggaggtgcagagcgggttctccatcagacagtgggaaggaattaacttgtcaccaaatgacattcagtgatacaacagaaaattccagcaatgcagggacgattttaatgccaggctacccagtggtagcactgactctccacatttccctaaggagcttagacattgaagaaaggaatgtgtctgcattggacgaggcctctggctaattcacaggcccacttcctctggactgtgtctgcgagcttgtctgtgttgtcaaatttcatttggcttaaaaataagaactaatgcagagaatcaaagaaaacaaagttgtttgctgagtgttcctgaccagggctgctcaagcatgaggctgaagtgattttattttctccgaaaagaacattcaaggttgctgtttaatctttctggagtgagttcccacagtcttaggtgcccagctgctgccctctagacctgtgtactccatattcctatgacatgtgagtccaacagtggagagcgttgctgcttgctgaattcctgaattctacgtggcaggaaaaacaaawcccaccctcctgctttgcaaatgagatgggtggatggatgcatggatgcatgggtgggaagacgcataggtgtgggtgggagatagattctgtcttttctgttctatgttttagggtttttatgcccactttagatgaagggattgagaaccataggagctgagtcaccaaagttctcactgcaagatggtggccaagctagggtttgtgcccacatttcccagctccaggttcaatatggctctcctctcctttctcatatttcccactagactctttttgtttttacttatgtatttctttaactgccttgtacctagagacagactcacatgaacttggaggacctacttattatacaagtaggtggctacaaggacacgttattttctcattcggcaactatttattgatcactgtgtgggcagaattctaagtcatcccccacccttcccagccctgattcctgggaagtggtgtatattcacttcgccgagttattcaagcaaatactaatctgagtcctgctgtgaggggaattggctgacgtaattaaggtccccaatcggttggttgggcctgacataatcacatgaaccttctgaaagcagagtgttctctagctgatggcagaaggggaagtcacagagatgtactctggtggcctgagwagagacccatgctgtgaactgtccatgcggcaaggagattgggcagcctcttgttgccaagagcattccccagatgacagccagcaggaaagcagggacctcagtcctacaactgcgaggaaacgaattgtgccaacaacgagtcaatctcaaagaggaccctaagccccagttgagaactacagtgctggccaacaccttgatttcagcccartgaaaccctgagcagagaatccaggctcattgtacctggacttctgacctatagaaactatgagataataaatttgtgttgtttcaagctgctcagtttacagtattttgttatgcatcaatagaaaatgaatccatcactaaccgtgtgcaaggccagtgtgctgtacactgggaatatgagattgacccagtccctgctcttacagagctcccagcgtagtgtgggagacagacaagaaacaaatgaaattattacaggccataataaatgccttaaaagacataaaaagaatgatatgaaataaatctaatgtggggtggggagcatgcttcaggttagatgattggagaaggcccctctgagctttaaaggatggaaggagagagccatgtgaagagcatggaaaagtgttccaggcagagggaacagcacatgcaaaggccctgaggcaggaggtaacatggtctcagagccacaagaagtccagtgtggctggagggtggtaaggaagcgggaggatggcttgagatggtattgaagaattaggcagtggccttgtcatgtgggactttttagaatattactttcagtgcaatasacaatgctgatgagctttcaacaaacaaaagtatgcaaatgggcatttttgaagctctctctggctactgtgtaatgaataatttgggaatgggtaagagtagccacaggaaaatcatctgggaggctgttgcgatgcttcaggcaagacatgataattgtctaggctgtaatggctgtagggagagaaaagtgggtacatccgagatctatttggacttgctgatgaatgtaggggatgaaggaaaggaaggaatggaagatgcagctcaggtttctagcttgagtgacggggtgaaggacagtgcagtttgcaagatgggccagacagaattagaggaagaacaggtttggtgagtaagatccagtgtgaagtcctgaatgtgccaaatgtgacctgcctgtgaaacagctgagggacgatctttagggggcatttggatagatgggcactgctgaacagagcggatacccaggctctcggaagaggtcaggacaggctgagcctggcttggctgcacagctagctccacagtcatcctcttgaagaatggtgaaataccctagttataacacagcaaggcttcaaagaaccagggcctggacccctggagtagtcaacttcccagactccctctgctccatgctggggccccgggtgcagccacagacccagagtggaggcttctgggaaggagtggctctgatataagctgacacctcagtgagttacttcaattgttctgggctagtggtacggtgcattaagcaccaaattatataaacctgaaattgcagtctaatgttgttaaggggcctgagggagctggagaagaatgaacgtgaataaggaatcgtccgtaggatgatcaaatccctgattaaaatcacctccccagatcaaatggcctccagagaaagtagagagtgcctctgggtcctaatggggcatctgcacctccagagggatgtttggccagactattgcttcccctccagggccactcagtgcagaagagcttcccaccggggtcctcaggcatgcacagcagccagctaaacagggcctgagctacacggtgcagggcttgtcccagcttctctagcttctccttggagaggctgttcccccagaagcagactctgagacacagattcaactgcatgcagtttattcaggaagttcaagatatgccagtggggtagggagataagacaaggaagggagaccaccaataagagctgccaggcaccactgtgggaagatcttaatccttttgggatactctgggaaataggtgtaaaattcatgccttagaatgatcccccttgagagaggagggagctggggtatttatccactagctcccttccatcattggttgagagttgctttctggrggtgttaatttctagcacttcagccttccacatgctggggcagagcagccttctgtgcatttgaatgaagcccatggacaaaagttctgataattaaatgtggtgagataggagtaaggaggatggttagcagggagcactttgaagaaaggaggctccaaggatatcagttgggcatcaacagcatctgctacaaggtccatgcacatatgttttgacacttttaaaaactgcatttctaaaagccttgggatattgactgtgtccaaatctacacaggccaactgcaaggcatgctggaacctctgcaggtcatgcagagaccagggttagaccttgttaagcaagactgtggtttgagcacctcctgtccacagtgcttagaacctggggctccatttagttttgtgactgtgcagagtagggccatctgatgatggacagagcacctgtgtgaagcggtggcttgggttatataagactcagtcaggctggggtagggatcggggatccaaagcttcagcagttttgaagcatagtccaaaccaggtctgggggaccaagggtaaggttccatctctgggaaacactttggcaaattctagtaggggtctagtagggccctagctaacaagggtttcaggtcagaccagagaatgcaaaccttaaattgcagtggagccacacgtataaggcctaggtacactttggggaagtgggatggaagcatggttggcaacggtgttgaaggcactcccttggcaccccacataccagctggagccacgttactatagtggatgctcttggtgtcccatccagatccgttttgctggccagttcacctatccccaggtgctatgagtgttggtggccagaagctccaagccctaccttttttgaaatttctgtttccagggatgcctcaccccaaaatgcccgggatatgaggtcctattccccaatatggcccagaaccagtggctgaccgatatgggtgtctaaaaattccagccttgcctcggatgggacaactctgagatgcgctttatgccccagggctccctgtggggtcagagcgaggctagacttgaatggtgcagctgtttgctcagcctcttcccctgccctgacttgcttccctcacttgctggccaggattcctcaagggcccttcctcggcaaagtgtttatttaagaatcaggaatctccatctcatgctccaccttgagagagcatctctaatattgtcccatgccaagataatgtgagcagttccaggctgagcaggtgagagatttgctgtagaaggatggccgtctgccccagttggcctttcagtgccaaaacaggcactgttctgagcagaccaagaagatgggtcaccctatgtatcagcatctcaatcaggatgcattgagctcccgtggagcccagagctgtactagattctgtgggagcctaaaagaagcaggagaacatgtctttcatgaaattcaaggcttataataagcaagggcttatttctgcaaaccttgccctctgtcctggggatttcagttctagtatattcagatcactcctcgtgtgtagacagcgggaaaaaaatgttgtccaggctggaaggcagtggtgaccacagctcactgcaacctagatctcctgggctcaagtggtcctctcaccttaacctcccgagtagctgggattgcaggcatgcaccaccacacccagctaatttatttttgtttatttagaaacagggtcttgctatgttgcccaggatgatctctaacttctgggctcaagtgatcctccctcctcagcttcccaaagtgctgggattacaggcatgagccactgcacccagcctccactaagttctatgaacctaccaagggctgtggcacccaggaggcattgacagagtcaagccaggaccccactgtctctaacatgtcctagcaggaggctgtcttggagggtgccagtgtatagttccctatgtatactggggagggcttgagagatgttgtctcagtgacagctaacagcttgggttaagtaagggtcacccaggccttttcacttgaagcaccaagggctgctgcatttctggagacgcagtaagacaggagacaggagccaccagttctgagccataaaattagacagccatcgttcaactaaaattccagacccaggggaaaatgcctcttagtgtgcatattatctgcagcaaagcaaagcagactttcaggtgtgtcattgaaaactgcaggggtgagaaatcttgagaaagttttagcaagcaaaggatggtaaatggaaattaattatacagtgcccctgattgctcatttaagacatgtaaaaataccaccgatgtgccctttaattcatttgcygtctttattatttgagtataatgaacataaaaatgtgttagggcttttcctaggtttgcttctgaactcacttcccttccccccaatattccacacaatcttcaatcccccgaccgcaggatctgatggcagggtgctggcaaggagcaggtggcactctcaaagtgggtaatttgagcagtttcatcaagagatgagtgtagaggtgtgagcaggatgcaaggaagctgccaggagggacagcacaagaccmtggggctagaaacagcaggaatccctcctactccaggcctgaagggagagaggacacagggaaacaggagccagcacagggagtccttgacagggagaggctgggagattaaacaccctctctctgagtttcccactgtctctgatcctcccctgtgggagggccagggagccccgtccagagagacaaagaagggtggggagaggcggagggtgcccagcccatgctgttgtcttggctgatagtgctgcagggcgtaaccctggtagtgcagggagctttgagttaacttctagttgctccaatggagtttaaggtttagctatggacctgtcactgtgtattaatctttgtttacatagatagcagggatagaggtgacctcagacaagacagacagaagtcagcccacagaggaaagaagacctgagactcacatagcagaggggactcaggacttggtccagtccccttattagttccccgttccaactcacatagtaatttggggacaaagctagaaccaaggacaacattgaataaaatgcagggcacaatgactgtctttagaaagggctgagatcagagattcctgcatggagctgcctctagtgactggggagagcatggagctggggtgggggtgggcagagaggatacggggagttatctgggtacagatgtatcatggggcttcactttggggaaccggggtcccctagaggacctggctgagcacaggaaggctggcttgtggtgaagatagagatctgacgagtcccaggactgtggccgggtggagtcccaaactctctccaggccttgccctttagccagaccagactgtgcagagagcagaggcggctttgattctgggacctgctgggcctgccctgtgggaggacagggatacagactgcctttagggagttcacgcactaggaacccagacactgactgagtttccttcccaggatttgagctgctgaccctgagcagggagctggggagaagagcatcctggctgcccccatgagccagtagctagaagcaggtgggcagaaggccaccagscaccagcctcccacgcctcagcagggagtggcatctgttggtagcatttggaaggaaatgctggtttcacctctagcctgtggtaccagggctgtttttaattaaagacacattcccttgaaaaatacatcgtgacacctcaatgcctcaccaccacgtcaaagttggaggagttggtgattaggacgcacatatgtgtctgtgggttgctgctgttttgccttttggagcctgatcatctgggctcacgtgtcagccttgagaacagcctaggaatgtagtttttcactgacccaaatcaagtggttcctttgcagagcactgctctgaccctggccctgtgccatatatactcatcctgtgtcttcaaggaacttatggtcaggggtgagggtggaggctccagacgccatggaaactgacttgggcccagtaggggctgttagcatgtcagatcagcactgggtcctagcaaaaatagaccttccctcctgcctacgatgcaggtgtgggtgccttgccagttccccacagagactgagggggcagcctcttttcctttatataagaaacatttgtttaagtgggagagtaggagtcacaacaggtgaccccaaagagacggcgactcttggaaggcaggaatgcgacttggtgtgcatatgcctcctctgcccgactcaccttcttccagagtcttctctgcataaatcttgggtgctctctgatctgttcattgagaggaacattcccctaggccacatggcggtatattcctttttttttttttttttttttgagatgaagtcttgctctgtcactcaggctggagtgctgtgccacgatcttggctcactgcagcctctgcctcccggcaagcaattttccggcctcagcctcccaagtagctgggattgtacaggcgcccgaccccaaacccggctaatttttgtatttattagtagaaatggagtttcaccgagttgaccaggctggttcaaactcctgacctcaagtgatccgcctgccttggccttccaaagtgcttggattataggcgtgagccaccacgcctggccagtagtatatactttttaatgtatggkkttctgattactgttttgtataatttctctctctgggcagctctattgtaaactcctcagggagagggctayatcttagacacaatgtttcttatagggcgctcaggacacactgcttcaaggagtgaatgactgcgggtggggcctccactcggtgcatccaacaggcagctgggagctctgccctggcctccctccctctcttctgtggagcagccatggcttgcygctctttactcctgctgctcrtaatcccaggggatctggtcccttttcctttagctttccaaacctttgtttggccatgctccctcttctcctttgccctccttttaggtttattaagttcagtggccaaataaagttttgcagctcccttgtcctgcagtgcctcctgactgtctgggataacasggttactgggaatatctcctctcctgtcccctaaatcatctggcagcattggctggctacatcatgcagctgactttgagaacactccgcagtgctgtttctgaataataataaatggggctgaagcccagtggcctttgctatttatctctggctctgcagaacagagacgtgtgtgctgaagtggcacaggctgtgtctcagcggtggtggctctctcaggggaaggcagcttccctaattgcctcttcattgcagaagtggcctggtctgtttcctcaagggaatgtttgctaatctgattggagggtgctttcagcgattcagcaccagccttttgcctggtctgtcagaaagccacacgattgcaaagaaggatgactgtcagctggacacgccaacctttaaaaccagcccctgccatccacagccatcctcaggcactcctcccctttayggccttggcctgaacacattgtctctgcctatgacgtgtaaaatcccagcttgttcccaagtcctgggcttggcaatctgctggtttaaatccattaggctcagtactttggcaatgagcttgcttcctccctgaactgagtaggttctttctccacttaggctattctaagctgtcctaaggaaggcctcctcctggtccaacctggccccgagaccctcacctcagtgcaaaccctccagggataatattcctcctggcctcaccctcttgcaaagaacctgaagacccacacctatggggcaaggccttgggctttcttccaaaagggcggggatgggaacatccactggccaaggacatgaccctggactatatttgactttgataattcccatgtcctttctgttctgctggcttttatctcaggcatctcccatgtattctgattatcatatttgttttgatgactgtgattccagaatatggctttggccacattttgaaattattttggtatactgccccgacttgtatggcattttaaccctctgggtccctggtgttcaactttgcctttattgtactgcaatggcaactgggaaccatcccttcctttcaacatgrctgaaatagtacataaatgtygaaccatttctgcaagcgactttggagatggacagggggctggaaatatcagcrttttgtgatacttaccagctttcagttcatttagtataaaaagttagccctatggagacagaatatttcaacctttaactgtaatttgatagttgtcaccagrtaccaaggtggaaaaccagaaaaggtacaataaayagctgagctgagtcattacaacagactcttatcttgtagaaactgcagacattatgatgattatcctcctacctaccaaaggagggttgtctacaacagccctggcagccactaacccaggctatatgcttagcccatagtaggtgcttggaaaatatggctattattttaaaattcaatgacatacaattgctctcacagatatatttttattaagatgatgatataagttacacagttcacaaggagaaaatcacaatagggagatacactgtgggggaatgtttatcctcatgtagctgtttgggactctccratctctctgctatgaacctccgtgagatgagatgtgaggcttctggtccagcakgactgccgacaccttgcttgttgtagaggaccatgttgaaggtgctaaaaatcaaattaggactagtgcagcagtaaggctgcctgcagcaagaaagacatgcagaatataggcatagcatggaaggatcacacacccatatgtcctccttgccacatagaactcttacccatcgctgcatgagtaatcttgacttttctcactctcaggaaacgtgaacttgctctcttccatctgatagcttctaggcattgaaaagatatctcccagcttgcagattggacaaaaggcgccctcagaggrcccccacttgtggtctgcattcggcgcgtctctctaactttcctaaggagaaaatgtgatcctttcctgtgttctgagacttgcccctgacaaagagccctcttgcttctatgtggttctctttgctctaaatccaaaagcccatggaagaagagaccttgaaccccagactcatgtgcrcaagtaccctcctcctccaagtcagtgaaaatctgcgacacccttccacctccatctcattccttccaaagtctagccacttcaaattcactttgaaaagrattattttaactcgtctctgtggaggagataaccatggtcttaattttgtcttaaaaacaatataagtgtagtgggaataaaaccaaatgatttttaacagtgatgccgtggttttctcatgagtctccttcacagcctagaaatctaaaactaagggagggaagaggagctgtctcctgtatccaccttgccctgaccacccacaccccacattgcctcccattacccagcacagagtggagagaaataagagtggaggccattgactcaggttgccacggccggggctcaaggcacagaagtgtcaggtaactgagtctgacttctctaaggtacaagaaggtgtctggccacctgacatacagttatgtgggagaataggaaggagaaacacagagcacagcaaagcagctctgttgcttcatctgttcccccatgacaggcgggacccctttcatgctctgctctaggaaacatgattggcctgggtggccatgggctgggagtggagtccgggtctgctgaggtctgggttaggtgtggctggggcatgttcaagttgaggccaggtggtggtgaaatcatagctgatggagtcgccagggtatggtcagggtctgtgcggggctggagccgggakgaaggttgaggtcaaaaggatgttaaggttgagatgaagtcagagttaggttgaaatgagagttgagacagagagagtcccatttgaatgagaatatggytgcgggcagtaaagcttgagaggaattccagaacgcagggtggggcggagggcttaggtttggatggagccgtggttcagatacactcagacattttcctcccacgtgactctccttacttctataacatggaatgtttggctcactccctgggcgccgtttgatccttaactccttccgggccagggcttacatcagcctttgagtgcttcagctcctgctcctgctcctcttgccttgctaaatttcatgggcatttgctttccctagggagggtgagagaataaaagcagccgaagttgaatccaactaatatacccgcttgtcttacccctattcacagatggatggtgaggcagaggcattggcactgaagcccagggctcccctggggaattcagtgatcaatgccatccccatttcctggagcagcgataattggctccatgccgtgcacgcatgaactcccctagacactcactcctttacggaagagaaagcccatttcatggggagcccatgagacatgggaatgctctcctcctgctgccagcaagtggcggggcattcgctcatcatttgcctggtatctctgggcacagctccctcagaagagccaggctgcctggatcctgcccactgcacatgactcctctggaataggggccaggaattgaggacagggatcctctgaccatctaagggggagcagytacagctgctggcagcagggctgggtttcctctgtaccatccacagcaattaaactgaaggacaaggagcaacctcaccctcttctgcagcatcacggagcactgtgtcctacagcccacagaccgtcagcactctctcctgtacctggccagggggagagtcggcacagcagttagcagagttcacagcacagttgagggtgaggcaaggctactgtctaccaagcaacctgtcctccccaggtggtgggcactggcttggatcaaagcctctctctcccatggcagaataacaggggaggagagagtatagccctggactaagaccccttggggactttcagaaggagaagttccagagggaagaaaatgtgatctgacctctcagagacaaagaatgacacatgaggatggtgaaaggatctagaagtayagtattcagtttccagaagggaagacttgggatgcccaaagcagctccccaaatcaggactggctggtagcagagttcccctgggcaaacacttggaaccagtgggtggatgtgactgcagagtagatttcttgtatacttgagaragacttttctctcacccacagccattcaacaggagaattagctgctttataaggtagtgagttccccatgccaggagataatcaagcagggcatggaccccatatcggaaatgtgatgtggaggattcacacagtgctraagggttggataaactaactgtggaaggcccttcctgtgggaggctttgagaaggatgccgcaagttcaaggtcaagtgtttggttacaggcattgcttagctctctgcatacccctctgctgtacagacccctgatttgttccctgtctgtgtcctctcatctcctccacatcahgctggagcgtcattccttctgccctggggagagcatgattcttcctaaaggatcacttttctttcccagttctgaggctcactttcctcaggggaatgcctggggcagagaagaaagaagcacccactttctagagctgtgctaactccaaagagaaacaagcattacaccatctccggggcccgtggggacacctgaggctccttgtcagatgccaacagcactacaagaagccatttgtatttttatatcttcctatttccctcctgcagacgctgttcttacccgcagctgcaaggcaggtgcattaaaatgccacactttaggtttggaaaatgactgggatttatagttccttaaagagtttttgggacactggctctatccatgaaaaagaggacttatgccttgagataatgaagtttgaggacagaaagccatgccatgtgcaatccttctctccaagagctgyggctgatgtcctcagtgtcacataactccatgccctgagcagaggcctatggacaccttgacaaaagaagctcatcattttgctttttgttgctgaaaagttctgcccagcatggcagcagatcagaggaagccacccaccatcaaagcctggttcaataagataaaagcagtttatgattgaagacaagctgtcatcatggattaaaacatgtctacgcccacaatgacaacagttattttttctgagaatattggatgagttgcttacatttcataaatgaagaggaaagaaatctaattccaccaggctggatcgtttaagacaatctctgttctataaacactctgaagggtagcgttcccaaggtgacagaaaataaaccatgattgcatgattcttctggtgcctatttgctttctagcctttctgcctttatgtgaagaattctgtgccagccatctgtgattaccttgaattcacctaataatatgtaagcctacttcatctcttcttgctttggtacatactattcctctaactagaaggatttgtctcacctttgtccacttggcaaacttttctttattccttaaggcccagccaaaatgccagtgcttctgtaaagcccttccttactctcaacaagagttagttgttgggaatttccttagctatctgtacacacctctatggtagcactcaccatttagaacggagcttatggatctattgttgtatctgccttccctttggctaggaactctttgagacaagggactgtgtctctttaatgtttagaacagagcctggcacacaggcaatctaaggttctaagtaaaagtttgctgaatgtgcattgtgtactgtatacacagcaacctggcccttctcatttatgactttgaatgataatattaaatatgcgaaagtgaaatgtttgatcagagcaacagaaggggctattccctagtagaggaatcccagtatccttgttcctagaagatgagtgtatgctcaggatgtcaaaggggtacttggaatggccccctcagcatctgcatgcgttacaggaggcagggcagtggggccaagacctgagcctctaggaccgagtgctgggaacaggccagctcaaccatgctgcccagcaccaaaccttgcagtgagctcatcagagctgaagtcacacaatagcctaagtccttgtgaaggatcacatttactggctacctccaggaggttgatcatgagtttgtgtgttgatttgttcattccccatttaggaaaggagataaattttctgtactctgagctctcagatctggaatgtctgaggttgaacatatcatgatttcctgattctctyctgggtttgcaaaggatccagaagcatcctttttcctgacggaatggagtttggggacctgcagtgggtcagatggagaccctttgagagactctagcctggtgttttgtgtcctccatgattggaatccagtcttcccctgrtctcgtctcactactgccctcctgtgtcccgtatccaagcactgcctacgttcctgccccggccgaccctcagccattgaagatgtgggcacttagccccgctcctggcactagaaccaattttcacagttgggaaaatttaacactctttggatcagtaactcagtggtgcatactcatggcacggtcccaatagaaagagattggcagcaaatggaacaagagctagacacctactccatcaccatccagccaattagagtcgagacaagattaacctggggacagcacagattttcctggtgacatcaaagctgggagtgagaagcatatttaagaatggaaacaaagtgaaaggaatcctagagaactcctttgccccttttgccatgtgaggacacagcaagaagacagtggttgatgagccaggaagagtgccctcaccagacactggatctgctggcatcttgatctagaactccccagccttcagaactgtgagaaataaatttctgttgttcttaagtcactcagtccatggtattctgttgtagcagccagaacaaagaaagacaccttcgttagacagggcatacattctctggtttgccgcagtccttgattactcacattttgagtttgcaaccttcctcaaggatatgaaggaacactttgtctaatgatcattgcgttaactatctattgccatgtaacaaattataccagtcttaacaggttaaagcaacaaaggcatgttactgcacacaattttgagtgtcaggaatccaggagtgtcttagctgggtgggtttggatcatgaggttgtagtaaagatgctggttagggctgcagtcatcagaaggtttgactgggcctggatggtctgtgtggatcttttctcatgacatggcagttggcttcctccayagtgagtgatccaagagagagtgtccaagctggaatggtttttatggtttagtctcagaagtgacacatcatcacttccactgctgccatattctattttttaggagcaggcaactaaatccagcccacactcaattaaatagaaataaagcttcrtttttgaagataaaaatgtttttaaaacctgtgtatataaccaccacaatcattaaattggataatgcatgtaaaatctttattgctatatatttaacacatagtaagtgctcgataaatgttaattgcaatactaagagctagcacctattgagtattcagtacctgccaggcactcttctaaaagctttacctgcattaactctttaacaactctgtgagttgttctgttattgttcctaatttataacataaatcatacacccagtgaggcagaacaaattgcccaagtgcatatgttgtaagtggggttgggatttaaaccctgttagtgaagccctcaaaatctgtccatttaaccattatactgcactgactctcaaagttttatatcgttactgtttgtagtcattcttgctgttgttgttgtttrcatgtgttcctgacctgcagccctagcctgttaaagaaatgtgatgtatttattgacttgttctgataaaaaaaactatgctgggctgaagaatcgccattttttgacacaggcactcaaaacccaccccttttcaatcttgatccttgctctttgaataaaggtgaacctcttaaagatggctttcagggccttactttgggctactataacaaacttcaatagactgggtggcttaacaacagacatctgtttctcaaagtactggaggttctgtgatcagggtgccagcatagtcagggtgtggtgagggtcctcttccctgttgcagaaagccccttctcatatctttacatgatggagagagaaagagagagagaagaagctctctcatgactcttataagggcactaatcccattcatgaccacatgaattctaactacctctcaaaggtcccaccttctattactatcacattgcaagagtagactttcaacagatgamttttggggaagcatgtttgtccatatcaggccctttctttagggttggctccaccttcctttcagctccagctccctctcactcctgtgcacctgctatcctctgccctggctgcagaggcttccttcagcttctcttaagcacctccctctgtccattttcaggatacttgtacatgctgttttcatgtgcctgggacattgttcttccactcgtaagaaatcttgcctgtgcttgagttaagtcccattgtctgtagtataaataatcattttcctctcattgggttaaaatcccatgcgtccatctggttttccaaccttttcttctccatatcaaaacttcctattagttcagtgataacccaatgtcctgtgatgtggtcacctggkctgggaaactggagcttcttgggatcagtcaggcactgtgtatgtgttcatttttagcagagtagttaattgcgcagagctgaagcccgactgcctgagttcatatcctggttctgccacttatgagctggtgacttaccataaagcctctgaatttggttttctcatctttaaaagagtggggattaaaggctctttcctataagcttgttgggaggagtaaatgaattagtgaaaagtgcttagaaagtgcttgctgcctcacagccaatatttcctatggtgactatttagccctttcctctatttcaccagctacccagtgagctcaggcagagctagccaaggtagtaatgcccagagcatgggtttatcctaggacctctaagatttagacagggaggtagtggacacagaaggaacacgctttggaaaaagacatatacagatttgaatcaagcctctgctacttattaagtgtgcaatcttgaacacattgcttaacatcccagttttctcatctataaaatgcaaataccaaaagctcctctcagggttgttttgaagattaaataatgcctataatgtgtggagcacttcagtgagggaacattgcagttatttaataaatgttaatttccttcctcttcccttcaaattgcacattagtctcccaggcatggatgcaagcgkctgaatggaagctgaggggctgcactttctctccggcatctcatacagtatgccattggccccagccagcggccccttcttgctcatcttcttaactgttctaacagagcccaatcaactgcaattttgaatctcctttctattttctttctatgcccttttaaaaatataagcccttgtgggccgggtgtggtgcctcatgcctgtgatcccagcactttgggaggctgaagcaggtggatcacttgagcccaggagttcaagaacagcctggccaacatggtgaaaccctgtctctactaaaaatacaaaaacaattatctgggcatggtggcaggtgggcggctgtagtcccagctacttgggaggctgaggcatgagaatcacttgaaccggggaggtggaagttgcagtgagccgagatggtgycattgcactccagcttaggcaacagagtgaaccctgtctcaaaaaataaaagtcctcaagagttctccaggtcctaattattctgggtttcctccctttttcttcctgctttggatcatcactggttatacaagcagaattttggttttgagaatctcctcccaaagcctacaatccacagatttctttcccatacactctttgatatctgtctactaaaacccaggctctgtgaataccyggcctccccttctctctcaagcaggcactgtgaaaagacacgggcatttcccttacagttcccaacattccacctcaccactcaattctttgtgggtgataggagttgataagcccagaataccaaaaggctttgaatagagcctgcctgcagagtcctaggagaaccatgggtggtctctggagacctcctaaataccccgaaaaaggcaaaagggggtctgtgtatgtagatatgtgtgtgtctgcacacatttgccatgggggtgcatttgttcacaggaaaagactcctaggtttcctctgactcycagagacccccaagatgcacaggggagagaactatggcatcattctctccagccactgggagaggaagttgttagctcagcaagttgtccagcaccctgctttgactggaatgaaagcctttcctttggcagccaagaccctccctattttcctccccactgatgctgcagtgcgggccagaaatacagcctctctctccctccatctggtcagagcatcaactgcagattagagatccagagctctcacctctgttcttcttcccttttgacctcaccaaacactttcacccttagattaggtggcgttaatccctactgcccccaaccacactattgccccagactggagtcccgcgtgcaaatctttgcaattgccatgagatcatccccacrcttggcttccattttctttgtttgttaccaagctgtccgtgttgctatgtagacttctgaggagggaagttttgttttcagctcccatctggatagtttcctcgtctgattcatcggtacctcccacacgtgaattctttctccatcatccctgcagctctccatagtaacccatttcatgcrtttctcctccccccactgctgatgacatcatttaatctctaagcaractctctcttcctcacctctcgaaatgttgcccttcttgatccatstcttgtggatcccaggccagaatcgagaaagccaaacactgtttgcgaacaccactgacagacccagccgctgtcgtgccagttctttgctctttcaaattcggtgagaaaaaagcaatgaatgtatcacacagctatccgagttcctcggtttcctgcccagactttaaagacttttctctctaactctttgggactgttcagccccatggggatcagcaacagagggaagtggttgttgctgggtaaggctcagctgtaccccaggaaaatggcacctctcccacctggctgtgtcccccctccctctcccctccccatctccaccacttagcagtagccaggaacagctgtccttgtgcccactggttctgagagtctctttttaattagttgacatttgcatcgtggtcatggtcagtgtgctttgcctacagaaggtctagctttcccctcctgtttccccagcgtttcagagcctgctctccatccttcgtgccatcttccttcatccagagtgaggttccctttcttcatttcggctctgctgcttgtttctgtcctgctggtctttctcccaatgggcctccttccttctctcttttctttgcatcattacctccgctctgcagggagataccttgttgaaagtggttttttaggttcattcacctccccttcaagtgcagtggccacttctatttgccacacatcaattggcccttgcctcatgcaggaacacctaaagctccctgaggtccctgatgttgcctcctcaccatccttataggctctgggtctcagtttccccatctcatgggatcattgtgaagactaartgagcaaatgtgggtgaagcccctagcacaggccctgctacatatgcagattaaatgagctgatgcagacgaagcacaggccctgccacacagtgggcactgaagcaggccaaggccacctgtcccctttccttcttcctgtttcctcttggctcctctgctcctggttggacacgatcacttcattaccaatcaccaggctgtcttctgtggctctcttgggccagcagcattgtaaacttgtcatagaggcatggggacaccagccatgcccaaccttccaactgtgggacctcacaaggcccaggttgacagggcctgaaccttacttaaagatgggtgcctggcactgtgtcatccacatttttgctgaatgagtgaatgaatattcaggaaagatgataaccccagttctgaacctggagatcaactttgccttataccgcagagctgagtctgtgtgctgagttgtcttcagactgggtccctaacagcatgtcagaccctgctccctggctgggccagcccagcctctcacctgggtggtctatgagtcgtttccatggtgagagcatcaggcctggctactctaactcagaatgttcaggggaagtgaggaacccattacggtgccagggaaagccaggatgtagtcaggaagggatcaagaatcagggcagaggaccagaccccgcctgtyggtaccacctctaattatatctatccctgtcctggatgctgtctcgagcaatgggccagggcccttgttagagacctagtgaggccatgattgaggcgtggagcttagtgaggagcccatgacttgtgttatttggggggaaacaacataaaacaaaaacctcacctccttaggtttctagagtgggccagttccttctgctgctacagtagagtttttaattaagaaattgatgraaagttcttcctgacatttcagttcatctcttggagacctttaggtgggaggaatccaaacaaagcttccttatgacttcctaatgttttttggctcatcttctaaggccctcacaatctctctaccactcacttatccaacctcctctcccaaattgaatttgtatccctacactcagccatagcccacatctgttactccttctcaagcatgccatgcacattcatgcttctagcctttatgcattctgtttttctacctgtgatggttttttaatgccccctttatcctcctaggaaagccccttcatccatccattgagacaaatgcaaataacattctgtaaaacttgccctgaatcccctgcagaggttgtcacatcctgcgctgtattttcatagcaccttgtgacaaccacttttagaacatatttcagtgcattcaagttactggtttaattctttcttcccactaaactgcgagtttcttaagaggtggatactgacttactccccgtctccaccgcttggcatcagggctgccgcacacccagtgcttagtaaatatctgccagttgaacacatgaatgaaaggaacacaaacaggacatgaagtgagaaggagcaatatttttgatatttgggggcatgtctaccagggaagtaatatttcttgagttttctaaagtaaatctcatgagaggactatgacgatgtatgttcctgaaatagagggatctggaaaaaatcaataatgctgaaaggcgcagtgagaagatgggctgatagtctttggcagtctttggagggcagctcctgggcaaggttgtccatcccacctgtcctgatgtctctgagctagctgttgatgttcctctactggcagcccatgcctggcattctgatagcatctcagggacacgggtctctgcctttggtggctttaaaggaagagaaaagcatatgcaaggagagcaaggaagcccacatggcctgggccggggcctagaaacaggctgatgttggcagttcatgctgaaagctgacaagggcatgcctttagccttagactctgtgcttaaaagcaaacaaacaaacaaacaaacagaaaaatacacaaggtttccagaagtcatttgtttttctacatttgggatctagcagcagcctaaccagactcaagcagttagtaaactctcagcccacttaggagcccgggaacatggacagtggcccacctgggaccaaagtctgaatttaagagtctccctcaataccaatcccttccagtcccatcagtaaccccagggctgataagaaaggttttgtcctggggggcagtgctggcccaccccacacccagaccccatgggtgctgtttcaagtctgaggctgggcatccccaaactgagggtcagccccacccacttcgctgctggactgcctgctcccattgtctggacatgccctgccctgccttcccacactttctactgttggtttcagtgaccccctccaggagactgagcatgcagaggttctaagaaaggtcggcatggacctttaggaggaaagatggcaaagtctgactgacctgccccatgatccctgggatggaacctactgttccttagctatatgactttaggaaaaaatcttagcattgctgagcctccatttccttatgttagaatggctatagtatccataataattaaaaataaaatttaaaaagatggctgtaatgctgttgaacttgcagagtcccaaaaggattgaatggggattgtgtgtgaaacaaacttggtgagcccatgttcaccatgtgtcagaacctgtgccaagtgctaaaaacttcagaaagaaggttccacataaacagtgactttttttcttttttctttttgagaaggagtttcgcttttgtcgcccaggctagagtgtgatggcgcgatctctgctcaccacgacctccgcctcctgggttcaagcgattctcctgcctcagcctcctgagtagctgggattacaggcatgcgctaccacacccagctagttttgtatttttagtagagacagggtttctccgtgttggttaggctggtcttgaactcccgacctcgggtgatctgcctgcctcggcctcccagagtgctgggattacaggctaaatggtgactttttaactccaaggtagttctgaggcttaccagtgggcccatcagcttttttctgcgtattttccagagaggtcctcaaaacctttatatgaggatttctgtcccatgtgccatgaatccatgtagtcaataaacctctactgaatgccaggctccggctctctggatacagagaagggtaaaaccataggtccctccttaaggagctcacagtccagtggaacattcaatgcataatgagggatacagggccaaagggcagaggaaaccaaagaaaaacagtactaaagtcttcctggaggagtataaatgttggtcattagaaagcgttgagccaagacatgactcatgcactcmttcattcttgcaatgcatatttatgaaaacgaaacacacgcctgtggcacctctgccacatgccaggctcggcgtagcagatctgtcagggctggggtatggctccggccttacctcttaggtgtgcacagcgcttccagttgcccagatgcctgcttctctttatctgggggctttcttcaaagccctggaaggttgctgtgccttgcacaggacagactggatgttttggaacttaacctgcccctggagcagtccttaaccaatgactgctggaatcgatatataaataccctggccccctcttcctagcctcattttgcgcatttgtaagacgggcctaagagtataaagattcctgcctcaggagattgcagtgaatgagaaaaaaagatagcattagccttcctttattttttcatctgccttaaatcagaaagtgaggctggcaggacatttgtaaagggcctagtgcaaagcctgggtggatgcccattaaatgcaccctcttgcccttggtcccatagacaggaaatgtattaagagcatggaatttggagccaaagtgctgaacttagaatgtggactctaccacttgctaattatttaaccatgcctcagttttctcatctataaaatgggttactagtagtacttacctaatagagtgatcataagggctaagtggcaatacaaataaagatcttaggagtaccttgcacatagaaatcactgttaaggggttgttaaataaatagatgcaggttgagatgggaaggggttggaaattgaatcagagtggctaggtggtaagtggcccttgaagagcagcaactgtgtcctgcacctggggatgtcccagggcagtttgctgcagggctggctttctcagaaatgcaggacagagggtgaaagcttgcacccagcctagggaccttcctttggaaaggaggaagggagcaaaggagttcagactgatgagcaggtaatggcaccagctgtgaagcattcacaacatgccaggcattgtcttgtggatttccacagcgacccaaataggtagaagagagaactgaggctcagagagtttaagtcttgtgcccaaagtcaaggtaaatggcagagctggggattaaattgaggcctgtctctccctaagcctctgttcctactgttctacttgacatatttcaataaagaaagaaaaacgggaaggccaggagaacacttgggttctgctttttcactggtccttcatgggacccctccctttgagaatacattgctggaaggtgttctgaagcagagaaaaaggtccttccacctccccactgacaagatcaggctaggtgtaartacatgtgtgaagccctccgggtctcctgagtcatgaatcagccaggctgaggcccctggtcacacagcctgagcagcagtgatttgcaggagtgtggagctgacatacagcctgtgggagccttaactcttcccccagaggatgctcggagctgccctggaaggagatggagctcagggcctgaggttggccctcactggttgcctggtgtatgttttctagtcccctgtgtctttgccccaaggaaaaacccatccccttctagagctgcaggtgaggaaaagcttcctacagaagctgagctgggacaggggaggcgagaagaatgttccaggtggaggtagcaggtagtgcaagggcactctagcatgaccgagcttagtgcatttgggaaaatgacgagcacacagtcttgcagagaaggctggaccaggatgtttgaccttgtaagccatgaacaactggtggtggggactgggggtaggatggtggtgagcacagcctagagtgattactctggcatttacaggagcttagactcatgggatctcagaatcctgggagttagtatttaagaatcagagactctaaaaatttcagaattttgaaattttggattcagaatcataaactcttgggctctcagtcatgagattttaggatcatcaaatttttgagttcggcagcactctaaactctaagccttgcaaaaaaggagaagccagcaccaaaattcaagttggcctctggcttaactgctaagggcactggaccttcctgagtgctcacacatagggcaggaggacctggacctgggcctcctggaattccctttgcacagtgggacgtccacacagcttgttctcagctctgatatcacctgctattaaacactatctgccagcaattcccaaggctttgagttcttggtacgccctccctagaagctcatgggaggactcttctcagtactcctaagctggaggagctggggctggagcagcgtccactcctgcctggacacagctgacatcagtcacctatcatggcatttttagtaagtcctgtgattcctgctgcataccctcctcagagtagcaggagtagttcttgctctgtaagtaatttcacagtgtttggtccattgccccacctttactttacaggattttcctcctcacacagccccaggaagtacaaaggcgaggtggccctttgccaaggtcatttagtcagcaaagacactgacttctattagttcattattctcattcccatttgctaaattactcaaggtggacaaatagaggacacggagttatggtccyaggggaagagcttctgttgagcctacaaagctgactccttcggaaggctgctggacagactggaaaagagccaagtcttcagaggcaagcaggcctgagttcgaatcctgctccttccttaccttctgtgttacttggaatatgttctttaaagtctctcatccttgatttttcccatttgccgtttgaagataataatgaggttattatcttcaggttgcctgggtttgcttttcagctctgccatcttctagctctgtgatactgggcaaatcctttagcctctctgggctgtgtttcctcatctatggaacagaaatagtcatgctacctacctaccttgagtagcattatggttgctgagagttctgaatgagtaataaatgaagcaggattagaacagtccccagcacctgataaataaataagcattagctataaatattgtttgcagggtggtaacgaggtgaggctcttaagtggtgcacatcatatgtgcataatatatcattgttgagtgaatgaataaaggatggattgatctgaagtgctgagcacagtgcacattaygtggtgtaggggaagggtcacagagcgttagaccagccctgggcgttagaccagcgctggggctgacctggactagccgagctcatcgtgcacatcctcacccaactctgcacatctcttcccaactcagactcagtggcgtcaggctggtagcctgaaatcagcaatggtggaagcatctataccacaggcagtggcaaacattagaactcaaggttttttgtttgttttattttgtcttaatttgagagagagaggaagaaagggagactgtgttaaactttggttagaacacaacacattcctaactggtcaggtaaacatttttctataacctgccacggtcatcttcagaaaccagttctgaccattttttacaagatataacatcttagggagaataagccattttggcactgataagaaggtgtttgtgggttttgagagcctggctttggcgaccccgctaagtrtggggtgcatattccttgtgggttttggtggccacgaatgccctactgtgacaccaaagagtagactttaaaacagatgggtggggcctattaggtggtaaatctgggactttctgtaacttgataaggctgaattaatgtttgcagcttcccaggaagattgtaacactgtgtgcctgaaccctgtagcctgagtaagggaactatttaaggccattccaaatctcctttagtatcaatcgactttgaagaagtgcagctattacatgagctggacagaagtgcagctgttaagtgtagcagacataagaatgaacctcggggaaggcatttgtaaactgcccagggtttgaaagcttgtctggagtgatcttcaagacagaggaatacacgcagcaatgctgcccggagctctccgggatcccagctgcccaagccaggctcaccatcattcatcagcaggaccatctgagtcctgagcccccactccagattctccatggaggtgcggacggtgacatctgtctttatttaatttttagcttcccatgtgatgtgatgtggatgatcagctaggtttgacaaccattgcatcctcataaataatctctcctttaaaatgtgttgacatagcatttgtgtttcaatggccctaaatggcttcagagaaaagccagttaatcttctgatctgaagaagacaagccacttttcacttggaaaggaataaacacacttttamtctttaaattagcaccattggagacaagcaattaattgcacttgtcagtgggaggtggattagtgggggtgtgggtggggtgttcccactcccctcctgggcaactggagggatggggtggcaaaggtataatccaggccgggctttgaggagcagcattgagccaggaaggaggggtgtggccacaatgggacaaaaagccgtggcctctgcagaaggcagctgggaaatgacaggggacagtccaaaacatcagacccaaagatggccaagtagagaaacgaaaagcagctggaaagggaaggaccggcaactgagggcagcaagatggggccagtgggtttggaagaatgaagagaaaaattacctgggcaggtgtgaggcagccgttttcagactgcatttacatccttgtgttatgggctggaaccacacgtatttggcaggaggtgcctttttgtactccgttataaagcccacctttgtatttcagttgtaaccaagtttggcccatccgtcagaatctcacctggagagtcttgtttgaaattcagattctctggtcccaccccagatctattgaatcagactctttgctgggatggtactctggagcctgcgatttcaacaagctgattcttatgcaggccagcttcttattcttgggaggcaggatagagtgtagaggtggacagtatggactctggggacagcctagttggacttaaatcctatcttcaccacttgctacctggatcactttgtgccttaatttccttgtcttcaaaatagaacgataataataggagctatatcttagggttgttgaaatgattaaatgagataacatataccaaatacttagaataacggatagtatactatatttaccattttttcttttatccaattaatgcagagattgagagaagagagaaatagggtcaatattttgaatttaagccatcaaacacacatccatacacattatgcgtataggtcaagagttgaaaatttaaatgctttcaagaaccaggcaagtgtgaagcaattggtggggcccttggtgacttggaatgtacaactgtcttagtttagctttcccagaagccagggagatcctgagacaagatttggggccaagtaatttaactggtagatgatcctagaaaactgatgagggagtggggatgggagacagaagagaagaaagctaataccatgggcatcaatgaacatggtactgctgtggggacctggactctatcatcctgggaaccaccaggagacttggagactctgcaatgtcatcccacctgataagtgaggaagctgggttatactcatttcctatgtctgttgtaatgaaagtgccaccatctgggtggcttaaccaacagacattgtttcatacttcyggaggctagaagtctgaaatcaaggtgccagcaggactatgagggggaatctgttgcmtgcccctctcctagcttctggtgctttgctggccatctttgacaggccttggcttagagatacatcactccagtctctgccttcctcttcacatgacttcctmcctcagtctgcatccagatctactctttttttaagaataccagtcatactggattaggatcctatcccactccagtatgatctcatcttaactaattatatctgcaatgaccctatttccaaataaggtctcattcggaggtattagggtttcagatttcagcatatgaatttaaggggataaaattcagttcacccatggggtattcatgccccaattcctccccctaattgacaactacttctgtagatggtaactccacagcatttcctgcttactctccctctctgctgtaatttggatatttgtccccaccaaatctcatgttaaaatttgatccccaataggccgggcatggtggctcacacctgtaatcccagcactttgggaggccgaggcgggcagatcacaaggtcaggagatcgagaccatcctggctaacatggtgaaaccccatctctactaaaaatacaaaaaattagccggatgtggtggcgagcgcctgtagtcccagctgctggggaggctgaggcaggagaatggcatgaacccgggaggcggagcttgcagtgagccgagattgcaccactgcactccatcctgggcaacagagcgagactctgtctcaaaaaaaaaaaaaaatttgatccccaatagtggaggtggggcctaatgggaggcgtttgagtcatgggagtggatccctcattaatagattaatgccctccctggggtggtggggagaatgagtgagttttccctctactagttcccatgacagctgatataaagagcctggtgcctccccactctctcttgcctccctgctcaccatgtgatctctgtacatcctggctccccttccccttccaccatgagtggaagcagcctgaggccctcacctgaagcgactgctgacactgcacttcttataaagcctgcagaaccatgagccaaataaacctcttttctttgtaaattacccagcctcaggtatttgtttacagctacacaaatggaccaatatgctcttcctgtgtctcttctaccacacgccttttaaacatccagtagcatggatattccataagggttgtgtcttagtttgagctgctataacaaagtcccatggactgagtggcttataaacaacagatgtttatttctctcagttccagaggctgggggtctgagatcagggcgccagcatggttgggtcctggtgagggccctcttccaggtcacagactgctcacatctcatcctcacatggcagaaagaggaaaagagcactctctggagccccttttataagtgcactaatcccatttatgagggctgctgtggtttgagtatttcccctgcaaaatttaggtattaccagtgtgaaaacattaagaagtgtggccttttcagaggtgagtaagtcatgagggctgcttccttgttcatgagattaaggctctttaaaaagaggattcttgaagctttaggctaccttgcccttctccctgctgccacttgaggacatagcaagaaggccctcaccagacaccaaatgctagcgtcttgttcttgggcttcccaggctccagaactgtgaagaaataaatttctgttctttacaaagtactcagtgtcaggtattcttagttgcagcagtaaaaaacaggctaatataatagctccaccctcatgacctaattaatctcccagaggccctacctcctaataccatcacactgggggttaggatttcaacataatcaatttggggaataaataaacactcagtccattgcagactgtcttgtttacagttataatcacagcaactagattagtaccttgttgaggtatgatcaagtcatgccaaagattattactccatgaatggactaatagtaagtgtattagtctattctcgcactgctataaagaactacctgagactgggcaatttataaagaaaagaggtttaattgactcacagttccacatggctgcggaggcctcaggaaacttacaattatggcagaaggtgaaggagaaacagtcaccttcttcacaaggtggcaggagagagagggagagagagacagagagagagagagagagagagagagaggaagtgccacacttaaaccatcagatctcatgagaactcactcactatcatgagaacagcgtgtgggaaactgcccccatgatgcaatcaccttaacacatggggattacaattcaagatgagatttgggtggggacacagagtcaaatcatatcagtaagtgttcaatatttgttgaatgaatgaatgaatgaatgggtgaactctcacttcatttctatgtccccaaaacctagagaagatgtgggaaatgctcatctgaaccttgagggagaggtgaggactctgcccggttctccacagcaagcctataggaaggcagttttacaaaatgcctgtgcacctgccttccaaagagcaaagccccattaggcatcaactttcagatcctttagtttcctttatgcatgagattggagtgtcccattaagtacttaaatcagattaacagcctccatgccagacccttccggctcagcctgctagtggttgtggagccaacaacttcttatagaagcagtggaagggggtagatgaggaagggagaagggctctgtttgaccaggctggtgaatcccctgtgtttccttggcgtctaagtctgaagaaatgagagctggcaagcagcctgccctgagcaggcccggagaggaggctccccgtggggatgtggagagtggcctgtgacctcccaggagtgagtggtgtttcatcactgcttctggtagtgctggtttacagaggtccctccaatgtcaggagatcagggatttgtggacagtaggagagagctgaagtagcaacataagcaggatgacacctggccccatgcagggtgcaaattgtatttctctgtcaacatgggctatcgacagctgcacattgactctagatctggcagagtcacagcaagcagactccctgcctcctctttctccaacgcattaaaacaagcacaaaatataccttcccttttccttccacaattatactactgtcctaacccaccaagacactttattaaatgttatttatagaaatttcaaaaaattaattaaagatagcttgcatagggaataaaaggtaaaagtcaatcagcttttaaatttgaaccagaaaatcaaaggtttagcaaagatagggcagcaaaaatcctgataaaatctttgtgattagtcattatatttgtctttgagcttcctggcagccttagcaagaaggcaaatatgatgggctgggtacttgtgtttggctgtaagaaaaaacacaagttcaactccaaaaacacaatctttggagctaagaagttctgagagatattatatgtgaacaggtatgtgtgtgtgtttatgtgtatataaaatagttaatagtcaatatatataatatacaatggacagtgttttggaaagcaattttccagccaacgcagaagtatttttgggatagttctttcttgctttggcacttaacaaagattgaaagaaaacatgaaaacctaattaagtaaaggtactttgcaaagacagagccagtatcatctagggtacttcaaggcattttgtttcttctttattttcttttttggatagcagttgtttggttggggctaagagaattccctcttctaatcagcagcacatgttygggatgcaactaactggggatggaatttttctactatctggtccaccagaagcctttactctagctcagtgttaacagagctcgcaggtacaaagaggcaagtagctcctataggaagcaaagctttccatctcttgctgccacccctcaaagctcattcttcctctgattgcatttcctgtgcatcaggagttcacaatcttattttaaccccagcaccggaccagaacaatagaaaatgtttattacagccattgtgtataacaaaccattccagaagttatggtgtgaatcagcaaccatccattggcccagaatcctgcaataaaggctgggatcactgggcagcctgtctctgctctacacaatggctctccctgtcatttgcaatcagctggtggcccgactggggctgaaggatccacgagggcctcactcacctgtctggggcctttgtggggtggcctaatgactgggctggggargaggctgcctagaccttccttagttagggcagcaagacagcaaatgcaaaaggcctggaacttgcgcagggtccctcttgctgtgtcctgctgtgtcacggtccagcccagactcagtgtgtgaggcagccacacaaagatgtgaattcagagasgtgaaattcataggagaccatttggtagcaatcatcctcagcctcctcccatcaataccttagtcatggtaggtattggcaggagtcaactggcaggagtctcacctgagggtkgaggagggagagaaggggacaggtatccctttcatggggaagagaggggatttgtatcaggccatttggtactagcccagttctcacttcaagttctgtgcactcaacacttaactgccaccatcaaaaacccagatatcagactttatgagctctatttaaatttttcaaaaaggatatatgagaaatggaccttggaagtgataaaacagtaaatgttttaagaagcctcctggcaacggtgcttgaagaccttgtaagtgtgagacatattgagttatgctgctccatggccaatgtcctgacatttgtgggacagtgacctccccaggcagctgcagcaattggagatcttgaggtcatttccgtatggactgcagtgagatatacagcatgtcagtggcagcccagaagtcagtcgagttttctccaggctggaatgaggacactgacagcccccaccagccctagcttaggacaggggtcacactgtttaaaaggatcacttgaatgacaagaaaggccatatgctcatcacttttgcagaagctggaaacctagaagggctggataagaaagacattgggtaatgaaatcaggggacaaaaacactttgacctccaaagaaatagtggaaatctttagaaaggctgattaaataaaagtaaacataagattctttgttttgactcagagcaggcacccatgtgtgcacacacacacaagcacctgcacatgcacccgcatccacagagatgggatggaggaggcctgacttagtagcaccatgtaaaaataatttgtaagtatatgttagcagtaagcttaatttgagacaaaagcaatcaaagttgttgtgactttagattatattaataggagcatagattctagattaagggaggtgatttatttcttctattctgtatagcccagtttactttagaagtattaggtcaacttctgcataatatgaaagggttcaagaaaaactaacttaattagagggaagttcaacatgattagagaatttgaaatcatgaaatatgcggaaacacaaggaagaactgaagatatttgacctagagaagtccttagcaaggacttaagaatgggcttcagttgttatgtggaaagtgggacttgatctgtcttctatggctccaaaataggtcccattggactcatgaatgtaagattgagggaccctggcatttggaggtcagaagaaggaagaacatctaatagttgaagaggccctctaaggaatggattgcatggatttcccttttactgcaggggctgcatgatcactcatcagggcagacagagggaattcacaccttgggatggatgcttggttcaaaaggaactttagaatcctgtccaaccaactgtgagggctgtcatgggctcttgccttagctgctatgaaaaaggtaatgaatgcagtggctgtgccctctcttgctgagggttcagggggctgctgctgaggcctgtttctgttgctgcaggccccatttacagttatgaagaagcagaggcatcaaatgcttagccaggtccaggaccacaggcagcaaaccaacaccagctactcacatgggcacagctcctggccatccacttcctggaaagatggagatccaggcagagagcggatcctgggctggggtcttggcagagggatcttcccctgggggttataggagcaccgatggagatggagaccaataggaaggaggtagccgtgctgatgatggcttttcaggtcactaggcctggtttgaaagtggactgtgccactcacaagctgcatgatgctggagaacttgataaamtcttttgagctaccattttcctattggcttgttgtgaagattaaatagaccttgtttgtggtgtatatgaccctgtgcattgctggacctcagaaaatactgaaaatacaggaaatattcccctctatttttcccttcaaaactgacctgtgctggccactgtggggaccactgaagaagacccagggaggggaatgggtcccccagcctttctctgggggtcatcactaaaagagtgactgttgtgattgccccctctgcctcctgacctccctcccatgctaaggctgcattttctccctgacagaggaactgaaggagaagctgaccgaatatgtggacaaggtgaacagccagaagccaggcttcatcaaagtcgtgcgtcacagcaagcaggaaggcctcatccgctccagggtcagtggctggagggcggccactgcccctgtggtggcactctttgatgcccacgtggagttcaatgtgggctggtaagtgccccttgggagaggaggaggagtcccagtgggatctggggcttcagctccaatagtgcaaagcatgctaggatcttggtcatagcctaagggaaaagaggtarttctgggaataggtgagatgtaggtgtgtgagtgagccaggcaacaaggctggacctttagggttcgaggtgtggtagaggggagggggtagccaggggtcaacaggtcagcacacggtgcctaatatgcatggtgacatcacatgtgactctggctggcagggtcatcagggagaagggtacatgccaagggcaaagcagagagtgtcccgctaaggacagggttcccacacctrggaaaggagagctgggccagacgtgaggcagaagcccagcctcacagccagggccaacagcaagtgggcaaaggtgggggaagcttgccccatgttgtcacaggtgccctgggctttcccactgccagattggaggtagcacgtaatctcagattctccctatggtgaaactgtctaagaacatctttctttctctggtcagagctgctcagatgctggggggaaagggaccagacagaaggcccaagtggctgcagccagccaggaatagagtggcggatgcasacctccctgcagggctggagggcacagggccacctgctgtgtgtaactttgcctgggcctgggagacacaggctctggcaatgaccataagtagctggggcaagtaggtggccacccttttatcaatatgcctgttgtcactggggtctgctctcctccccagactccacagtgccaacctgtgcccccggggagtgggagacaagggcacttcagcaggaaggagcagcagggcgtgcacacagcctggcctggatgctgccataacaggcccaaatgaaggctgcaacacagccattttttayagttgaagtccctgcttgccacttgtgactatttaaacagcattttctttggatttatggccaggataggagagggacacttactatttcaagctgatttgaataaacaattatgcaccaaatgtattattaatgagaagcttattcctgcctgcaaacactttactcgcctggtgccttcaagggtctcccagctccctgggaaagcccaaatgccccacccctccttgggtggttgggaaacgctttggggggtggatgtggcacagctggcattccagggcagcatcgcatggctggtggatgtaggtttgttctcagctcctagtctctgccatcctcatctgtcttttcctccaggttgacacatagaattttagcaaaatcaaagcccaaggtgaaagctttctctggagcctcagatctgtttctttcttctttttcttcttttttgagtcttgatttttttttttttctaatggagaaagggaaagcgagcaggcacaaggttggctggaataagaatctctcagctcagctctggatatgccaatggagtggtgcagcctcttgccattccggcaatcctcagggagcgggaagttgaataggagctccttcccagaaggcagtgcacctctccatcagaggagatgggcaggccttccttcctctttctgctggggaaggaccttcaggagatgctactctggatttttccaccttggaaatggttaccctctctggctgtctcctctctgcccagggctgaacctgtactcacccgcatcaaggagaaccggaagcggatcatctcgccatcctttgataacatcaaatatgacaactttgagatagaagagtacccgctggctgcccagggctttgactgggagctgtggtgccgctacctaaatccccccaaggcctggtggaagctggagaactccacagcgccaatcaggtaragcaaacctttacctgtgggtctctcygctttgacctccaggctagggaccgcctactggtccaatgcttattctccaacttgagccccatcgtggggatgacaggggtgggcagggtcgaaaggaactgcagtctgatcttcagtcactgccacaggctctgaagatctcagaatccattcacagcctcaaagtgacccattttcacacatcactgtgagacgtctgctgggcgccaaccactgtgctccaggttggggatccggagtgatgaagatttggttcccactgccaaaagcctggagtctagtgaagacagacaaaatcattggaataggaacattattctaccatgcaggcagaaastgcattgaaagyggggaaatgcttttyagagggcagcattttcacttgtttttgaaggcgagtagaagatggcyaggttggggaatggacacccatatgcaaagttcatgaacacagagaaggttcaaagtsactagaagtgggaagtgagccagcagccccyggcagtaggggtggaggggctgagaggcaagatcggaccccacaggacagtgtataccttgatgatatttgagtgttattctgtaagactcagacaaaagtgacttcatactgcatttcaaaggtcccaagttctttcctgcctttgctgccatcttcctagactcatgaatgactcccttgtgtggtctcggcttttaaggttcaggactcctccaaaarctgtccccactagtttttatttctgtctgtgtttgtttttgtttttgtttttgtttttgagacggagtctcactctgtcacccaggctggagggcaatggcgtgatctcggctcaatgaaacctctggcccctgggttcaagtgattctcctgcctcagcctcccaagtaggtgggataacaggcacctgccactgcacctggctgatttttgtattttttactagggacagggtttcatcatgttggccaggctggtcttgaactcctgacctcgtgatctacccgcctcggcctcccaaagtgctgggattacaggcatgagccactgcgcctggcctatttctgtctatattgatgatacggtgggtgtctttatgttccctgcgaagtcctgcccgttataaaacagaaggcaccagaaggtggcctagggtacagtttttggagtgcaagagattagaagctcatgttgttttatattatattagggagaaagggtatgaaaaatttaattgaaagtcagggattattacttaagatcacatttttccttgccagaagaaaaaatgtatactcatacttaaaacgggataaaaccacctaactttcctgaagttacctgatacctactctgctcggcccctgccacaattttgtgttgttaaacatttgctgacagtctgctatgtacaagggtcttttacacgcattggctcatttgatcatcatcgcaacctgttgaccgctcatgtctcatccctgttttacaagaggaggagagcaagactgagagaggtgaatggccctgccaaaggctctgggcggtagagccaggatccacccagagaagctagactcagtggctagttttcacccctcttattgtccactgttgagctcagaactggtgtagctgttttctgctcccaggcctgatgaatgctgttggaaggaaatatgcccccatgcaatgagcattcctgcagaagactgcattgacagtaactgtttctgttctgctcatctctaactgtactggtccagtctcaatcagcaagcctgcattccaggtccttgccagacaatgtcatctcaacctcaaattttctatcacccaatttttatcaaaaacttggttgagggaaataacttctatggaagatttttggaagaacattcctggttttattcccagatgaagacagctccacagaaagctgtgatttatacaaatgtatcttgcccatccgagctcccttttctttcaagctatacttgagtgctttgcccacacatggtgtaagtcataaaaagagcccagcaatatcttctggtgtattctaaagggatgtctttgtgatcgctgttccctaagtcgccaggtgaccccattaagaaaatccacgtgagaaatttctttcaaactgactgccagtcaaagaaagacttgctatccccagggaatcaattaatatgacattttcacatgagaactgtacattttgtttctaagaccatgtgtgttcatttccactttgaccaacaggaaactcaaaggcaagctttcatgtctgctttaagaacaattgagagaggaccttggttctgcacatgcattccaatttgttgcaatctttaggtctgtccagacatttatctatttatggttctctatgtattttaaattttctcataagctatttctaatcctttcaggaatgaggcaaggtgtaaatcgataacyctttcatgctgatagaatccacttaataccctagccggttaataataaaccactgaggtggcctgtgctcatctcagagtaactgtttcagattctgttcattacctggcttgaactgtcagtttgaggaaggtcccttcctgtgtgtcctgaaagcatttttccagcgtgccctgccctgtccaacactaggaatgcagaggcaaatgccaaggccccactctgccagcctgatgtttctgaatcatcacgtatttaaagagaggatcttctagacttagtgcacaattgcatctttttacctttttaaatggccttttgagtgccagttatgtcccagaggctctcaagtgctttaatttagtccgtgtgaggttagaatagatcctatgttacagatatggaatcggaggctcagagaggctagggaacttctcttagagacatgcatccggaagggggatttttcccagagagaytacctcgaaggcctgggttcagttacctccaccacagcagggtctcagtctgctttaggagtggtggattagcttcccaggatgcctgcaggtctgtgagggtgaagccatttagaataaaatgcagtgatttgaaaggaagagaaacagtggctccagggtgtcagtctctgccccagaagtctcctgtatctgcattccccagggaaatgacctgcaaaatcgcctttctccaccttgataagtttccattttcaaagatgggttcatttrcatgtgatggaccgacagttttctcatccctgaggagccttcatttctccttttattcccccactgccaccaagtcctccagccaggcaagggctagaaatggtagcaataagcagtagaacaattcaacgtcactgcrtaagcagggctctcagcagagaagtagccccgtgctctcacgctaactcacctcatgtgaatcattctctgtgaggtgctgcactgggtgtcttcacagagctggtgagacccaagctcacagccctcaaggaaggaaaagccttccagctcctggaccccatagctgttggcaggttgttccagcctaagacccctgttgaattccagacccaggccatgtacctaagctctgcctgttggctatctcctcgtgtgtcacacaggtaccttaaggtcagtttttccaccaccaatgcttctttcttttgaaaccagcttcttctcctgtgcccctgtattgatgagtggtctccaacccactgtcacctgagccagaaagccagatggcatccagrttcctctccctttctcacccttgtgtagttcatctattttgaagttgggctgattttacatcaaaatatgtctttaaaaaattcctatctctgttcctgatactctgactcagctctccatcatttttcacctggatacagcaatgagcttcccagctgggcccctcaattcccaccccttaccctctggtcactcacccacagctgcctaactattcttttgaaaaaaacacagatctgctgacatcactgtcctgcttaaaattcctcatggacacctatttacctgaagataaaattcaaattttttaccctgctacccaaaaccctttgcaacctggtcccagctaatctttctaagtagaccaaggatgacatacagattccaagttggggaagggtaagaaagctggtatgcattcccaagcaggaacagagactggctgtgcagaggtcagggtcagggcagcgggagatacagtcaacctagactggcaggctgagcaccaattctcaaagctaacacacacacaagcaccaccccactaatagctgatcccaggatggcagctgtctacccamtgcccggatgaaacagcctttctggagtggttgggtgaggccagacccaggggccactccaagaacaaggctcacactggctctggcagcaaaggaaggaagagaaccagaccctcctgataggaaggccttactgctcttactcctcggacagctgcaccagacagcccttctgctctcccctgcccctgcaggagccctgccctcattggctgcttcattgtggaccggcagtacttccaggagatcggcctgctggacgaaggcatggaagtctacgggggcgagaatgtggagcttgggatcagggtgagtggggtttctcactcaaactgctcggctcagctcccaccagggtgaatgagtctgggggtggagaaatggggtttaaggttgagggtcacagactgattctgaatgtccagtcctgaatcctgtgtgtgattgggattgggaagacacagggtggagcctcttgacttttcaggaagaagaggacttcagaaccagcttggctgggggagggagcatgggagaggttaagctgccaactcaagggaacagcctcttttaaaatcaaactgaggcccatcagagtgagcaaaggtgtgctctaggaagcaataacaggcatcgagagtggctggacaagagtgaccctgagtcagctccccttgggatttctcactttgacagtctctgtcttctccacagtggcccatagaacattcccaaagactttgttaagagatagcccagagaaataaactcagggtgtataaacagcaagatgcagccaggctcactgcaggctgctttctgatcccaggtgctagccagacccacagcccattcctgcctcacgccattctcctgcctcaaagtacagagttttttccagcaatcagctcatggcatggatccccaagaggctctatgttatttctcatcctacaggaacaattcctaggctttctggctcttcccccttggccggtgaaaacataaatctatgatgaagccctctttcttatctgaggttcctgttaggtcccctggtgttaggcaggaatgtgatgatggatacaacaaaggatcttgtmctagaaggaagcctgcccacctctaggaccagggagtatccttggcagacccagtattagagctgcaggatgtcctccccacgatggcccccactgtcttctccgtggggaaccctcagcagccagccacccccacactctacaggcttgccgatgatgcttggagagaaccctgtgcctactggtgtccgtagggattatctgagatgctccacctcactgccagcctattcacacatccatgcagacctcatctgtctggtcccacctactggccctactctggcatctttggccttagtgtctgcatctgatgtctccaattcctgatactcaattcccactgaaggattgcagcttggatgcaccctcctctcacctctaacctccttcaatctcctaccccaccaggcaggcaactggccctggacggcccttgcccctgacctaaaggggagattggacacccacagtgagcatctcacaatgcctgcaatgacctgacaggtactgtgtggggcccgactcaccacccagacttaatgctagggctttgaggactggcgacatgagcagtctgtctgaagccgagcttagaaaacacttccagacatctgtattcattgaaaccctgagaaattgctttggaagcagtcaaaatgcgtgggcttattggggagctaatgtattcatagaggacagcccctgcataatcaccctcgtttctgcagctctctctacattggccatttattccccatttgtrtcctcaccatctcatttcagcactgctcctggataaatgctcaccccaaacataatatttttcacgaggagctgctgtcaggaattgtctgagtgggttggaccgcctccattcgcttgtgttctctgggtaaaaatgtgcaggaatggagaaaggaattagatttgtgaactctgcttccagyatgtgtgtgagtcagtcacagagtggagatttctggcttttccttccttagattataaagttataaagctattctggagtgtgggcctgggtgaggctctcaaatgcaagttaaaatgtctctgggtggtttcgtgtacagagtttgaaatacagttggcaatgatatctggttttttttttttcctccatctcttctctctcagttgacagaaatgaagtgtcattggagttgaagaaagggtggcatttaaaacagagaaccaacaagcygttaacttgcaaaactaagtacaaatgggagggatgagttcatttgaatttcagttccccctttaagggttacggaaccactgatcgtcagcaaaacagattttctccttttgtatggttattagtatttgtctttctttcgtgtttgatgagttaacttttcaatggttcagtttcctctataaagcagcacacttgccctaattacaccatacgattgtgtatcaacatgaaagatcacttttcacccttctcttaagcagaggcagattattcaaagtccttacctatctggaacacagaaagaaagttgtttgcgcaattactaaatgcctgctttgtgccatgggttttactggcacttatgtcatccatccacgaaacaccctaaaaagactattattgtaatagtggttttttttttccataagatactgtgaaattaggggcttacatatatctcaaggtcatgtacctcgtaagaggtagagaaaggattcagccccagatctttatgattcaaggactagacagatatatcacagtgatctagggataaaagtactttgagcaccgtctcaaaaaagatattgcaacagccatgcagtaattatcttctactttattcacaattatgtctactgagtccctatttaaagccttcttcttatttcatgctcttttttttttctgatttgtaagtcggcaacacaatgagaaaaaggaaggagctactatggccaagcacaacgaaatgagtgagaaataagagctgacactgaatagaaaacagaaagattatataaatgataactgtgaaagtgctagaatgcataagaaaacatttaagggctggcaagggattgaaattgttggagactattatggtttgaattgagtgcccccagccccaatatgtcctaacctcttgtgaatgtgatctcatttgaaaccagaggtccttgcagatgtaatcaagttaagacaaaaytgtgctggattagggtgggccctaatccaacgagactgatgtccttataagaagaggagaatttggtcacaggaagacgtaaaggaaagacagccatgagaaggtggaggtagagattggagttatgatgtcaaaagctcaggaacacctggggctatcgaaagctggaacaggcaaagaaggatccttccctagagggttgggagggaacatagcccagtcaatatgttgatttcagacttctggcctccagaactgtgagagaataaatttatgctgttttaggtgatccagattgtgatactttgttataagaggcccgggaaacctacacagggaccaaaaaagtaagccaaagttggaacctggagaaaggttgaggctattctacatggagaatctggtgacacttaagtttatgttttctcaacttcatagaatacagagaacagaaagcctaaggcttgccttmcttcccataaagctgggactccaaaggcctgttttctcagtataaagtagaaatcctctctggagaaagagccttttaacccaggccacacaattcccacagggagagttttaaggaatatgaattcacagttttaaaaacatcacaaaacagacaagggaaaaagaaagcaacaagaggaaacagcagcaaaatcagcggacaggcaaacctgacccacaaagtctccagctgttgaatccatcagacacggaatataaagtaggttatattatatacttagaaaaagaagagattgaaaatatgaataagaagcaagacwctataaaaataatcagtcatagtaggataaaaatggaatttcaaacatgaaaaatgtaagaaagacaaaagctcaacagatgggcagarcrgctacatgmacattattaaaggaataaaattaagaaactggaaaatagatctaaagaaatcactcaaaatcagcccaaagggcccagaaaaaattgtgaaaaaatgttgaaagacatgtagaattgagattgtggatttagtatcttataattccaaatggagatgatcctctttctccagagaggatttctattttctgagaaaacagtatggagggttaggcaaaaaacatatttaaataaatgatggcttaaaattttcccaaactgataaaagacaccaatcctcagatttaagaagtcatgccatccaaagtgaggtaaatataaagatatccccatttagatataccatagaggaactacagaatatcaaagacaaataaaagatcttacagcagtcaaagagaaaagatagatgacctaagtcartaataattagaataacagctgacttttcaactgtaacaatgggacccagaagattatgatataatgtcttcaatacactgagagaaaataattgtcaacctataagtgtatgcccaataaaaacatccttcaaaaactatttgaacctaaagactacggaataggttacaggtgtccagcagcacagcagcttgtatctctttcttctagagctaaacattcaggcagatcctaggtttatagcacaacacagtatggcacagttgttaatgatcttagtaacagtcccaagtcataaaaaaaggcctccattgtatgctgtatgcttattcaataagacaaaaagtacatacatgtatgcaaagatttctatggaaaatgtaagacttgttaaatttctgatactgaaataggcaacttctcagttgtatggaacggacatggagaaactgattagaaagcctagcctatttattatgctttaaattcaattcacttctttaatatgaatcttggctgtcttcacctttctggaatggaaaccaaagaagtagggggtggtgaggaagaatgccactacaaccacagccagtgccccaccgtggtgtccagagcaggcaaccagagaaaagacccctctcctctccatcttgccccaactgygaatcactcctgactggattgagctgttagaaatgtattacagaaaagagagtctcccagaaaggccttgctgttggaaagacacccacttgaacatatctgcaagtcactgactccttctctgaatatctaagctttacccacttggggtttcttactggcattttagaatatcttgggatattcrtaatcatttgcctctttagaatatggtctactgttataatgacacttacacagatatctcatcctccaggatgaccttttactatctgctcctaggactggatgattgttgttattcttcattccctagtgccagcttgccccttttaactgcttcttctaagcctcatcacaagatctgattgggagtagaatccctcgctgtgagtgattctgtccctctccctgtgtagctgagttacatctaggacaggaggaagtgaagctgactggctccactttggaccttgggagcaccaaggatcatttaaggtttccttatctggctagccttagagaatagcttattaaagcagaaatatggatctgagatttctcagtaccttggacagtgactttattctaaactcattaaatctttctgttgtcctagtctgccagttttcatcccctctcctaggttttttcctcaatcatggagaacctaatacctatacatgccctggcaaaataccaatagctattctacagagcatgagggatgaaagaagcaaagaaggtgtggacacaatagaaggagtatacttcacaaattacaaagtcactagatatcaaaaatccccttaccccctacactggctttgtctgctgcttctatatcagctaaataacaatggcagtacctttcatctatattttcgaattctttccctacaattatcctatttattgctcacagcaatcaaatgctgaaggcaagccagatagtattatcctaatagatgttatatgattaaaaatgtttatgttggtcaaggagttaattcattcttatgccttattatctcattattctaatcattatttttaacagtaaagataacaagaagaaattaattacttcatacagttctctatacaagcatatcatcatatctattatacatgtagatgcatatgtacataaaaatactaccacacattttatgtagtgctttattttttaaggcacacattaatttatatgtattatagtcgtgcttaactttttattcaaatgacactcaggaacctgtgttgcaagctaagaaaactgactcaacctaacttaaagagaaaagaaatttattggaaggacatgggtatctcaaagaattaatttgcttttcaaagaagcggattcagaaaacaagcaaaagccaagagaggctaaacagcagaaactacagccagagccacatggtcataatagcgtatttgggacaatacctctgaccctactgccatgactagatggtcctaccactgggtactgggcactgttgcttgggtttcggtgacattcacaaagattggaagtcctgagtgacagcacacaattagctaaatctaggtttatgtacatacctttgcttcgaggggacagtgacagatcatatagctcttttcagtttctacagttccaagaattacacatgacagagttcctcttatgggaaatggagtttgaacctgggtttgtctgtcctctaaaacaagtaatatactatataggtattgttcttcatattccagatactttatcataaatgagacttgaaaaaactctctattgaaatgcaaatcaaaaccacaatgagataccatctcacaccagtcagaatggtgattattaaaaagtcaggaaacaatagatgcttgtgaggctgtggagaaataggaatgcttatacactgggaatgtaaattagttcaaccattgtggaagacagtatggtgattccttgagggtttacaaccagaaacaccatttgatccagcaaccccattactgagcatatacccaaaggaatataaatctttctactataaagactcatgtacatgtatgtttattgcagcactatttacaataacaaagacatggaaccaacccaaatgcctgtcaatgatagcctggataaagaaaatgtggtacatatacaccatggaatactatgcagccataaaaaggaatgagaacccgtcctttgtggggtcatggatgaagctggaagccatcatcctcagcaaactaacacaggaacagaaaaccaaacaccacatgttctcacccataagtggaagttgaacactgagaacacatggacacagagaagggaacaacacacatgaaggcctgtagggggttgggggttgagggaagggaacttaaaggatgggtcagtaggtgcagcaaaccaccatggcacatgtatacctatggaacaaacctgcatgttctgcactcgtatcccwtttttagaagaaatartgaaaaaaaattaaggaaaaaagagaaaaaactctttattatggacaatatcgaatatatacaaaaacagtgagatagtaaaataaatcccgttgcagttgttaccttgtttcagtattgtcaacttatggccaatttggtttcatctttacctctgcctaatcccccacctaactctagttattttgagggaaatcccagacatcatatcatttcatcaaaaatatttcagtatgyatccaaaatagataaggacttttaaagaaccatggccacaatgctattttcagtcctaaaagagttgaaaagaatactgtaatactgtcaaatattctagtatacacatttttctaattctctcataagtttttgttttgwtatacaatttstttgcttgaatcaagwttcagttggttaatttgtctttccagtctccataatctactgaatatctttctccatctctttttcccccmctcttgtaatttcgtttttgaagagatcaggtcatttttcctgcagagattctcacagtctagattttcttgattacattcccctgatgtcatttaacaggtccttctgtcccatacatttcatctaaattggtagttaaatctagagacttaggcttaattttgtagcaagaatatttcatagacagtatgtgtgttcctccatcatgaggtacacgatgtctacttgtgttcccatttgtgatgctaaccatcattgctgattattgcctagattcagtaattccttaggggttaccaaatagtaatattttaattttatttctctttcctcatttattaactgaaatacttcttgtagagacatttacaataatccattccttggttgcccagaagtacaaataaattcatttggaaaagtcaggataaatagttctttctataatagctttcaaaataatgaattgattctcaaccaccctccaaaggggaccaattagttttttactatccctgtgaacttatgggtttaaacatatttgatgtatttcaattaattatccttacatacatttaatatccttattgacttgtaaattttccacctttgtccattgggagcctgttgacatttgtccatgggtccttttgactctttaatggcttccctgccatgaggagggttccaggctcatcttacacatttcctgctccagacttgtaattagctacttccctaaggaacccagcttactgtgagtgagaaatggtatttaaaaccacaatctgggcactgggcatgctcattgctactgggttggtccatgtttctaggtcttttcagtagtcagagctagaaattattattgttattattattatagagctaaaatatttcaggcattcatgatgatctttctcattcaaacttaggacaacagaattttacttcatcaattttacatccatatttcctttctttcatgacaaaatttctggttcttaatgacaacaacataggtacctgtttattttattccccagaatgctcaagactgtttcagcatattaatgacaatgctaccaccaatgatatgataaatggtttaatttattttgcatttcttctttagattttatcccactaggatgtacagtcaaattcctattatccacacttatctagaagtgttcctctctgtacggttgtcctaccaacctaagaagtatgatcagttgtttcattttgcttctgacttttatatttaaatgtttatagtcatataaatttttatttagtttataaaaatgaggtaaatatacagtccaaagtcaaatctacaaaataaggaactttcagcgttgttctcttcatcctgttttctatttccaatgtaaacatttatttttgtttgttttacttaatactttgaaaaaaggcaagaaaatgtgaatatatattcgcaggtcccctttcttagataaatggtagtatactatgcacatttttattatctcacttttttctgaagattgttctataacagtatatagagatattcctcattcctttcttacggttgcatactactcaaatgcgtaaacattttatagtttgttctaccaatttccttttgagagcatagtgctataattaatagtcttttgcatacttttttcatatttttattggttatcttttggatagattcctagaaatggaattgcgaagtcaaagggtaaatgcatacgtaactttgctagacatcatcaaatatccctccagaggggtagtatttcagaggggtaatatttttcccaccaggaatgatgaaggtgcctgtcttctcacagccataccaacaaagtatgttgtggaatattttttttaaccaatctgaccgatgagaaaggcctttcagggtagttttaatttgcatttctcttattaagaactaggttgaagagattttcatatgattaaggctatttgcatttcttttttctgtaagctgttcgtatctttggcccactttcctatagggktgttagtcttctctctatttttagaatatctttacacattagagatggtaatactttgcccatcatacaaattgcaagtattttctcccagtttattacttgtcttgattttacttctcgtgtttgtttgtttgtttgttttgccatccaaaggctgcttttttcgtgttttttctgtktaatgtaagcaaactttttttcttcttgcttccagattttaatcatagaaaatcttacccactctcaggttataaagaaattcacttatgttttcttctaatacttacatgactatattttttacattttagtctccgattcattcagaattgatcctgcagtttggtgtgaggaatggatccaatgtcttatttttctatatggtcaaccagttatcgtaacaccttctattcaaaataatatctttcctcactgttttgcaaaactacctttattgtacaataaattgccacatacttttgggtctgtttctggattttctattttggtttcattgatctgttggtctatttatgtactaatatcacacaatttcatttttataggctttatgtttgtaagtccacagggtgaatttagcctagcaaactaatgcataaaggtcttggattcaaaggaggggaagatctaggcaagacacaagtatcatctttccctcttctttcstgctggactttaaaacacgtgatgtcaggatttatggctgtttaattttcataatgtgcttggagcctagtatgtgctgaaagagcaggctttgaatttacagaccagtcacatataagaaaatatattctgtatgcctcagaaagtcagagctataaacagtgagtataagctgtaagagatgtagttactcaatatcagaaacataaattagaaccataaaaaagatgctaatgatacagtgagctccctgtgttaggacatcttcaaatatcactagaaagatagatagaaagatagataaactttatgactgtaatactaatgattaatagtaatatgacaggtattatatgtgagatactgtcctaagtgctttacatgtattaattcacttaatccttgcagtaccttgaaatgtaggtactactactatctccacttacagatggatatactgaagcacagagagaggtgatataacttgctcaaggttacatgactggtaagtggtaaagatgcgatttgaacccaagaaaggtggcttcagaagccatttatgcctggtctaagaaggcatagcgttgtggtcttcagtaagaaatctgacaaaatttctcatcacttccaggtgggttcattatttattcattcattcatccttcaaacattcactttccccctgctgggaaattggagatgaatgacagcccctgcctttgagtggctctcagcctagctggagagacaaccaccttaccatgttctgagtactcatctcagattgtagaaaaagtcatgagcttaaacagaatgtttgacccctccctccattttgactttgaggactttctgtgttctttgatctaccaatggcaacagtaacaagtacacaactcaacctgctacaccttttatgtggtatttttttagaaattgttatttacaaatcaaaaaatgcaaacaattacttttttttctccaatcaatgagtaatggtaaagacaatcaactcaagctaaagcaacaaataaaaatgagcatagcaaaaactataaaagctaaaaagtttcctgaagaaatgaatattaacatgatttacatttgcaaaatttgattcaggaaaactaaacttggtggaaatcattaccaccaagaaaaaccctgtgatggaggccataattataaaatgtgttatggataaaagcatactgatagaagaaccctatcttagttgtaaaatcaatgcaaaaaagtgttaaccccagtgaaaataattctgctaaaataaaactagaaaattagtatagacggaaatattttaatttggtctatagaaaatcratgaagagaatcaaattggcttagtgacatttactcaaaaaagagtttctgagtgaaaattcatcactgagcataattcaggttaatgtgctaaacggcacaacctgctcagggtcaaaacgcaaggctgaaagatcctgatgcattgcgagagcagcagaagggagcaaccactccacctgcggaagttaggtggggcttcacacaggaggtgccgttgaggcagactcctgaggaaggagtgagcatcctgaagatggggatttgacctgtcaacattgacctgtcaaggtctgggacgtctgagatttggtgtaatgatgtacactcttgggcaacagaagcaggtgctttattccataaagcagacccattgttgtacggtggagtaagtgtttatgtggtcttaatatatatgtttatctaggtggtcttctgaggccaagaatttcatccaaaaggaacttccatttattgtatgctatttggcaatcacttgtgtgtattattaattgttgtacgatccctgtgaggtccatgctgttatccccattttgtaaattagaaacctggaggaaattagaataaataactccctccttacccaggaccactcaagattagaaccagcctgactggttttaaaatgaatgccttaatcactaggttgtgttgtttttccatctctaccttcggggtttaaaatcactgatggataaaggttaatttcaagggttaactccagccagcattgctttggaaaatgaccaccgtaccatttcagtgctcagtgattcagccacatctctcaggagtgctggggcctaaatcagatgatactacacaatgtcctcactggacatggcaggagacttcagaactggaggggtaacagtggagggctgagccagagtccacagagtcaggaaggagacagatgggggattactaaatgagaggagccagaaaagagaggaagtcagaaatctgggcagggacagtgtgatcccacagtctcagagaagaatcagccagaaagataggagctgtattggtggaaaatcacagatgktagggaaaggcagcatttcagaactcaaacaggcaggcaaacatgaatactaatgataatagctaccatttgttgaacatttattttgtatttagtgcatttattcaataaatatttataaagcacctaccattctagatgctgggccaagcactggatatgcagtgatgaatgagataacttaggtttgccctcatagaacttatattctagtgagttttatgctgtatgtcatttacccctcccaagaatcacaggaaaccagaattactgtcaccgktttacagatgaggccactgaggctcagagaagttaaggaacttgccctggtcccaagagaaaaagtggaggagcctggatttaaacacagttctgtccaaagcctgtgaaccaacagcctgtgctctgagaaagcaagtggagaaaaggcattagacacagccataagaaggctttggggggaatagttggagtcaaggggaagtgatagaagacagatttcaaaggtctaaggagggagtgggtggagattgatggaaggcggagagtttagagattgtatttgaccagaaagggaggcagagggactccttggagattgtatttgaccagaaagggaggcagagggactccttgaagactgggaatctagtgcctgcttgcaggcagagggcaagtgcctgagccttgagaaagtacagacttgaccttgagagagtagttgaaattttgttgccttctaggtggtcagctgtagacagaccttctcctgggaactgtagggcctgaaattcccaaggtctttgaggtcggagcaacctgaggcctctgaggccaaagcatctgcgatttgagggtgttccctagctggtgatttccatatayaaggacatttcggtaccccaagcagccagtctagaaccaattggtctgccccatacccagcggctccaggaaggcatctgaaaacatggagcaggaagctccgtggctattgcgtgttatcccctagcacaccagccagccgtggagtgactctttgcaattacaaaccagcagctgagtagacgcagtttaaaagtacrttgtaaaagttttatggttagtgaagataagtgcaaaattaatccctacagaacaaagcaatttaaaaagtacataatgaagtgattagctagaaatggtggggagcagaaggagagtgcccaagaacaattttactcaggaatggtcttcacactttggttttttcaattgcattcaatgagggagctgtataaaagagagattaataacatgcacaaacgaggtaacaattgatgaaggatttggggagtcaacctgaaggaaatttttaccttcttaaaaagtttggatgaaggggaaaaatagctataaaggctttgattgggacaattggtgaactttgattatagactggggatttgataatagtcatgtatcaatgtttaatttcctgaattttggaaaaaagcaaaaacaaaagccaaagaaacctggaagctcacaatgtatgttaaagctccccagagtcattttctgtctcccttttgtttccatttttgttctttgttcttctttagctgagtctgcatgctggtcggtatcagaccctggaaggtagcttcttggccaccattacattgttattctagttttcctggaagagaccaccaagcaaggccagaatcagttcctcagaagaactgccacaaactgagcaagggttccttctcctcctcctctgacactgctgtggttttccttggacaagatccgatattcataaatctgaagttgcagaaggaggggtcaggggcatctccaaatacaaatgttcttggctttgtaaagcaatgcaaagggcagggtacctgtgagcacatttttttctagtgctgtaggtgctggtatccagaaattacccttacacacaagtttttctataaagtttggtatccagaaattacccctgcacacaagtttttctataaaacaaagcctacctgtatacaaagtcagtcctgaaaataaagagttaacccctggtgtaaatggcccaggaacaccattcactcctttaggtcttgcctctctctctttctgtctgtctagtttgggaaagttcaagagacagggctctggtctctggagcactgaatggtggggtgctctgttttattcctcaggcctgcttcaaatgctgcacatcaggaggtgagggtcttgatgacttgcttaattttcaccacactaggattgtagtaatatagagaaatcatggactaggggagggaaaagattagtaagaccatgattttaagacagatacttatttgggatttcagtgtttctaaaatcaggttggaccttatacatttggcatatataaataaataataaatatgtaaataaattttaatttactgtccaaactagaagcttttgcgagtgaaagggggtgctactaataacagtggaacactaggtataaaccagaatagtccccagcaaaccagaacatatggtcattctactgagaattttttgtgcatgtttaatcacctccttaaatgccccatctccaatakagtcacatggggagttacagcctcagcatatgaatttgaggaagggggagacaattcagtccatagggagtgctgtaacagaaaaaacacagtgtaagtatcagaaagtcagggattttttatattttgttctgtggtaagattcccatctcctacaacaaagactggcacatagtaagtgctcagtaaataattgctgaactgcattaaagcagaggagggacatgctctgatgtataattttaaaaagtggattggagggcaatacggattgaagggcaacacgacaacgcagaaagaccagggaagaggctctggatggagatgcccacacaaaaataatagggacttggaccaggatgttggctgtgcagatggagagaagtgattaaattcaagctatatttaggaggtagaactgtctgcttttgccgatgtattggatgtggagagggaggaagaagacattgctacagatgaattacaggttacaggcttcggctattagatggatgaggggcagactaagggacagatggggaggcagggaagaaaatcgggaacttcgttttggacatggtaaggttgagatgcctgagacacatgagagtgaaggtgagacgtaggcacttgggtatataaatcttgagctcagaggaatgtagtgtgttttctcctgccccgaaaagctgtggtatagcaatagtgaatcttatcatcagtggaatattatagtgataataattatagctgatacttaggggcctctaaacttcttccaggtgatgaaataaactgtctctgtgtattacttcatttaattctcacagcaactatctttggaatttatcacttttatctccatttcatagacaaggaaactgagtgttggaaggtgaagtgaattgcctaaagtcaccagttcagcaaatgggaaatgtaggacttgacaccaagactgtttggccccagaggctatgctctgaaccataatgacttcctgtcttccaaaaggcaggctcttggatccatatcttacygtgcttctaaattatcctgtgaccctgaaccttagtttgctcacctgggaaatgaagggaggtcctggttaggttcccttcagttctactctattgcagtatgctgatctcttttgtaaatctgtattaaatgagagtttgctatcggtgactttcagagatgacaccagagatgatgcccatgctgacgattcattctgatgtctatgaaaagggcaaatcctttaagagaagatgtagcataccagtgtttataatctgagtttcatttgattaagaggggaagctctttagaacaaatatcatttctgagygagagaatgttcagcatctcagcctcatttgtatcatttgataaaagggccccactgagccaagtgtgaggatgatgcttgagccagacacatagacaccagacattcctctgatgtctgctccccaggcttggccacattgcctcccaccaaccccatctcaatgacacatccattacctgccatcagttggctctatggtgctgggaatgacagagtgtatctaccctggatttcagaaaggaccctcctggcttatcatggcaacaccctttggacactcgtttaaagagtccttctttgggccagtgttatccttttgggggcatctggtatggacggccaatttgaatctgactgggacatgctaatgagccattcatatgtgtgggatttgtttctgattcgattaagcttcagagagaggaaagaaasagccactgattagagacataaaaaaagaaatactttaagtgagtaagtggttcatcttcatataggaaagtataaattaaacatggtccaggagatgygctttgaatagcagctggatagcacaagcatgtccacaaggagacggtgcctcacagcaattgaaagggacttaacccccaaaaagggctctgaatatgctgagtaaatagrtgagcccagttagctgataaaaatgactctcagattagagatgggaaggtttttatttggattttagaaaattgctccccactccatcgccgccatattgtctgtgtgagcagargggagagcggccacagccgctgccgcttccaccacagtgtgaagaaaacaggtctgaaacaaggtcttacccccaagctgcttctgaacacagtgactgccagatctccaaacatcaagtccagctttgtccgccaacctgtctgacatgtcgggacccrtgccaagcagggccagagtttacacagatgttaatacacacagacctcgagaatactgggattacgagtcacatgtggtggaatggggaaatcaagatgactaccagctggttcgaaaattaggccgaggtaaatacagtgaagtatttgaagccatcaacatcacaaataatgaaaaagttgttgttaaaattctcaagccagtaaaaaagaagaaaattaagcgtgaaataaagattttggagaatttgagaggaggtcccaacatcatcacactggcagacattgtaaaagaccctgtgtcacgaacccccgccttggtttttgaacacgtaaacaacacagacttcaagcaattgtaccagacgttnacagactatgatantcgattttacatgtatgagattctgaaggccctggattattgtcacagcatgggaattatgcacagagatgtcaagccccataatgtcatgattgatcatgagcacagaaagctaygactaatagactggggtttggctgagttttatcatcctggccaagaatataatgtccgagttgcttcccgatacttcaaaggtcctgagctacttgtagactatcagatgtacgattatagtttggatatgtggagwttgggttgtatgctggcaagtatgatctttcggaaggagccatttttccatggacntgacaattatgatcagttggtgaggatagccaagnttctggggacagaagatttatatggctatattgacaaatacaacattgaattagatccacgtttcaatgatatcttgggcagacactctcgaaagcgatgggaacgctttgtccacngtgaaaatcagcaccttgtcagccctgaggccttggatttcctggacaaactgctgcgatatgaccaccagtcacggcttactgcaagagaggcmwtggagcacccctatttctacactgttgtgaaggaccaggctcgaatgggttcatctagcatgccagggggcagtacncccrtcagcagcgccaatrtgatgtcagggatttcttcagtgccaayyccttcaccccttggacctctggcaggctcaccagtgattgctgctgccaacccccttgggatgcctgttccagctgccrctggcgctcagcagtaacggccctatctgtctcctgatgcctgagcagaggtgggggagtccacccyctccttgatgcagcttgcgcctggcggggaggggtgaaacacttcagaagcaacgtgtctgaaccgttgcttgtggatttatagtagttcagtcataaaaaaaaattataataggctgaaaaaaaaaaaagaaaatttctccccaaatccctatgacatttaagctcattgtcattctctggcagcaccagtgacagtaatgggggccagagatcytatttcaaaacaaagaagtgattacagtagatagcgcaggtgtcaatgggaccctgatttggaacttgctaatacttctgtctctgagtttggggcttctatagggttttggttccatagatatgcctggacttgaactagcttaccttcccagccttgtgcatcgggaagctgtgagggtcagntccttctagattttgtgtcccctkacaagggttggaagagtctggctgcagccctggcctcaccagctggctccctcttgcgtaagtggagttgccacagggcttctgtctgtggctttccaaggaacctggagctgtatgtcatcttcaaacctggacctttcctctaccaccctggctagcttcacccttggtttcctgccctctgctctggttctgagtttgaaccaaactctcacagcagcccgatgtgcaggagtccaaatgtcctgcctgccccttgcagctccctctctcaccccttggggctagatctgctccctgcatcctcagcctctagtggggtactgctttgaatgaactcatcagctggaattgggaagcggtcaccttccagacactccatctgtccctatacctggagctttctcatatgagccccacacaatagattgaacctctggaaactggtgcctgcagggaccatgcctctttggtcaccttgcctctttacatactggcagcatcacagactgaaacagcagctctcagaactgctggaaatagaggttacccaggaaatgtcctattttgctcacacagtcccctgaaggctggctgggaggctctcctgtgcagcttttctccaagtagtgacttggggactctgattgcttctcttgtgggttcagcatctttgaacttcaagttcaccctggcttaaacatccagcagatggtggggtggggagtagaagtgcacctaaggagacacactggatagtcacctgccttccccgggaagtggcagaggccatgtcctctctcatctcatcgatttgcrccctcctgactgcaaggggtgcagggaaatatggaggagcacccaggtgtcagtgagcaataggggtctctgccacacctttggagaccactctactcctggctcagtttcccaacccctgtatgtcagagcctgacgtcttcctttttccaacttgtcttgagtcccatctggcctgagtttgaacaatagtaatcaggcctgttggctgatatgagatttgaggtaaccacgaataagcccttcttggtcagaaccattaaagataacttctagtctcaatgaccacacatttgcaaagcagtcctcctggaatgtccttccctgaactcctgtggcccagtcattataggcagagcactgggtccaaggaaaagccaggccccctgtatgggatgggccagtttgctgagaatgacacattactgttgcccctctaacttgaccctgggtttcctgtgggtaagcagctgtttcarcaaatcccagattcctgcaaaacagccttttaagtttttcttcatggaaagcttccagacattccagcccagcttgtctctccttggaattctgcccaatgaatcctgctgcctctgatagttatgagggatccctttcaaacagaggaactgcttcaactgtttgttagggctaacccaaatgttcagaccccttcagggacaccttccaagaaaaagcatcatttttttttccaagcagcaattccacacagaggactcttcggaagtgttgattgcaagaagagggcttgggaaaccatatcctcagggagtgtttttctgcaggctctgatgaaaggaataagcattgtcagattttttaaatgttctcttacactaaaatacattaaaataactaaatatgtaccccaggaaacctgggagaacaccaagtaaagtgcactgaggataacgcagaactaaagcctagctctggttccttcattcgtgcaatttatatttttttgagcaccgctcatgtgccagccctgtttagtgtcttggtgaggacaaagttgacatgagccttctctcagagttcggtattgtgggcacataaacaacaaaaaacctctctctcactagtaatcaggggaggttgcaaattaaaactgcggtgagggagaatttcttgcccatcagattggcaaaaattttaaagttggacaatgtcaaatgttggcaaggataggaagcaatatgagcctcatccatgctggtgggagtataatgtgatccacattatttggaacagtgtcacttttcytaggaaagttgaacatgtgtatataacctatgctccagaaatttcagtgagataaatacatggaggcctgcccactctcgtgcaccaggagacacatacaagcgtgttccgaggagcaccatccgtaataccggaaacaagactgtcgaccaactaaagagagcataaataaattactgcatatttatacaatggaacactatggtgatgaaaataaatgaagcaagaagcaagttgcaggatgtgtacaatctggttctatttatatagcgttcacaaacaggcaaaactaaacaatgtgcagtgtaggtttatggcaaggaaattattaaaaaaattcaggataatgggttacctctgggggtaaggaaaagcactcagaggtttctaaggtactgccaaagcattgcttcttaaggggggtggaagatcaacagttgttctttgtactatgtgtctttaagctgcacacacacacagagttatcacacatactgtgcaagaggacttacaggtgatataggaatgcatagccaaggcatgagccaaaactagggcagccagggaaggtaggtgggaattagcaagggaaataagtgtatacgtggtaggggcatgggaatttccagtaaagagartggcagaaagaggggacagaaacccaagaatgtgatccacctatgtccatggcataactggacrtaactagatggcatgagagatgaggctgcaggaaagagacagggccagttctcagaggtcttgcaaaccatgttaaggaatgtgctgttatctggagactaaaggttaccagtgtgggagtgagatattttggagggaggttatctccacactgacattgtcttcatcctggctgctctgttgcacgccctgaacctgacttgctgatggcctctggcttttgtgttggccttgtccagatttgacctctcttccttttttttttttttttttttttcctgagacgaagtcttgctcttgccacccaggctggagtgcaatggcgcgatcttggctcactgcaatctccgcctcctgggttcaagcaattcccctgcctgagcctcctgagtagctgggattacaggcacccgccaccatgcccagctaatttttgtatttttagcagagatggggtttcaccatgttggccaggctggtgtcgaactcctgacctcaggtaatccacctgcctcagcctcccaaagtgctgggattacaggcgttagccaccatgcccggccctctcttctctttcttattcccatgcagagccaggatagaatgaggtgagtgaaatgcccagggtacaaaattgtaggatgcctggagtgtcagtgtcctgcccacccctattgtttgcctacatctctgaccgttcagccactctgcgagtgactttctggtcttctgccagctctccccagccctcagcctcagcctgcatccacctcgtcttcctccccatagcctgctggttttggcttttcactcttgtctctgcttttgcagccaagttaggcgagacagttacacgtaaaaagataattaaccacatgagccaagaaataaggaccacatgagtcgtacaagtcattagttccaagagtttggaggagctgggccaggccggctttggatggatgtggagagcaggaaggaggctttctgggctaagagaacagtgggaacmgtttgccaagagcaaagagctcattaaaagtcataagaagatgaaagctgcacagtatctgagatctgatcttgtggatgtggctatgragtacaaggctgaagtgccaccaaccccagtcccttacccatggtaaccgtaatgaataaattgtggcatacttctccactgagactggacagagcctcagaattcttcccaacacagtgcttcagaaggatattaacaagcaaatggatttcacacaggagtgtaaactcatttgccatccctgtcatagactatggagcagtcatgagtcttggagtagaagagattatcaaactacatcccattgctttgtctactatgtgtccctattttaacccaatttacaactctcagttgtgtctcaagtactgggcatcatttgaggcactggctagaaaatgcaaaatcacagaatacaaaaagtagaggggacctaagacaacattgagtccagctcccccatttggcagctgggggaaattgaggcttgggagcaggaggcttgtttgtgtgagtggccaatacaagatgtaaccctgaccttgtaccagtggctcctcagcctgggataagaaagtgatctgagcctccctgagaacccactacatgcccgcctttgctcgtgggagcttgtcayatacagcatctcttttaaacctggggaatcattattcccaagaaaaagctgacatccaaagacaggtccaagtcaaagactaatatatgacagagccaggatttaaaccctttccaccagcccctaagacctccatgctttcttgtatttctgggtgggtgtttcaagcctcttcagaagcgataacagtactagggttttctgggaagggccggtggtgagtgtgattttgctctgccccaggtaactgttctctacaatccactttaggttcttggtcacatgtgggaggtggtcccagcagctcctctgtaggcatatctgagcattttgtgaggttggagcctttctctccaatgagttcatggttccacaagaggaagctgcctgctatcgcctgtgctcatttgatgacttcctaggttttacgacattaatttaagctctgcagcccaagtaactctctttgattgcagcagtatgcgcttaaatgtcagagctttgctgaaaaaccacttgagtttgaagaaagtcattgtgttcagtaaaatctagccacattttatgtttatgacctttattagggcatcccgctgagctagttaaaaccatgcctgtatagtcagtgaaagcccaggactctcagattcctggattcactcattcaaataatagttattgaatatagactaagtggcaggtgctgatgtatacagtggtaaacacacagacacgatcctgtttccatggcacttatagtccagtgaagggagacagacatttaaagaataaatacagaagtaaaagtattttgagtaagtgttatgaagaaaaaggcagggcactaaagatattcagaggggatctaatttacactgggcaaatcaaaagaggtcgtatttgagctgggtcataagtgggggataaattattcaggacgtgcgatagcaggtgcaaaggcacagagagaggaaagaacttagtgtagtcaaggaacatgttgctcagtgcccgtcagaagcctcaggacccagccttgtgctgatgtgccgtcaggtatgcccagtgcctgcaggactcagcacatgccctcaccatcgtatgtgtaaattagggtctacatcttggtggtttcttcctgtgccctgttccctgtgaccacacctgccttctctgtttccaacccttggtgttcatttctcaggcacccctttggtacccagctacctgccgtctctccctaggcatctctgtccacgagagctcaggatgccaagccatccctgtacccacacttcatcccctgtccagctgccctgcttccccagcacaggccttcctgtgtatatcctccctctggtttggggcttgctctatcgtgccatttgcaaattggacatttaatgtgccaggcccagctccctttctctcccttccttatcccctgcccctcccaatcctccacagaagctccatgatgtcattcaccatgaggtccaaatgccagtgacttcctttcttatcctttgtctaccatcccagagggcctctgagatgagctgtgggtatgacttttgaaattctctcttgggtcaagccactggtcagtggagccacttgtctcccaggagtcggccagcacaggctttctcttgtttgcttcagtgccactgggcagggtccagaagtggcagggtaaacatgctgagtccacatcttctggctgcaaagcccagatgctgccaagaacccaaatgccatggccaaggcagaagctgttaccttctctatagatgagtgccctttcatagaagggaggagactggaaatgttgaccagtgctccctgtctctgagaagggagcgttgtgtacccctctgctgggctgggcatttgggaagaaccctgtcttctgtggcctgtttgctccccaaaggtgggtgtacaggaccgtccaaatagcagcaacgtaataattattaaattattatgaaataataataggcacacacacagactgagggctwmcagtatcctgagcacttcagcaggggctccctgagcccacagcctggtgtggtatccattgtcatgggtgtttgttacatagcccgacaccactccacaagcactcggtgaggccagatctggcccagatggcctgtccccatgttcagggtgtctttgcttccttgaccgccatccacatagtgctcacactgaggtaggctcagtgttaaacacttacccacactgcatcccctcgcccacagggcagaaatgaggcttgggagggaagtaacctgccaaaggtgacacagcagcaggtgacagaggacaaatgtgaatccagttcccacagactccaaagctgtgctttcaagtgcgacatgctactcccacctggcccagatgccccacctcccctggaacccaggatctcttttgagcaccatttagcacgtgtctaagggacaatttggtgacaagtttgagaacattttgcaagagggaaggaggtgattaaacaagcaattgcaatggtgttagttcagggaacaaggcaggaccacacagcacaccaggtaaacctagcggaaggggrtgcagcaaaktgacagtgaactgaggcttggaggatgagtcagggaggcaggcagggttgggtacgtcattgcatgtgcagaagtctgaggtgaggggaaaaaacccatgtgagaggaagtaaaaaaaatagcgtggctacagcatagaggctgtagcagagagtgtattggggagcacaaggtcagggctggaggggtggtggggggcaagcccagatcaggggctgtgccaggggcatggtgcaggagaggcagtggtccagcttacaccttcaatcactccagttgctsagtggagaagagcttggagaaggaatatgggaagagggaggtcaggtgtttggagtctgtggcagagtccaaatgagagatgatgacgacggcctagacaagggaggtggctgcagggatgggaagaggggagtgaattcaggtgctggacagtcatgccgctccttgtaccgtgtctaaaggcacgatgggaggagccgcaccaccattctgattagaatgacggcagatgtgcccactctaaggtgaaatggtgaacctactctttaagaagcaggtcttgtaataaaagagttttgctacgactcatgctctgtgttgtattgttgaaatatgtcaagcaatagccactgttccagtggcaaaaagaatcattaccctgactctttgtgttgtcaataacttcttcatgggattcacaggctttcatagagaacctgagcaaagtgaattggaaatcaggactgtccccagaatgtacaggtcttgggaatggaggtgcacagcctggggccttcaccgccaccttctcatgatcctcagaaccattcctggatgtgggaactcctttcaaagcttgatcatcgtgggggaagtgttggctcttcgttgagtttctttgggatcagacagatccttttgtcttaagtatcagctgtgtgttcttgagcaagggaccttccttttttttattattattttttattttttttattttttgagacagggtctcactctgttgcctaggctggagtgcagtgtgacaccatcagggctcactgcagcttccacctcctgggctcaagcgatcctcctgcctcaaccctccaagttgctgggactacaggcacgtgccaccacgcccgggtaactttttttgaaattttcagcagagatgaggtctcaccatgttacccaagctggtctcaaactcccaagctcaagtgatccacccamctcagcctcccaaagtgctgggattacatgcgtgagccaccgcaactggcaagggacgttctttagtttccacttcctcacttggaattgggcataataactgcctcacagggtgattctaaagattctgctgttcagcttgatagtaatagctaagaatgaccacatgcttattatgcaccaggcattttttaagcacgttgcatgtaattgctttaattttctcagtgaccttctgagatagataggtactcatgatccccrtggagaggaggaaacagaagcacagtgagatcaagtggcttgcccaaggtcacatagtaggcatggagcagagccaggatgtgaacctgagtagtctcatggccagccctgttcataacccacccaccatgttttgctgccttcctgaatgtacagtccagtgcctggcacataggagacgctcaatgaggatgttagtttcctttctattggtcctaagttataaactcaaggcaaaacaagcttaagtgagtgataaatcagtaagccaccttccaactccaacagcctagagcctataggggccaactggtgtgacatggatgggtgaaagggaaggcattcccttcctaactaacacagggaaaacaagctaaatccaaatctggctttatcccagacttattgttgttgatgggtacatgttatatatstgaacttcatctaccaagttcatggtgatgttgacagtatctggcaagtaatatctactgtccaccaggagatcttgattactttccctcagaagccacattcatcagctctaaccaggtatttcagattcacctgaaattcagtaaatgtcagccatttatacattgattgattgactgatgaagcatctatcatttatttattcagcaagtacttataaagtacttctacgtacttggccttttgttaggtgagtgagtgagatataggttttgccctccaggaatacacgatcagtgagtgaggctgacctataagcaggtaagttgtgatatcaagggctgtgggggccagaggagggagaaattggctctactctgaatatcgagcaaagactccacaatgttggggccatatagtcaaggtctttttaaaaaaaaaaaaattttaatgttttagagacaggatctcactatgttgcccaggcttgtctcacactcctgggctcaagcgattctcccaccttagcctcccaaagtgctgagattacaggtgtgagccactgtgcccagcctgatcaaggtcttgagaggtgaattttttcagctgaagaaggagttgggggcaggggggcattctaaaattaccagcagaakggagcaaagcctagaagcacaaaagagtgcaagttcaggaacaytgaaaggtcaggrtggctggaaagattgtagcgagagctttgagatgctgcccattaacacttagaatgcaaaggtttatctttcaaaatctaattgcattcggatcaatctcctattcaccaaggttgctaagaagtttaatatcatttccttctttgcagcgctctccctcagattcagtcagaacccagagcctcggaaagatgcactagaagaagggtgtctggtgacacccttctctgtggtgatcactaattcttgtccaggcccatgtggtccatttgaagaggaagtctctgctgggagtcttgctggttctcctttatgtcaaccactgctgcagactatcatcaagggttttgttaacttctcccccaagtgcaaggagaattcagatctttggaacaaaatgtctggtctctttttttggtggggtagggctcacaggtggagggaaaaagtgcattcattttttttgttggtaaatccacagcaataagagccaatatatgaattaatgactccatagccatcctgctgctataggagcagaaatcaggtatggcctactccttcacagagagtgatctggggagtcaaggtgaaggggctgactttcttcctgctcatgtcaagtggctgcctgaggcctggtgtagaaaggcagagccaggcaggctctgacaagtggctccatgtcttctgcaggtgtggcagtgtggcgggagtgtggaggtcctgccctgctcacggattgcccacattgagcgagcccacaagccctacacagaggacctcaccgcccatgtccgcaggaacgctctcagggtggctgaagtctggatggatgaatttaaaagccacgtctacatggcatggaacataccgcaggaggtagggatctccggtagggatgagtttctcggggattggtggaaaacaaacaaaacaagatatgggaccgaacccttcttcctatgggtcagccagagtcctgtttgccatgcaagaatggactctcaaccccaaaacatattatttgctgaagaaaaggggccatgaggctctaagccatttcttatcctgctaccctaatccctggtcagcatgcttgatgaggacttctctctggatcttagtgtcctaattttaaatgagaaagttggacaggtagctcaagtttccttcatgctcccaggtcctcagcttctctgacattagatgtttcatggtcctggattacaaatataccagtaactacaaaaatttacaaaaagcatcttaatcttcctacagattaggttcaaacttctccattgaacctttgaccagagttataaagatccacatgcctttcaggtttcttgagccacgtgtatggggatgggggcacacctacagggaccttcactaggagatgggagttattctgggcagtttttagacagtgtttaaccttcacagagcctcatcattgcctgccactgtcctctatccctctggtcacctgtacttaagaaatgccagaggaaaagcaatgcttctctggtagttttgtttagccctgccatgtgtcaaggtgaaacatgtggaaatgaccttggactactgagttgagagaacccagctctactactgagttgagagatgccagccacatgattccaacccacttaccagcctgtctgcctagagttcattgcttatgttgcattctgtgtgagacagagctatcagagctattgactacatgacctcattctttcctcccaaggccatggcaatcccttttggagtcctttaggaagcttctaatggggaagtgattgatcttcgctcaaagtgatcatatgaaagccctgttacctaaactctacaccaagctaatgttgctctggttaaatgattgaggaagttgactggttcatgggtgggagcttttagcccacctcccagccacaccaccaccgtaggagaggggaacttgagttgggttgcatactcccacaatcagtgaggtttcagcagttgggagcaagaatgaggagcggagaaatatcagccagagtgcagccaactctaatgtaccagcccgggattgcattcctgacagtaagagtgtttctggggaactgcattaccttctggactcatggtcaggattgaatcacggtattctgcacggggtgccaagccctgtggtaggtgtcctgtgatggcaaaatattaagaacacttggaaactccccaggagctcamcagtgaggcatagcaggtccccaggttctgcttaggactggtgagtgagcatactcttactgccttctctctgtaccccagagctgcaaaacttctagccctctcccccttgcagctgacaggtgttgaaatgcccagcaacccaatgaatggtagagaactgagtgagtgaaaataattgaaaaatgatgaaattcagtgtctgtctgcgactcctcaaggtggtagttcaaatcaratgggtagggggaagtgaacacaagacaggtaagaggtggaattgcccaggataaagccttaggtggagaaggaaaggatcagtgtgtttccgaaaataattctctttcctctcctgttccctgtgtccaaatgtcctctccttcctcttatcaaacttgtacagagtcaatatttcttcatctcccaatccttctcccaagctatatcctgatacttcatcaagactgctttgtcaaggtcaacataggcctcccaaatgcttaatttaatggacattttaaggtctttaacctataggatttcaccttttccttgaatctctgtagctccttgggtccatgattccacaccctggaatcttatctctctccatttattcctaactcttcaagggctcctcttaccttcactgggtgcttacatgctccatgggggatccatccttggcagactgctctcattattccgcatctccctgggtaatatcatctactcttgcattggactcccacccatatgctgccttcctaattaatatctctacccctgatttctgccttcactttcagactcacatctccaactgccagctggacatctcctcttggccattcccacaggcactcagaatgactctgaccagccaaacccatcttcttcctccagatctgctcctgttctcatcctgtctcagttcatggtgccaccatcttccagacatatgagtttgaaaatgacatcatccttcaatcttcctctctctcaatgccctgtcccagtcaatcacaagccctccttcccaccccgacctcctctcatgtctgcattcaggccctgtttttttctctgccacaagcttcagctggttttcctggctcaagtctttatctccttcaaatctatcctctacaatacccaaagttatctttaaaacactcacaacaaccatgccatcgccctgcttaaaatctttaaatgaggccaggcgcagtggctcatgcctgtaatgccagcactttgggaggctgaggtgggtgaatcacttggggtcaggagttcaagaacagcctggccaacatggtgaaaccccatctctactaaaaatacaaaamttagccaggcttggtggcacatgcctgtaatcccagctactcaggaggctgaggcaagagaatcattttaamctgggaggcggaggtcccagtgagctgagatcgtgccactgcactcactccagcctgggtgacagagcgagactgtctcaaaaaaaaaaaaaaaaaaaaaatctttaaatgactcctgctatgtacaaaatcaagcacaaagcccagtgtttggcatggcatcaaaagttcccatgctttctcctctgcctgtattttaaccccactgcctgtattttaatcccactgcctaccactccctgttttgmagtctgcatacgttgcgtggactatgggaactgcccattacataccgtccatgccatgctgtttctcacacctcggtgcttgttcatcctgcttggaattccctaccctctacctcttcctgtatgaccacccctactaaatcttccccatcctttgagactcagctccaggggtccctcctctagaaagccagctccaactggggraagagctccccctcctaaatatctctctgtcattgcatgaccagcctgtgaaagagtgttctgttatctaaaagtctccctctcattagaacagtggctttcaaatctggctgaacttcaaaatcagttgggttccacccccacagattaccacttaactggtttggaaggggcctctgggatctgttttttgggaaagttcttcagaaccactgagaaccaccacaatacaccatgggctctctgaggacagactgctttattcatttttgtgtcattatatctagcacaaggcagggcgcatggtaagagcttggtgacgccttgctaacgcttattaatgagtgagtttgctggcagtgtgagtaatccctctctcccttggttagtgactcctaaaagcagatcttcagaccaactgcatcagaatcgcttgaagaacttttaaaaaaatactcatctgggtctcatcctcagagaggattttgagcggtaggtgccagaatctacaaaaagccctccagatgagagtttagggtggccaggtttgtgtaacacccatttagctagtccttctcattttttcaaacccacaagtgttgcttactccaggaagccctctttgactgtttacctcctcctttgcccccaatcctggcctccacacaatgtaagaagaatgaggcccctcttctattctctctttcactttctcttctttccgtgcctcacacttgttcacaaagagtatgtttacttgtctgaaactcccagactctcgtttcaggccgagagtgtgacatattcctatttgtatacacagtgtttacgatagtgtctgacacataataaacaggtgcttggtaaaggtcagttggaaaagaaggaggatgcatggatgctatatgcttcacacagtttccctaggaggtttaccccctgcctctgagatagctatgccccaatcccttttcctcagctgcaagcacatctgttcccaatttaacctttggtctacagcatcccagctgcaaatatggagctggagcccttcaacccttcccaggtggctgccttgagaattaaataagttaatacatgtaaagactttgatcagtgcttggcacacagcgctagrtaagtgttaactcttgtcggtgatgtgatcgtttatgccctgtactttccttccacagttttcaaatgttcatgctggacagacatcctctgcttgttgccttctaagctgaggcctcctcggaactgtgaactgagcagaactggccctctcacctgctcccttagcaggtccagtccccaacttttgaaaggtcgaagagcctccacctcttgcatcctgctactttaattgaaaatcagtttgtttatcaataaacagaaagtcagtctgcagcaaaacatcaatattttcttaagcagggttcaggagctctagactgcttctcttgcccaaagacaggctgagtgccagggatggcttgtcatgtgcttcagtgatagccctcctttaagtctggctacaaggaattttgtgactatgtggctgcaatactgggcactttttatgtggctaagttaatatatttgtttcctagggctatggtaacaaattaccatgaatttggtggcttcaaacaacagaaatttattctctcccagttctggaagccagaagtctaacattcaggtgccagcagagctgtgctccctycagcatctysaggggagagtccttccttgcctcagccagcttctggtggccctgagggggtccctggttgtggatgtatcaccttagtctcagcctctgtcttcacatggccttctcctctttgtctctatgtgtgtccagaccattctttttcctcttataaagatatcagtcattttagtcatatatagtcacatacagtcataatttaggcaagccccaaacgcaggatgatttcattttgagatcctgaattaattatatctgcaaagaccctggttccaaattaagtcccatttagaggttctgggtagacatgaattttagaggaggccacaattcaactcactacaccaagtatttggcaaaagaggaagatgcatttattgttttctaataagggccaaggtgaccttctcagagaaggtttactttcttctcaatatatgcctcctgctttgaagatgggtttgatgaaatttatagtaaacacacagggcagatatgctgaactattaaaatggaaaggcaaaagtcaattaatacacaggaaggggaaggggacttgatattcagaaagataagctgaacaaagggctagttcttgagcttcctagcaggagatggccacctggtggattgtacctctctcatcttttactcgatcgtmtggagggaggcaaactttgccctgttcctaagtgcagaaagaaacttttcctgtgggaacccagaagtttaggaaaacacagaggcctttgtgagacaggttcttctactggctccctataaaacagacacagtgttaaatttagtcacataaagrcaattataacatgaagggagaaggaatgaatgggtcctgggacacagttttctgatataaggataaagtaccatggagtgtgaagggttaatacttaatgaatgctttagggtcggagtggaaggtagattacatctactgccagttcctgtgttcaccacttcataaatattttcttcacccagcagagtagctcatgctcagtgctaggcctgggggcacagaggtgagtctgatggaagtttcctgaccttaaggagccggagtccagcagagaaaggctaggataacagttgcagagaaggctctgggcaggagtgtgcagcagacaagtcacggatgaggtcattaagaagtactaggaagctgaaatagctccttgtcgttctagaactttaaccttcaggctgtagcaggttcaaatttttatattgcctgaactcttgtgggcaaaaaggaatctatctcttttatatctaaattgtgttttttggtttttttttttttggagacggagtcttgctctgtcgcccaggctggagtgcaatggtgcgatctcggctcactgcaagctccacctcctgggttcacaccattctcctgcctcagcctcccatgtagctgggactacaggcgcccgccaccatgcccggctaatttttttgtatttttagtagagacggggtttcaccatgttcggcaggatggtctcaaactcctgaccttgtgatccgcctgacttggcctcccaaagtgctgggattacaggtgtgagccactgcgcctggcccctaaattgtgttttcactcaagcccacattgtctgatgtcaaaaatttgccctgtttgtgtccagataaatgcagccatttttgtgatctttctcagatattttagacaaaatctgcccaacctcagtaactcaatccctggagttgatgtttgaaccagggattcacaaagagagcatatggaccacagtgtcggtgagagagagttccacttcttcatctgccctccactctgggctggcatcttatgggatgccacatgccccatctgcttgctggccttcatccctgccatggtgtcatcctctgagatgcactgggtcttcttcagatccccagaggatggacccctcggcagcctctgcttttgcatcagctttttctcagccaattctgtgccccattcaacagckggtatgcaggccaaggaattcttagtgctgcccaactctgctctacaagmaatatgaggaagggggcttctctagccttctcactcctggacacaatcatgtgtcacttctgctccctggctgctgcaccgtggtggctcaggagccacctctctgatgctcctgagaaaggagggaaacaagtactctagatgccaagactcccaggcttaaagagagtctgcttctcctgcaaggacttggtccgaggaggcagaagggtgggatcttccaaacacgtagagtaacgttaaaagcagaaactctagacccaggttaattgggttcaaatctcagctccaccgtttattagttgtggagtcttgggcaagttaccaaggaggttactgaacctctctttgtctcaactcatcatccgtaaaggaggattatgtagtgctactttataagtatgagtgggacaaaatacatacgtataaatagaagtaaataaatatatatattgcatgtctcattcagaatacagcctagcactttggaaatgtttaaaccttagctgttacgattcttaggaatagtattattaatactatagaattagcatcatttcatctcaatgctttttccttcccccctctctctcaccttaaagctcagaatctctcatcttgcctcttgaggtagggaaaagctttattcagatggattcttcccatttctttcatctacacccagactatagcttttttttttttttctttaaggatttggcatcttttttttcaatggcccttgatgacaaggcccggcaatgctgacctcgtgtttcgtagtctaaatgaggatggttacggggttaaggtacccgtgggaaaatgcaagagttaacgtgccacatggtcccttccccagtctctaggaatcttgttgggggcacaaggtcatgccaaagtagagtttggggagaagctgcaacctgggagtggcttcatctctgcttcygcgtccctgtgcaggactcaggaattgacattggggacatcactgcraggaaggctctcaggaaacagctgcagtgcaagaccttccggtggtacctggtcagcgtgtacccagagatgaggatgtactccgacatcattgcctatggagtggtaaggagctggcctcctccgggtttcattcagacacagacagaaagaaamatagtgaagaaagggagaggagggaaagagcctctcagctgctcacatgaagaactgcagtaggcctggggaccgggcgctgggttctgcacctgcaagacagcctttacttttacagcccaaacccctccagtcccttgagagaggtacttgtctctcctttatagtcctaagcaattcagctctggccccacacctgcatattccgcttaataaaacacataataaagcagttagcttaagattaaaaggtaaggtaacaaacacctgctgttctcccagctggggtgcctgagggtctatgagtcaccctgygtgcctccctgaccaaggagctaatgcctcccaytygcatgcagagcctccctgagaagagttctagagacagagccatcttgaatttattttatttgctgtatttttagtactgcttgttgatgggcacagagaagttctccctgatgggagggagaaagatggagggggcagagcatagggtttggagttagacagacctggttcaaatcttaaccaggctgcttcccaggtaagtgtcttaatgtcatgggcctcagtttcttcacctgttaaatgggggtaattcaatactatccccgtagagtaaaagaaaatctaagatttgtagatatgtaaccttagacagaaaatgtattttctgtctaaggttaaaatacttcgaatatgataaactctcccattttctcaatattccctggaccgtacaggtcaaatgccgtaaggtattttaaatggtattttgattgatttttggctatctcgcctggcttttgctgacttacagtctaaacacataaacttttgccatgrcaaacccccaagactactctgtgtaggattagctatattayctccatgtcacaggtggggaaacagagtcaaagagtgatttttcacaagctcacataatcagcagtgaaaccaagtctaaaaaaccagcttctggtgtcactctgattcctccctttggagagtgtcccctcagaccttttttgatatctcaagatgaaaacttgaaggaagaactgaagtctcttcttttgattagctgtggttaaagctgagttcaaagcctgccccagatgggaatgtagtgaacaggacaattgcctataagcgggaagaatctgctgagarattgggctcagtgctccctatgtgccccccaactcttatatcatatacatcctaggattccaaagcagacagaattggaatcctagacccatgccctctacccccagggtctctgttagccagaaggccagattgtaggagacagtgttatcctcccatgagtgtccccatggcatggttgacatatcccaagagaaccatgcagtgacctctcacctctccacctctcaggctggtgcaattcacatctctgcaaacacctcagccagtgctgctcaggtagtacctgagtctccagatcctgttgtccccatggaaacacattgcactgtaaggtgcctatctgtcccattcacctccccagaaccatcctgaggacacagctgcctttgatgccccacactccayccatagcaagctatgtatgctgcttggccatgggtgaacccaatcctaaaaggagagttacgctgctgtggctccagagaaactattggccccaagcctctgtgagccagggcaagcttctggattcatgttctcagcaggctgtcagctgtggctgagcaggattagccaaactcacccagagaggcaggagaagcagtaacagtagaggtgtgtacatgtggccactgcaattctgggtcttggccaaaggcattctcatcctccaagcaaaagcatctcatcttatacatgtgtgcaacaggtttaacatgtaggccctccatgccatccccagaaacatttggtttgtcaaatactaagtggcaaatacagggttgtgatctagatctgtctgagtccagagctgggcctgtgtttactgtcatactgaaaaccattcacttgccatcccaaagggctgagctgtgttagccatccctgcagctggcagagggctctgaccccctacacattcatcagcccaccactgctcagggcccagccagcctcccctccctcctgccttctccacgggacaagcccctacataagcagagacacgtctgcttgtcaaagagcataatgaactcttaatgggggcaactggctgaagatgggcaaagtgggatgcagccacaatagcaagagtatttgctgggtctgaatcattcttcctggtaattatttttatcctaaaatgaagagaccagatgtcttttcaggggcataatttctttttcctttttctgttccaactcatgcccaaatgacattgttcaggacaaatgacttctgggactctgagtcgagccagtatcaagtctatagcccagcccattaatccactaataggtcccattaatgactcctgcaggcctaaggacctgtgggccccatcgtgtgggcataagtttcccctggatcattgagcttcatgtccaggagatggggtagcattggattaatcacagctctggtgctgagagtagagatggaggggcatctggaaacagacatgcctggcttctgaatgttagctttgccccttaatngctatgtaaacttgacaatgtgcaaaaccttagtggtcacagtaatgccatttcrtagggcatatgttacagcctcaggattatagccatttgcactacggaaagagcttgggttttggagtctgacagaccagctctttcacttgtccgactatgattccattcatttgggaatgccagtcatttacgcatgtttttcatgtacccactcactcacccactccacgagtgttgactgtctcctttgtgcctggcctgtatgatatacagtgagactgagacccagtctgatgactaacagkgcagacaagtgaagaaggaacaagaatgcaacctgctaagtgctaccctgagaaatggggtgctagtgaagcacaggaatgtggtctcataccagacttgggtcgggaaaggcttccagagtggcagataagctgagagccaagggaagaggcaaagaggaggccaagaccaagggcgatatggkgaagtgtccacacaggctgaatagcactatagacagggaggagagtggagcttgttactacaccacagttccttcatccttaaaagagataatatctctgggctggctagtcattatgagaattaggtgagacatatgtggaaagcacttcacatggtacctgacacatagatgcattcctaaaagctggtttccctgaatggctttgaggaaggttacagcaataataatagcagccaacaattattgcaacatttgttatttgccaggccttatgctaagcacttgtagacattgtttcacttaatcctcataacagccttatgaggtaggcactattattattcctattttagagggaagaaaacaaacaagaaggagttacattgctttattcaagacccctcagctggagccaggtttccatcccagcctgttgcttctagctccttcagtggactacctgcctaarggatggtggggggtgggggaaggaatggcacagagccagggaggactttatcaaaagacacccaccctctcacccaagcactggcattaagaacccaggggaaagccaagtctaatatcagggctctccaggccttcctctttgcaacagcagttagsagattttcctagtgggttacagtgcttggctttagatatgacacccacctcttcatgggctrtaggacaagaacaaagtgtgtttacatatgctcttcccactaaggtaaaccaaggaattggtttataatggaggatttgctgcagaaatgctactgggggctctgcctgagacacacattcatgcaatatttcttcagaatccctgaactgcaagtttgggattaaggtgctaccatccagtagaggaaaggaagctcaaaagaaaagaattcaactctgttccttgtcccctgttaggaacagggtatgcatggagcacacgtgggcctctggttatcggctccatctcatgcctcttcattggcttcattttgctcctgccacaaaccatcaggagtacaaaggccctgctgctgtctctggcctccccgcagatagatagcctccctgtggcctctttccttgtcttccctggattctgatctccagtcccctgttctaggcagagtgttttgattgctaaggagagaacctagtcaagccagctcaagttaaggtgaggggggtaaaggtaccacagactcttacaggagtaggaagtgaaatgcagctggacatgggtactccagcagggaagccactgaagccgctgcaggggcaagatggtctcttttgtctctcattctgtctgcctcgtgcatcrtcatatccttgatcacaactgactttctctgcttgcacatggccatggccaacagaaccccccatgcccagtttaaacagccttacarttctagtggccaccacccactgatcacagtctctgggttctgtttaggttcctaagacaggataagagagtaatgagatggggaggagagagaggcagagaaagagagtgattaattctgaagcgtgggttggtgcccaccatggtccactcagttgtggccggtgagcagggccatgaggtctatgggctgcccttccaagggctgagagtggctgtaagcaagaaagtaacattgaatataagctgtcttacccagacatgtgttaattgccaagactggatccatccacctgtaggtgaggataagagatgctgctctcttctcctgctcccaccctggccccctcctctcttattctcccatccgacctcccactctggaagaccctaagcagtgggccaccaaggggctggccaagccactgctgggtctgcaggaggcagagagcgtctggtcccaggggacctctgaggcctgaaaatagctaagatgttgcccatttcccccaacactaaagagcaaagatttctctcagggacacttgaaggctgttgtcccacccctgaggaagtggaggggctgaagaacaagcaccatcttgtgtgtgcacacgcatgcacatctcctgtaacccagctcactgtttaatgacatgtaagtgtttctcctgcaaaggaggctggtctcccctcagcacctttacgcaaggcaaaagctggtgcttgttggttctatagtgttcaagggccttgggctgattatggacaygaaatctgtctcagcagaatacttgtttctccaragttaattcatttgctctctctgttcctctctctttggtgtggccatctgttctctgatgttcagctgcagaattctctgaagactgatttgtgtcttgaccaggggccagatacagagaatgtycccatcatgtacatctgccatgggatgacgcctcaggtgagtcctctaagagattcctgtgccaggagtgtgcatatgagtgcctggcatggggaaggagagctaggctctgtcatggrgaaggagagctaggctctgtcatggcagctctgggaccaggggcctctggggcttttcattagggcacatcctcatgagctgaagaggatgggtcacacctgccttgcctggaaggaagctgagggagtggatgctatgactccaggatcctccaggatgatgaggaggaaaggggttacacttctaaagagaaacacctgcttcctttgtggaaactatgggtacatcacagttctggctctgacaaccaagctgctccctagcaagagtgggaggttctcccaagctccctgaaatgtcagagtcccttcagagtaccatggcatggtcttcagctcggccctttagtagatcatagctggggccaaaatttatagccatggtccttctttccagctcttcttctgaccttcttctggtggagaatgaagggcagctaccaggaaaataagttattcttacaaattccccattcatagtctaagcttcagatactcaaagaggatgccaagacacaggcaagataaatggttcgttgaacaaagtacagcagacaacccttgaccaagaatgtcataggctgacctgttctgaaytgrtaacattcccagagtttacttatctccagaagtacacaatgatttaaaaagatgttttaggccaggcacggtggctcacacctgtaatctcagcagtttgggaggccaaggtgggtggatcacgagttcaggagatcgagaccatcttggctaacacggtgaaaccccatctctactaaaaatacaaaaaattagccaggtgtggtggcgggcgcctgtagtcccagctactcaggaggctgacgcaggagaatggcgtgaacccgggaggcagagcttgcagtgagctgagatcgcactactgcagtccggcctgggcgacagagcgagattccgtctcaaaaaaaaaaaaaaaaaaaaagatatttagcatgtaagatatgcctatgtgtgcaattacaattaaaagagggtttaaaagagctattgcctaccgaaacacacaactgaaggacatcatgacgtgtatgtcactctgtgtgtgaatgctgagccttcccagggattgtccattgcgacctctaccatcttgtcctttttggggactgagttgctgtgacattactggctggttaattgcaggccagcaaatcaggttgtgctcacacaacccagtatggcaacacrttcctcattgttaacaatggtgtggcatttttaatgagtgactatctttttaaacattgtattgaagtaaaacatatatagagggaataaatgaattgtaagtgtacagcttaatcaatttccagagtgaatacacccagatcaaaaataagagtattgctgcctgattttgaattctacataaataggactatataatatatattttcttatgttgacttctttcataattatatttttttaatttttatttttatttcaatggtttttgagattcaggtggtttttggttacatggatacttggataagttctttagtggtgattgctgaaattttagtacaccygtcacccaagccgtgtacactgtacccagtatgtactcttttattcctcacccctcctcccaaccttccctgctaagtccccaaaatccattatgtcattcttatgcctttgcatcctcatagcttagctcccacttatatgaaagtgaaaacgtacgatatttggtttttcattcctggattacttcacttagaataatggcctccagcttcatccaagttactgcaaaagacattattttakttctttttgtggctgattagtattccatgatgaatatataccacattttctttatccactcgttggctgatgggcactcaggttggttccctatttttacaattgtgaattgtgctgctataaacatgcatgtgcatgcatctttttcatataatgacttcttttcctttgggtagatacccagtagtgggattgctggatcaaatggtagttctactttcagttcttgaaggaatatccatactgttttccatagtggttgtactaatttatattcccaccagcagtgtaaaagtgttccacacagcaaaagaaatcattaaacagacaacccacagtgtgggagaaaatattcacaaactatgcatccaacaaaggataaatatccagaatctacaaggaactcaacagatcagcaagaaaaaaaaaacacatamtctcatcaaaaagccaaaggacatgaatagacaattctcaaaagaaatatacaaacagctaacaaacatatgaaaaaatgctctacatcactaatcatcagggaaatgcaaattaaaacaacaatgagataccaccttactccttcaagaatggcctaattaaaaagtcaaaaaccaatagatgttggcatggatgtggtgaaaagggaacactttcatcattacatttctgagatacrtccctgctattacctgtagttgtaatttsttcatttttactactatgtagtattccattttayaaatatactataattcatgatctattcaactgctgatggacacttggactatggccagtttggaagtatcatgaatactgctgctatgaacaaccttgatcatgtcgtttggtgtacatatatgctcacttcttttggttttatgcccaggagcagaattcctgagtcatagggttgaaatatgttcastttagtagacattgcctgcattagtctgctcaggttgccaaaacaaaatatcacaggccttaaaccacataaacttattttctcacagttctggaggctgggaagcccaagatcagagtgctggcctattcagtttctggtgagggctcctttcttgtcttgaagatggccaccttcttgctgtgtcctcacatgggaaagacagacagcacacaacaatgagctctctggtgtctattcttataaggatgctaatcctatcaggtcagggctgtatccctgtgacctcacttaaccttaacttaaagatctgaagaattatcagcctatccatgttgcaaaaaactgagaaagctctttctgaaaaaaacactaaggtgtggctcatgataaagagaacatgagtttgacttaggtggactttgccagtcatttcaacagaagccaggaatacagatgaaattacacctgtagagagactgccagtttgaactaaaggggacagagaaagtgggatagaatgaaagaatgctattggacttggagtacataggaccatagggaccatagagctatttggctgtgaatgtgctctrttcctcaagaaaaggaagaatgatgcaaaaggcatttttagggatcatcagggctgccactcccaccacaagaccaggagaagggctggtgccctgtctagcctaagggccagggccaccccacacagccacggtagtgatgctggcaccccagtggacctggagggcagagcattgagccaaagagggttattcttgagccttaagagctaatggaatttgacttgctgagattttgaacttgcttgggactcatcactctccttcattctgatttctccttctggaatgagaatatctattctatgcctttcccacagttgtgttttggaaccacatgacttatctaattccacaggctcacattcgaagagaaattttgcsttgggatgaattgtacttggagtctcatttacctgctgtagaggatatttagatgagactttggactttagagttgatgttagaatgagttaagacctttggggctgttgggatggaatgatgtattttgcatgccttaaaaacatgcatttgaggaagccaggggcagaatgttatggactgcattgtgcccctccttgaaaatcatatgttgaaaccctgaccctggtagtatttcaagtgaggaagtaattaaagtcaagtcaggtcataagggtggtgccctaatctgataggattagtgtccttataagagcagacatcaaagagcctgatcactagctttcttttctctctgccatgaaagacacagtgatacagcagctgtctgcaagccaggaagtagttcctaagcagaaactaaattgaccagcatcttgatcttggacttcccagcctccagaactgtgagaaaataaatttgttatttatgccacctagtctgtggcactttgtgacagcctgagccaactaataaactgccaaacaattttccaaaattgttgtaccaatttttacttctcccagctttatattagagttctagttgctctacatccttgccaacatttggtattacccatatttttaattatagccattgtagtgggtgtatagtactatcactctgtggttttaatttgcagttctctgattattaatgaagtcgggcacctgggttttcagcacagaatgtcttcatgttatccttgaatgtgggccaaggtagccaggtcacaagtagttggtctttctgtaaattcttgctctgctttctgacacctgtgatcttatctggaccattggacaaatgttgaatgttttgtctgtgtgatggtagatgttggcctgagcaraggctgccagttctctaccaactgcagatgatacaatatgggacagtatctgttatacttacagtgtggattctggagccagattgcctgaatctaaataccagctttgagcctttctagttgtaaaatcttggcaaggttttaaaatctaagcctatttttttagtttgtaaaatgtggactaacaatggtagatacaccaaaaaggttgttgtgaggatttaacacatgtaaaatatttaaaaccatrcctggtatgtagtaagtcctcaataaatgttatctattagtatttctataaggatggtgttaccattattactccactttaaccctgactcctgttcagtgtaaataccctcaaggttctagctgcaaccaaccctggactgactctccttgaccccatggtgccatctgccatgggggcctgccctggtcaaaacctacccataggccaggtgtggtggctcacgcctgtaatcctagcactttgggaggccgaggcaggcagttcacctgaggtcaggagttcgagaccagcctagccaacatggcaaaaccctgtctctactaaaaatataaaaaaattagccaggcatgttggcacacacctgtaattccagctactcggaaggctgaggctggagaatcacttgaacctgggaggcagaggttgcagtgagctgagactgcgccactgccctccagcctgagcgacagagtgagactccatctcaaaaaaacaaaacagaaaacctactcataaactgttggagcatcactgagttactatggcaccaaaaatgtaagggagttaggaaaggacagtgaagtgggcattgggatgcctgagttcaagggtttgtcttgctacacaattgcaacatcaccttaatcttctctgggcctttattttgttttactattttattgaggtasaattttatactaaaatacaygaatcttaactgcacagttcttaactttgtatacactgtacagtcaccattaagttcaaacccatcattccagaaggcttcctcatttgtcctcttggtcatacctccacccaaaggtaaggatggttctgaccactctcaccattgatgagtttcatctgagcctgtatttctgtctgcagatgataaagctggattgggcttctttaggctcaacactcctagctctgacaatctgcttatctctaattcctttgttttgaaattcagttggcgtgggaaactgtgaatttgtgcttgccaggaatgctgggagctgcctttgtaaataagcttcttgatgtgaagctgcagcaagtctcaaagggttgggtctcccttcctcatcccccaaagccacagaacactcatgcagctgggctgtacagggagcccttggtgtcctggtgacctttcacgccaggccatgctcagatgcacaactagcagtgctgtgtagggaggtttgggaccagcctcagattacacacatttcccaggaaggggtagggatgctgctgtggcaggactctgttgaggctgtggcctgcccagtgagctgggagagctggaaaggacaaggttatcctggggacgggctgggtattcccagcctgagctcctacatccacccatgatgaacgcaggggcaggggatgagtgaaaggtaaggggctgctgtctggcaaggcttcccaaagtcatcttccagcccgcaagaagttcactgctcatggaagagtaagaaaaggggtactctaggacgtgttacctgagaatgaagtcagggtacatctcagaaggagactgtggacaggtgaggaccccaaagatcctctgaatcctacagacttggtccaaatcaaacattcaacatgcatttccagggatgtcaccccctcctactggcagttctcagcaagatctttattgttaccatggccacataggacaaggagagctttgggaaggtcgtgtatgcacggatggaactgtcacatgccattgtgcaggttgtgcactgtacaactgcaggagatggaggtggcactttacattgttgcctagggaatatagaccaagccagggtaayggtatttctgacctcttctatgaaaacttacatattcctccctaagcatcacacttgataggaagcctgaaaatgctgaaagacaatttctgaggcaatatatagtgattaagaaccagactatatgggttcaaatcccagccatgccacttactaactgagtctcttaggtgagtgtctcctcatgcctcaattttattgcctgtaatgaaattggctggtggttggtggtcccttggcttgtagcagcataagagagaatatagtagtactaactttgtggagttgttataaggattaaataaatcaatgcacataaagcgtttagagaacaaaatctggtacacagtcatcgcttactaaatgttggctattattactattaccagattggtaaagacactctagaccatgtccttgagttaatagagtaggaattgtttagcttaaaaagagaacagatttaagggggacgttaaaactccttccaaagtataaggatgcagatttttggctgagcatgaggaaactcttcccaatcattggctcaggttattttgacatctccgtcatcagcactgagccatgtttggcaggctccagggacattctgaaggatttttataycatgtaggctcttaagctaagaaattcctaagggctcttgcaccctggaattctatgactttttaattcattaccttgtccaaatcaaggtaacggcttgtagcagcataactccacccttcacatgacattctccatgtrtgtgtctgtgtccaaattgctccttttttatgaacagcattcatgtgccagatactgttcttggccctgggaaatggatgaaccagaaaaaaagtgactgtccttgtgaagctatattctggtgctagcaacagactattctctattttctaatcttcaaatcttcaccacagccaagatttgaacttgtttctctcttgagcwttgcatatggggcaacatttgagcttcatgacttggatttcagccagcaatggccaagaatggtgaaggtgtaagaagggcaagaaggcaggactgcaggctggccccgttcatcttgctgactttgtaagacggttaagcaagtactgagtgcatttgaggaactgagtatctgtaggcattttctaagtaagacggttaagcaagtactgagtgcatttgaggaactgagtatctgtagrcattttctaaagaaaaacgtcaaaataaaatggagagattaaatgcaaaagtggttcatgtcctatggggaaataaaattatagcctttcatgtgatcttttctacacagacagaaatctaggagttagcatacaacttcatagtgtctgagagagaatcaaaaggtaaatagcaaagtcaarcatgagtacattctcttggaaaattacatactcttkgatgggcccgttaatgtcccaggataatattaaaaggacaggccacttcccctctttgtttttgccttatttctaggtttcaggtatttttcttactcttttcacaaagtttgttgaaggtcgagggacactccaggccactagtgactcagtgactcttatgggtcacagcctgaccatctgaccttttcccctgcagaagtttcccagggcttccgtaacaaagtaccacaagctgcgagacttaaacgacagaaaattactgtctcacaattctgaagcctagaagttcgagatcggtctcagcagggccaagctccctctgaaggcctaggaaagattctactccaggcactctcctaacttctgctggtcccttggcttgtagcagcttaacatcacccttcacatggcattatcagtatgtgcgtctgtgtccaaattgcccctttttataaggacactactcatgttggattaagggtccattctacttctgtgtgacctcatgcaaatttaattatatctgcaatgactctatttccaaataagattacattatgaggtactgggggttaggactttaacatatgaattttggggtgacacaatccaacccagktcacctccaaatgggaagagtggaaatggaaacctgactctcactttctaggccaaaaagggtctcccatcacttcctctctcatttcactggccagacatggtaacatggccctgcctgactcagaggggtagcaagttgtggttttctgtgtgtccgggagatcttgtctttgtcacaaaaacttagatattttctaagtcaatgtcatctctgacaaataagaaaaaataagaaaatggcatctgggatgtgaattgacttgcctgaagtcacactgcaagttactggcaaagatgggactaggaaggatgccagtattttgacttccagtttctccttcattgtttctttcattcattcatcaaacatatgatagattgtcttttatgaagtcctcatattttggaaagtttcattttccttgaagaagaagcttggtctggcaataaaaaacaaaaattgacaagtggaacctaaagagtttctgcatagcaaaaggaattattaacagagtaaacagacaacctacggaatgggagaaaatattcacaaactatgcatctgataaagatctgctatccagaatctataaggaacttaaacaactcaacaagcaaaaacaaataacccattaagaatgggcaaaggacatgaacagacactcctcaaaggaagacatacaagcagccaacmaacaatgaaaaaatgctcatcattactaatcatcagagaaatgcaaatcaaaaccaccatgagataccatctcacaccagtcaaaatggctgttattaaaaagcgataggaatagttttgtagagcaacttataacgggacccagtggggcccagaaatattggagacccaaagacagcttgggctggacaaagggacacatttcacayctgtgtttaaaccttttgagagactgtgcttcagtgccatttaaaaagttcactctgttgtcgttgtgatattcccaggtctcagagaaggccttggataggagaaagcagagggtaactaatcaaattagtgaggtgaagctgctgagaaccatgctaattgattaatgcataaacataaccattttgtttaaattagcagcaaatttcaagcaatcctcaaaataactgagaatattagccctgattagtgtaacagcccggaaaatttcttctggtgggaaacatacaatagtggggtctccccaccaggtctttattcaatcaatcactcattcatttgctcattcaacaaacatgcgttgagtattattttacgtcaagcattacaagacaaaaaggcagctttgcccaagtccctgccctggaggasttcctgtctggagagrgaggcaggaacttagatgatcacagtttatacaatgaaatcttacaacctactgctccacactcctttcccactagcccacaaaaagagagagcaggaataaaaccaggtctggggatttctcccattctttctgcctaaatttactagactgtaaaagacacagggtttttgggggagtgctttttctatggaaaggtaaattgttggttataggagaagaaagatgaaagcgactttaattccttctgacgttttygaaatactaaagctgccacatttatgctccaggaagtgctttgactcaaggtttaaagattagagttgagatgaaagaagtaytctattttaacctggagatgaattccacgaagccatcacctctcccctgtgtggtattggccccagtgtccgcaggggcattaaagacctctcatggatcgtgcttgcacccccatatctttcacgtcacatctcagagacaattgcagaagttttcctttgtgtgccaagaatttaaatgtctagccacttctctgtggcctttggcaaatttctccagttttctatgatttttgtctataaataaataagaataccaggcgctgggtggctgtgcagtttggaaaaacccctgagttgatttcttgtgccctccatgactysgtggcgtgtggtttcattgctcaggtgtctgctagtgaatggtattggggaaccccaaccaggtaatgttcaggggagcctcgyacactcctgcagctttttctggtcacctccagctctgcattatttagggactaatccagttagggttaattgggtctctgtatttattgtcctctgagctgtcacctcgcatggttccaggggccaccattcatgtcagtacagagtgatgcggggactggccctgtgaggctcactctcggcagccaccctcagcttctgtttgtcacacgttcagtttctcggtgcaggatggttgtttgagggggtgcagggtagtggtggatgtgcaatgtggtagaaagagtgtggacatgaggtcagataagggctgggggtccaggcccagttctgcccgtaccacatgtatgacgggggcaagtgatctgatctttctaacctgttaggttcataatctgtaaagttgggatgtaacttgcacatcactgaatgattgtgagggatgtgatggcctgtatgccatgatgcctgacccggtgccccacatgtgatggtgatggtaggtgttactatgcctcacccaagagcaaactctacacgggtgaagaaaggggacatcggaggctaagagttgggctgaaaacctgcggttatccccactccagagtctctgggctggggtggctcccttcattccagcagccctttgagaatccatgaagacccatgcctaacgtatccttgcctgtgttccagagctcaggaacgtgctattctgtctgtctcctcattggtaagtgatgatggagtgagttgtttcattaatccagcctgcagtctcactctttcctgatggcaccactgaaaggaagtgaatggaccttgctaggtccacctggctgtgaatctcagctccaccactggttagcttgtgacctggaactgaacacataatttctcttgacctcaagtatctgtaacttaaagcttagttcataggaaataccatttaactgtgggttatattgtttttatgtcttaatatataatatttatatatctgtttatgcatttacttctgtatgtacacatatatacacacatacacacacacacacacacacacacatataattagtatgtgtccatctctgctagacactttcagtatgtcagttgatgtaatcttaaaaccaccttgccagcttatcctcatttggctcaaacatgtaaagatatccctaggccccaccaccaatagttgagtgtgtaggccataagtcctagaacatgattgtaggttttactatgtcacagccaggagcaactgctcccacggcgaaggctgggaagaggagggctaccrcccagcagcgctgctttctcyaccagcactgactccttagaatccacagcctccacagggcatagcccaaaggactttcacagctgccccctggaacctgcctgcagttrtccctgattctcaggccacccagagctggtgcccattctctgggtgaggtgagcacccagccagcttcccaccctgcttttagaaagaaccttatttccatttctcttttggtagttgcaaaagagaggcagaccagccatctccwgcctggacacatcagctcagggtcaggggagcaggcagacagggagggagccaacggatgttataggcacacagatgttagtgctgcagtgttaaccttctgtgcaccaagtgatggtgaactctgggctgctcctgcagcttccatgctaaaaaaaaaaaaggagctgcttgatttgttattcattccacatgatatgttcttcacttcatgtccaaactccacaattagagttgtaaacagtgagttttgcatgacttttattaaactcctgcaggctggggagaagcagtcattagcagctccacagtggrccaatgttcagactcactaaccagagaggggctgagtctcttgccctccacccaccgttctttggacagtcttgcttcccaggcctctctggccttggggacaggtcaccaaacccagtgacagaggagctaattttagatcccgccttggctctgtgctctctgccaagtcacattacctcactgagcctccctgatcagtaaaatgggggcgggtgctattaaataaagtaacaaacctgcatgtgcctagcaccaaatcrggcacagaactgggctcagtaatattggtctctcgttcaaactggagtaatctctcaacaaacattcatgattattaaaggtagcttgcatttgttgcttactgtttctaggcatctttctaagtgctttgtatatctaagctcagttaaaactctcaatggccctttgaagtaggcactgctattctttacaggtgagaaaactggggcttaaggcaggtatgtaacttgctcaaggttacacaattaccgagtggtagaacctggtttggaacccaggttgcctaacttcagaccccatgctcagagccatgactcagcactgtctccctagtttagttaaacatgtggcccctgctctcaggaagttctctagacagagacagaacaataagccatcacagggtggtgtaatgccagcttggcacacaggcaacatgcagtgcacacttgctcatgagtgaaggttgcaatgagaatatgggatggacttcctgattagtcaactacccaggcatactcttctccttaggatctaaaggaaaactgaatctaatttgcagttttctccctgacagtactgatggcaggtttctaagatatggttggaggagatttgaaaatatctctcaatcagcgctacccttccccatccaccctgggcttgaacacaggccacaggctcatcagctccctcctggcttgtgagggctgtctgcacatgcctcctgcctttaaggttctccactttctctgaggaattggggtactcatctccccaytgggagatatctaatctcagcattccagggcccgagcattasagccaaagccccccacttcccttctcccctttcttatccctcaagcctcagccaaaagcctgcttctttagggcagtctttcctgaccatccyatctaaggtgtccttacttgttattcttagatctctgtaccttgtctgattttttcacagctcttggatttggtgattctttgtgaattgttacacctgatggtctttctccaccactagatggtgagttcctccagggagaggcctttgttttattctccaggtatccccttgttcctagtgcaccgcctggcacagggaagccactcaatgcacctctgtttcctaaatgaatgttaagaaagttgttgattttttatgtaaatgaaggcttagccagtcttcctcacagagccctcctagcagcctgcagacacgcagcctttgaaaattcccagccttaatctgaagcctgttttttcttctgtaaaatggggttaaggccatctaccttacagaggctttgtgaagattaagaggagggatacaattgacccttgaacaacatgggtttgaactgcatggatccacttagatacaaattttcttctgcctctgccacagcaagacaacccctcctcttcctcctcctcagcctgctgaacacaaagatgccctccacccaccattctttggaaagtgaagaactttatgatggtccatttctgcttagtaaatttttctcatctttgtgatttcttatttctattttcttttctctagcttactttattgtaagaattcagtatataatacacataaaacacaaaatgtgtgttaactgtttatgttatccataaggcttctggtcaacagtaggctgttagcagttaagttttgggggagtcaaaagttatacatgggccaggcgcggtcgctcacgactgtaatcccagcactttgggaggccgaggtgggcagatcatgaagtcaggacaccattctggctaacacagtgagaccccgtctctactaaaaatacaaaaaaattagccaggcatggtggcgggcacctgtagtcccagctactcaggaggctgaaacaggagaacggcgtgaacccgggaggtagagcttgcagtgagccgagattgcgccactgcactccagcctggacaacagagcgagactccgtctcaaaaaaaggaaacttacacatggatttccaacggcatggggagtcagcacccctaacccctgcattgttcaggatcagcagtaaataggatgcttggcaccatggctggcaaacatgaaaccctcaatcaaccaggtaatcactgttattgctaatattagtattagttgttattagtcaagataagagctggcagaatctgtatctgtttatcacattcagtatatttttatggcgacctgggatgggagcttgagagatgtgccctcccctactgggatagaagccagcccctggttatctttcttaatgatgggccagttgctatgagcayaggttggaaaggagcaggggacacctccttctatcagtgtctctcctgccaccaagtcatgctagcacatgaagctgacctgcctttccatttgactcaacccccaggcagaaaacatgtaaactcctcagaccccaaggatttggcagggctgctttcactaacacttccccttgcagctttctataattcattcccccattcaaaatggtcttgcaaaaccacacccaggagagtccaggatatgaacagcaagccagtgacagagtataagttgcaagagttccatctccctcatggcatgtataccgtgccctccccgaaggcacttcctctttcatttgaagcaggaagtggggaggttttcctatgatgtcccttgcaccaagtgtagaagtagaccttcaagaagttgggtacttgagttgctgctctttggtcccgtttcttagtagggtatcaccaactttttaggtggggcagttctttactgcgtgggactgtcctattcaatgtaggatgcttaccattctttgaccctgacaccagcagtgtccmtayaagaccaaaacatccccatacacctccaaaaggcctctggaggaggtggtaccactcctggctgagaatctgagaagggagagtaaataaagaagttctggaatttgggaatggctggcagcattgagcgtgggtatctgaataatgtttatatcagggcaacttaaggaaatgcttgtctattgcaagacagttcctaaggagatgtgttcagaatatatcacgggcataaatggattcttatatttgattttcccaagtaacccaattgttaccacattgcctttgtcccagatgctttttctgaaatcggtttgttgctctgcattagccctgcccgggtagagctttggtggagtccttgaggttagcactgtcttaatatactgggaatttaagcagagctgggccctctaaatcaatcaccagaacagctttagtttttttcttgctcaaaagtgcactattaaatgcagaaacacgtatgggagtggaggttggcttgggtgaaggacackttttaaaagaaaaattttataacaattttttctgcaggaaaaaggacttgctggtcttgcttcttgtacaactgggctacggaatagatttacatctccgcagcatttttagcatccttggaataygctgggtcattcagaagtcacctaatcatattttcttggggcwctccaggtgtttaacaaatacatgttgaacaaaggaacaactaaattaatggaaaattaactaaagctttttaagtggtgattacaaaatggaatgagccagtgttccccttctcgcaccctctgggggcttcttgggtggcaaagttcaccctgtccttgggacctgaggacagttgaatccaagggagcatttcatccctcataatgcgtgccttggttgtggaatgtctgggaggacatggcagtgagaaaacctctatctgaggaagcaaatgaggaagtggagtcagcaagtgtagacttctcttgctcagagttttctgtgaagggatgggggccctggccatcagaagggatgtggggttgaaaggaggtgtgcatttggatttgctttttaaagaaagcaataagggaacatgttttgagactgaagggaagaaataagtagagagatctatttaagggggcaattaacaaagcaatatccctgggggtggggacagggtgaggagaggtgggatggtcctggagcacaggaaatgaacttctgctgaggcccaggaggaacaagtttgcaggctgtcttgcaactgaagcataaggggatctgggtatgtgagagaatggagaaggtttagaaaccctgcagagtgaaagtggctcagctgctgagcaggtacccaaagaagtaatactaggttgtgttgaagtacctggttgaggttaaaratcatgagtttgtggtggatttaatttacccagttccaygaattttctctggtggtgctagcatccagggaacaggtgtggagaaggtgaacaaggctatagaggtggggtttacagggtgtaaaaggcagaaaaagtaaggaatttaaaaattgaagctgctagcaagagtgccattattaaaaattgggcgcagcatttctagggagaggtcaggaaagagtggtaagtatagaaggaaagaaagaaaattattattccaaaggcctcaattaggttgatgagcaggcattgggaagtaagagagtgggtaatcaagattaataggtgtgtcattttgtgttgctataacctgaggctgagaaatttataatgaagagaaattcatcagctcatggctatggaagctgggaaggccaatatcaaggggccagcatccggtgagggccttcttgtggtgtcatcccatggtggaagtgtagaaagaagggctagagaggggactaaacttgtccttttacaaggaacccattcccttgatgatggcactaatccattcatgagggcagtgctccagtgatccaaacaccttccattaggccctacctcccagcaccaccacattaaggatcaagttttcaacacatgaactttgggggacacagtcaaaccacagcaaggtgattgggcaaaagtagggcaatggagtattagacttcagaggtaaagtagtttggggcastaagagctggggtctaggtgtgggtgggctaaagtggaacacagcataccaccccagaattgaggccacagtgcaaygtgaatgctgcccagtgtgatgtagaggaagctgtgagcctggtgccaaagaccttgatggatgtagctgactgcctggcacttaagtgagaagaacaacatgggcagagggcaatggtgtctgatgtctgattcttacagaggagatgttttttacactagggtggaagagtggaggtgtagaagaggcaccaggggagaggagagtgtcaactccaccttgaatcctgattagagactcagcagattcaaaaacacatgaataggcatcctccaggaagagccttgtttggtgggaaaggaaaggtttgttttgttggaaagggccatcctggaatgatactgggggtttgataagaggcttcagaaggctcaagagaaggcttaggagggagggcaaggaagggaaggtcaactggggacgaagcacagagcatatcaggggtggagtgaggataagaaacccccacaaagacaaaaattaaatctcatgtagggacatatttagtgaattgcctttattgaaagtaacatatcttcatgaaaatagacaatgaaatgaatatctgagactggtttcctccaggaaatctgtgctatgtgatttccaccatcgcttacacggcgaggttcttcctgccacgccaggaagtggtgagtagagtcgtatatggagatagaaccattgaagatttttcttccagggagtcttcatgatccatcttccactggagtttcctctaaggaattccctgtggctaaggtaaagccataaggaagttccatgagaactgggaggattggaggaagtgggtatcagaatcagacygagagaaacracatctccttgtgctgcagccactgysgtcacccctggcccccagcttttgtgctcaggacaaagcgcccacttccaaaactctgtctgtcctcgtggcaactgaacttcgttcccatcacattgctccagtatttcatgctacattccgtccaggaccatcagggctgtatggagtttccactgtgccaaaggaaggaatcagcatcccagttaccatgaagaaaagagggctgggagtagtgaccttggggggtcaaggatgccttcctgaagagctgcttctggaccttaaaggaagaaagagtgggatatgcaccagcaaaggcagagaagaacacttcaaaagtggaggccacatgtggaaaggggtagcatcagaacctttccttctttcctcttgaagaagcagggcattgtgatggttgaggtgggctttagggccagatgacttgagttcagatcccagctctgccagttttcctgtttgatagcaaattgttgctatccaataatttacctctctttcattcttttttctcatctaaaaatggacatgccctcatctcttccccagggttatttaaataagtatgtataaagcatttagcatccctgacatatagtgtgaactcattaaattggaaatattatcattataataatttttgtccatcaggaggggataaaatgaatgtaatttgctgaacacctcccttgtgtgccatatactttacaaacacctgtaaaaatgaggtacccatatcagaacaatttaccatataacaaactaccccaaaatttggtagactgagacacatccattttttttttcctgagagcaggcaatttgggctaggctagactggccctaycttctgctagtctcagctgggctgactcaggcatctgtggtcaactgctgctcagctagttgactctgcttctggagactggctgacagtcggctggagtgagaggcttctgggccatgtgtgtgttatcatctcacaggctaggccaggcttctacacatagtggcaggcacagggcagcaagagaaggccagcaccaatgcacgagtgcccatcaggtctatgcttgtgtcacataggtgatgcacatttcattggcccaaagtaagacacagcacagcccagactcgataaagggagaaatgaagtgaagggaagagctgcgcagtcacattgcaaagtagtttgtatgcgaggatgggaaaaatctgtggccatttgtataacacgtcacaatgcctcatcatgttcmctttgtattattttattcatttgttcactcattcaaaaatattgagtgctcatctgtggtatggcaagaaaagggatccccaatatgaatggccttagttttgtaacactttctctgtcatagtgcaatccatctggcattgctatctgaggtctgtaacatccaataaagacatgagctggaggaaagcaggttatattttccccagggacaaggaaaatggagatggagatggtgttggagcaagtgaaatagagagacttatatctgcagattaaaatcagccaccattattttatccacatgaactccatttttttttctgggctaacatcttcctactggatcttaacctgcatattttattactrtgttctttcctacatccttctgatcaccaagattgctagtgagtccagatcccacattgaccatatgttatctgtgcatactcgtgcacatgcatgcacacacacacacatacacacacacatgcacacacagacacacacacattccaccactctcactgggaatattctaagctctgcttaatgctgtgcrgaataactgttgtatgctaaaaaggtattgagcctcctcatttctcaggaggaccaggtaaggtctagacatggcatagactatgtcctggggagagaccccattctatccaagtcattaatccactgkgctatatggagagtgatgtccaaggtccaaaactggccagagagcagcttagaggagttttggagtaaggggtacgaggcaggcaccagggagtgcacctgcatgaatttctggagtccaaatgtccctggaataatttattaacacattrcttgattcaattaatatgttttgagtgtatatcatgtaataagcagaggttcattaatagagatataagggtgggtaagacaaacatggtgtctgccctcagggaacttggratctaaagggggtgactgctgttacagtcgcatccctgacagctaacaccaagcacaaatccttctatgtaattctgccaacatcctcggaggttggcagcatttttagcctgtttccactgatgagtaaattgaggggatgaatggctgtgtaaactgtctctagtcacatagctcgtgggtagtgggggcagagacttgagtcgaggcagtttggatcccgactcagtctttcttgaatcacccctcccctccacccacaatggatcaagtctcattggtatatatgttcaaagtttcttgtacttttccttaagagcatgcattgcatttagaagttctattttggtgtgattatttggggaggaacctgtccatcagttcagtcttccttatgctccagtaatgtatgacctcaaaatctcaatggcttactgggccctactgcgtgtctgtttcttccctgaccttatctctcttttgcagaatcttgtcaaaagcagctgatactaaaaaggcacactctgcatctaagcatgggctcacttgcaacrttagcagtctaccaagatattgaggccaactaagatatttgtatcttaccaaggtatttcaccaaccgtctcttcgttgcatagatgaggtcaccatctttccagcctccagtggtggtttactcatcacctacctctggccttaaagtcagtgcccatattttaaggcttggcagtacccctcctctagtgtcrgtttctttatcagkcatcttaggctgatgtccgcacatctcagtggcttacaacaagatgtgtttatttcttactcatgctcctcggttgtcatcattcagcttcagctctgtcatctcaactttttctagggccaaaggggcagctcctttccaggatgctgcaggtccagtggcagagaacaaaaagacagtgtatcacatgattgctcctgaagcttctgattgggaatgacgtctgtcactcccgctcaygtyccagctagaaacgtggccatgtctggcattaatgatctggtgatgtacgatagctcagtagggaggggaatacagraagaagcatcataggagagggcagagactatttcgaacaacaaatcaatctgtatttaagaagtatgaattgactgtcacaagctgatgcagagtaggcagactgttgtttgtgaagartgtcaggggaagtattcctcagtgcatasgatatgcaccctctttgctgtttgtgattgagtaggcacagcttatagcagacaagcagacacagctatgaagtgttttgagcawtaccttccaaaatagggcccagtagtcagatatctggtgtttgagatttcttgaacatagagaacttactaatgaacaagctaactgtatttgttaatttgargggagggggtcattatcaacaacaaataaaacaaatttgggtagcttaaggtaaagacaaagggtraatgttattagagaaaacctggggygattcctttttatagactcagaggaaaggttgaccgggaaaggcaggaactaggacagctccaggggcctcagcagtaaaagttyatgggtcttccctagagagttgccctaaatgtgtcttagcttcagggctactttgtctgtgtcttttccttttcaggttttaaattcctgggagaagtctacttggctctttgtaacagctccattctcactgatggtcagggtggcagagtcccagagcatagaccatttgggccaagccctggacagagccatcttcagaggaaatgggtcactgtcagccaggcagcccctccaaggggtgtgtgctagattaccagaggcaggtacttcctgagggtcaaagcgaggatgaaatgtgcttttcaccaaaggtcccttgtctccgggatgacctcatggcctacagagaaggattggcaagataagtttgtgtgatggtgtcccataaacagtcccaggtcagaagggtgcagctgttcctcagagccccaggtctgccttgcagggacctcaggtgtcatcatggctgctgcactgaaaggtggcctgtcagatgtggagtccccagaaggctcaggagcaccaagtctggtgtgtatgagccccactgctgactgaggttgcgctagggcccaagtacagtgacaggcttgggctcagcctctatctagtatcagtgctgaggrcctggacataatggccacaggtatagctagccatgggccagcattgtcttgagtcaggtttctctagaagcagatcctgagacaagggtttgtgacaagtaatgtatctgaaaggcagttctagaagcattagtaaggcagtggaaacatgagccaagggagaaagaaaggtcaattcatgtcatgtgaatgcacaggttagcagtggggggctgctggtgccagtgctgctggggatttctggaggcctgtagggaatatatctccaaattagcccaagaagcragaaggatgtgttatttgtccaccagcttccatccaccattggttgggggctgctcctggagctaggtacaggcaaggcaarctcctgcagccagaaaagtcccccaggcagagggcagcaggggccaatagaggaggttgttcacatggccagggctggggagtgcccagatgcatgggtgaggcactaacagtatctgctatagccacaaacagggctgacaccaggttatgctgtcaaagtgaatgggatgggttttccaggagtcactcgagctttgtcctatatccaggagaggctgagccccgagggggattgtcaccacatccttgctatgttccacatctgatgatggtcttctcaagggttgctgatgggccaggtgtgttttgaaggacagccactgagggctgtcagtctctctgccttttaaggctgagtgcaatgactgcgtctccagagcacttgagatatccgagtgcgatgtcgctccccatgccctttgcggctctttgctgtctctgattttgttctgccagcagcacgcatcctgcgcatatcctttccctgagccaagcccaattcttcaaccgctgaggcctggcctaccaccctggccattgctattgattgtgcctcctctgtgatctgtcccatggcagcgtgtttctgcttgatgtggcttttgtttgcagctcccatctgtgtcaaggcactttgctggagaaagccactgatgcagragcctgtcccaggcagccaggctggtctggggggtgcaggcagagggcaggaggaggaaagggaggagcagtggcagaagaatctggatgagrggctaaggcctagatcaggagagtttgcaagccctggtccctagagacacacccrgaggctgcagaaaaagagagacttcaccagcaatcccagtaaaatggggcacccattctttgtcttgtactcaaccacaccaaggcacctccaggccaagcttgcttccaggctccttggacgtttttgagtcagaagactcttagagcccctcagatgtgctaacaagtgggggcacttactgatctgaatcacagctccctggkgaccagyggggtgctacccagtctcctccccacctcatcccattggcactatcatttttcaaatggcattgtactgtcaagcgtctgtggcttgtgtttgcctgtttcctctgctagaagtcccttgtccttgacaaacatttgggcaaactactctctctttaggctgttgtctttagactcattactcactgacagccccaggtagagactgttactccagctctggggcaccccagcacactgcccactcatctgttataagcctggccatgagtatattctacccatcctcctgcatgtctgtctctccgccaggctgatagtccctgagggaggggctcccgctcttccctctgctttcccaatgcycaggccagccctggcacccgagaggcaaagagggtgtttgttgaattraatgggatcgactcctcactgatgggctgagttccagctacaaacttctccccaaagagctgagggattcgtgtgcctgtgctcagcctyacytgttcccgctccaccagggaaatgggttcacagaggaagccctgagctagaaacccagccttacacatgtatgtcgtcacactaatggagaatggtgcttataaatgcttcccattcctcacgtggacctcgtgctgtggttgatgaacataagatcattctggaaatgactctccttcatttctgatttagcatcagtrcactgtggccctcagcactgtagcgaacttctgtgtcaaggggttaatgaccaataaccaaacccttaaatcagcctgcctgtctgcagagaggcctgcagctcgttctttgaaaaagaggraaaagrgcccatttctaatacacattctggatgtcaaagccagcactctgtaaattgaaatttaataaagcaaggctcccttccttcttcccgccctctgtgtctggcaccctgcctgtttccatgactcctacctgcagacctattgatcagactcaagacgggcacagagatgagagggtgaggcattgcagctggacgggtagccctctccctcctgggtcttttcttgccctcctatggataccctsgtccctgcctaccttgtccttgccctgcagatagggataagttcccccttctcattgtgggggcaagctagatcccgatctgcaggggcattgcttttaagctagaatccagaagggtgtgtgttgcgccaacatttcactcctaggcttcccaaactctccttaacccagctggttttcaaccttggttgcacattagaatcacctggaataaatccccgtgcccaggccccagtccctgagactgtggtttataggttttaaagctccccaggtgattctgctctgcagccaaggtggagaccyctgccttagcttgattgcattcaggagtttgtccttgtgattcttgtgatttcatttgctctcagatattcctcctcttccaagatccagcccacagcttgactgtgccttcaatgacctttgccaaccgtccaatcgtaaaagtttgcaatcaccccattatgtgtgactcttaactccctagacagtgtcacactcccctgttatgtcccccagcccctcagagagctgggctcttaattccttgttgggctgcaaccaacaaaaatatggataaatatctgaagaaatgactgcaaggatgctggttcatccctttccaatgtaagtccctggccaattccgttgttttctcccttatgatgggttctagaacctcttgtaaacagtgtcccartataactctccctttctacccctcaccactctctaggcccaggacagtttcagccaaagacgatcactgcwgccccatgcaggaggctcagcrgggagagtctaaatgccccaaagatacctcatttttcacgggcacctacttgataggccagcagagttgtcaaggaaggctcatttaatggaggaaaaacagctagtccaaatttacatgcccatcatttggaagagaactcgtactccagttgtgccttgaaaatgtgtgtattattaagtaatgtaactaaccctattttcccaatgttctagatttgcctgggaggccctccttgactctccctctgcccatcccatgatttttgcatctcagtctttgtttagcttggtgagggctccagaatttctgcagaggcataacataggtattgaggtgttggtagaagaggggattggatgattgaaaaatacataaattgtagttccacttttagttctttaaggaatctccaaaccatttgatccagcaatcccaatcctgggtgtttactgaaaggaaaagaagtcattctatggaaaagacactggcacatgcgtgtttatagcagcacaattcacaattgcaaaaacatggaaccagcytaaatgcccattaaccaatgagtaaagaaaatgtgrtatatataccatagaatacttctcagccatgaacaggaatgagataatggcatttgcagcaacttggatggagttgcaggccattctaaatgaagtaactcaggaatggaaaaccaaacatcctatgctctcagttaaagtgcaagctatgctatgaggatgcaaaggtgtaaaaattatataatggactctggggacttggaggaagaggtgggagggaagtgagggataaaagatacacaatggggccaggcacagtggctrtgcctgtaatcccagcactttcagaggccgaggcragcagttcacctgaggtcaggagttcgagaccagcctggccaacatgttgaaaccctgtccctactaaawgtaaaaaaaattagctgggtgtggtagtataygcctgtaatcccagccacttgggaggctgagtcaggagacttgcttgaacctgggaggcggaggttgcagtgagctgagatcatgccactgcaccccagactgagcgacagagtgagactgtcaaaaaattaaaaaataaaaaccctacacattaggcagagtatccactgcttgggtgctgggtgcaccaaaatctcagaaagcactactaaagaatttatacaaccgaacaccacttgttccccaaaaactattgacataataatttaaaaataaaaatacgtagattggccatatcaaagaatgcaagggagtggggcctggtggaggttggaggcgggaggcaggaggttgagattctcatctgcatgtttgcaaaggctctttggtggagtagaagctaacaaaggcctactcatctgcaacrtcctcctcctggacagaagcctcctgcttcagagaagtggttttcaaacttcttaaaattcatcataacctgttgttcaaagaaaatgttatatgaaagccagttatccaaaagacaaaagaagayctgctgtkatggggcygggagaggggctctagaaccccacccacaatggcccctgagaccccttcttggaatccccagagctcagcgtgacaacctggtgggaacggccctggtagtcccattgctggttcatgggtgagttcatggtggccctcgggaccaagctcccgggcctgggyagctgcagctgaggttcgggactgggcrgaggcagtggccatcagtgcagccgaggagagcccctccaaggaatgggtaaggggccacaggccctgagctgccagaactcagccttgctcaggacttctccctaggcaaggaggggagagagcaacygcctacctgagtgtcttcacaagtttttaaaactctcatagcctcagtttccttatccttaaaagtggcagtagccacgggcatggaaaacacctagcagaggactgctaggcgcacaaaactatgtgtgtkttcttctcttccttcccttcctgaagctgtggcagagtttccatcagccaggtgaggcttgacacatgtgaggggtggcttctwtggagggctagaggccaggctctgagaccagggtatcctgcaggatgggggcccttgccccaaggtgagggacagagtcaggagaacctccggccctgggggacgttacccagcctcgactctgtggctctaaaggcaggaatgtgcaaccagagttctgkggtctccctggccagctgttagctctcagtcatggctcctacccctggcctggaggagaggaaaatgccactagcgtaagatccaggatacggatgtgttgattgttttaccttgcaggtgattttgctcttcctcctgcaagaatcaaaatgaaatgctggagatctggtttrcagccctgctgagctgtgtagagctgastagagaatgagccaaatcaatcattggcagctgaggaggagctgagtgggyggggatgacgtttctctgccccgggggtttgtaagacgtccacaggcaggataacagctcaccccagcctcrgaccagagttacaggagggatgctgctgtctcagaactttgtagcatcttttattctaggctcctccagytctctggtactgtcttagtccaggcccccatcatggttggaagggatcacagtggaagtcctctcccggctccccctgcccctcccagcctggaggctggagctggagtgaccccagggaggtgggcaagggaggtgagtggtcgyacatatggctctggagttaaactgcctcgctgtaaatctcagctactcaccaaccgtgcgacttyggaaacattgcttatggtctccgtgcctcagctttctcgtctrtaaggtaagggataatattagtacctgcctcatgagttattgctaagattaaacaagataaarcatgtaagtcatttcatgtctggcacagtgtaagaggtaaaaacatgttagcttttattataccttaagttggggtatctcaacagcggcactactgacattttggctagataattctttgctgtggggggctgtcctgtgcacttaggatgttgagtgggatcccagaccagccactagacacctcctaccacccccaccatcatgacaaccaaaaatgtctccaggcattccagatagcccctggtttataacattcctccaytgaggaccaycgttytaagtcactttttgccttaaacgttccagagtccccattgctcagaaagcttagctatgcttgctgggactgcaggcactgaaggtagggcatcttgaacaccttttttgtgttcgarcaatttgtttatttaatccgctaggctgggcttctgagatgtccatgtgaggacttgagaraatcctctttgccgaacctccctctgtgatctgccagccttgtgattacgccagtcaagaggcactttgttgttttgtttttaaataacaaycgtctgccccattatgattttcccagactctggagcaataaacagctctgatgacagctgtaccagatagtaagtgcacacgtctctcccagcatctccctaaactcttcagagcagctaagtggataaaactgatttcagctgttacctgagtagccacttgtgtctgccaagtctgctccagagacaagaaccaggctttgatgacagaagaagaaaaacatgggaatgactggctccctggctgtccttgtctcacagcccacatccccaaacctcaggaaatctgggtcctggcatgcagggagattaagagctacagtgtcctaaggaggtcacagtgcattcaacccaggggtataaacaggtgtgcaccttttggtgagaggcccaggtggcaggctgaggctccacacagttgaatattcagggcagtctttctggatatggtgggttctcgtttctattttcaaagtagtaagagttggggtaggtgagtacaagaagcaggggcacttctcatattcatgtgattggggtcattgtttcctgatatgttgttggtttccctaatgcggcatggcttctccaggacagggaccatggcttttctcatttctgtagtcctagatcccaacttagagattacttgttagttgaatagaggtatgggtgtgatgtctaactctatggctgtttaattttctccatcctaccagttgccaagttctccctcaactccaataaactagaagccacaggacatcagctttcttcggtggtgacctggaaatccaggccacacaatggacagtcycaggattctgatgagcaaaccacctcttgcccaggatagctttgaagaggctccccttgcctcttgttctggttacatttccacatcaaagctggacatcccacatttggcctctgctcagaactttggtcacagtraatccttcacctttgttatagaaaaactcagtcattttagtcattttgatatcaattaccatggatttgccaagcttgataacttgtaargtgaccacagagagcagatcttrgctgtaatgagcgtcttctgctcctccctccagacacactctccacccacctccctccaccctgagaggctgacgttatggaacatttcaatggaaatctctggtttccagttgggttctgccagtggcctgacctagcatgagattgaagtggggaggaaagagtgaacttggggtgttkattcagcatcacttgccatgaccccmaagccctcctctcagctttctctccatgacttttctcttacaygttctggtgacagctctgtcctctcattccactgggcgtaggggtactaactgcttcatgttactttcctcagggaatcatcctatcccttgtggttccctgacaccctacccacacctttgaaaatggtgcctttattacatactcctcgggtctccccctactaaagtgggccgtctctttcctgttgaagcattgactgatacactggcgaaagggaacaccctgcctgcccttcaccccctcccaagagcctaaagagacttctgagcttcaggaagaatctgccgtgaaggaccacgcttactcaccctcctcacctgcactgccttctttccacttctgtcccttttatggcctagcacacaggtttaaaaagtagttgtcaaccaccctcttttgctaaagcaagaaatacataattttgccattttgaattaaaaatatttgccaatgagaatttttgaacatgtcaagataaccagagagaacaccctgaatattctaacctaaagtggaaaagtgtggtatcttggtttgtttctgaggcgtaatcactggggcaggggagcactartgatgagggtagcagcatgttaatgcctttrgcaatgtgaggagaagagttcacagaaccctaagacttttcactcggagccctgactgggaaccatggctcagggctgagggaagttgctgaaaacattgaaggccaagagtcacgtggctttcccctagaccagacccaaactacagcccatgggagactcctacttttgtaaatgatgtgttaatgaaacacagccatttgtttatgkttttttttttttttctgggatgtgtttgcactacagtaggagcgttgagttttcagaggctgtatggtcctctgtgcagaaaggagtttgcagagckggcctggctgctgtcctttgaaaggcttgcttatgaggttggcatctaagagcctgggtctcaggattcccagcagaactgataagagtggctctctgtgcttaatctgattatacaaacaaaacagcctaggtttaccacccactttccttctggaagcctgggattttsgtgcataccaggcagaggctgcctatgtgacagcccccagtaaaaaaccctggtgctgcgtctctaacgtaattctctggtagacagcatttcccatgtgttgtcacagctcagaggaattgagcatgtcctgtgcaacgcccctgggagggaacccttggaaacttggacctggtttccccaggatttgtccaggagcctttctcctttttccttttgggtttgttttgtatccttttgctgtcataaatcatagcagtgagtacagctatgtgctgagtcctatgagtccccatagaaaatcatttagctgagggtggtcttggggactccccagcacacccagaaaaccaaacatttgtcatcctgacctttaagaaaaagttggccacctcctgctctgcacagtcttagtgtgcatggaaattgttatacatctcccatcccacaagactctgcgctccctgaaggcgcaatccaggctttttactctgacaaagcacagtatctgacatgaaatatttatgaagggaggaaatcaggcaatctgtaaataatggattcaaggcaggcagatcacgaggtcrggagtttgaaaccagcctgaccaacatggtgaaaccccgtttctactaaaaatacaaaaattagccgggcatggtggtgcgcatctgtaatcccagctactcaggagacggaggcaggagaatcacttgagcctgggaggtggaaggttgcagtgagccgaaatagcgccactgcactccaggctgggcaacagagcaagactctgtctccaaaaaaaaaaaaaaaaaaaaaaaaaagaggggtttgtaaactgggtgaagaaataaatttaaaaggttatgaccaatgttttccaatgaaagattagaacagaaatcagtgyatattacatatgtaagggtgttttatttcttgtagttatacaggtggaccagacactataccggatcataatgtaaaagggtttcttcttgtccattgcaatagaaaataatctgaaggccactggatgtgaagactccggggtcttccctaactgtggcctctctgccagctgcctggaagaatcaccacctatgctcctgtctccgtggccattggcatttatccacactctctccctccctccgcccccagaacgtgtactacacgagcagtcagcagatccatgtgggcattctgagccccaccgtggatgatgatgacaaccgatgcctggtggaygtcaacagccggccccggctcatcgaatgcagctaygccaaagccaagaggatgaagcttcactggcagttctctcaggtaacagccccagagcccgggcacagtggcagccatcrtggaaaaccaggagagtggcctcaggggccagggaggtggtggaggagaggggaaggggaaggagagacagactggcagtagtgaggctgtggctccagactgctttgcttctcagggatttgctgatcaaattaccatgtgctgtgggtctcatgtgttgactattgacccctgtgatattggctctgagggagtttattattattgttgttgttttattataatgattttattattgtactttttagatataaggaaactgaggctcagagatgggagtcccctgcccagagtctcacagctggggcagggctgggatataaactcaggtytttctgactttaaaccttcacgtttctcctatacaagcctctgctcacgagatggagcccccagtctcccagrtgtagacagtgctgggtctctgatctgcaaccccctctgccttccacgcagtattgggtcactctgggagaagaggtttccttgccagacagcatcttggggccatttggcgaaaggcagtcctcacactagtgaccgtgggacattcctttattaagtctctgttaattcaggggcccatatttgacttcctgctcttcactggcccctagtagctcccattatagaatgttgccaaggatctagatgcctagctttgaggagaacttctgcctctgcccagaggtctcctagtcaccagggaatctgctaaggtaggatccattttcagccacagatagggatgcctgcctcccaggtggagcaggtaaagcgttaataacaggaagtgagggagcccatggggttgtggagcctcagggctgcctgggggctgtacatggtggacactcccagggaagttcgggagggaacacctgtattcatggaactgagtggcaggagtccctgrctscagcctcccggcaagctgcttctcccctggtgaggatggaggctgctgggggcactgcaaggagctttggaagctggctataccttgattccaatcctggcatccagttactctccctgtagcaagggtgatggtaaggagagtcccagctacatcatattgtatgggcatagggcacctttgactgtggtctgggtgtgcagaattagagcacttacagagactcttaggtcctaaataaacagtgaatgtcaatactgagctggaagttcaaaacaaggtcatggacttaggagctagctagaaagcagaaccaagagcctaaaccagggctttgtgaacacaggaaagcagatggtggagaggagcccaggagccaaatgggagcatttccgagggcaggtggaggatgcaggtggcagctctgtgagtcccagctcaccctgcaaagtgtcrggggttcaatgaaagggaactcatgcaaaggactcatggctcctgctccttcctgtctatgtaacctttgacatgtgctgtaaactgtgaagttctatcccaataggaataacagctaacattcatacagtacttactatgtgtcaggcatatattaactcatttaatcctcaccaaacccagatgtgataggtaccacctgacstcatagatgaggaaactgagtcacagagaagttaacgaacatgcccaaggtgctcatgttggtcattatttatgaaatagttcaaattctctcttacttctcatcactgaagctatgtcggaagtggccacgtgggagaaggccagaggtcagggctgaggcttgagacacagggtgttcatcctcccacctccctctctgtggaaacaccagatgccccagctgggagctactgctgacttgacactgtgcctagcagaagccttcatcactttcctctgccagatttccagctcaggggccagaggatgaggctacatttccctcctttcctccttcaagttgagaggcagagggaggcctggggtgtgtggtgtggaaggacagttaggtatatgcccagtgaaggatggctgttgtttctcaagtcgagctgggtgcaaagtaggcttgtaggttgaagacaacagggtcctgagtgcatattccgggctccgtggaggtgagtggggctgactttgctggggcgaaatggtcttcatgcctcagactgtcttcagagtctatggaggtcacaagggaccattttctactgccctcagccagacctgctgggcctctgggttcagcttgccctgccgtctgtgaatggaacgaatggaaccatgcaggaagttggtggtggtgcagctaggggtgggcagggctggtggtttctcaggagacaatgtacttaattgggaatgaatgttaagaacctgggagcctggtctctttggaaggagtgaagggcattccagggagaggaaacagcatgtgtgaaagttgtgacatcgaaagcaggctgtgctcagggagctgccgggagtcaggggtggccgatcctggagggcacagtggggagcggctgaagagtctggaaggccaactgggctaggcctggaggccacagggcctggtggatttgattctgtgggagataaggatatgtaaccccaggtcatgtttaggtctgggattttgaaagcccccctctggcagggattgtgaagctagattaggagagattctagaaaaggaaagaagcaggatgaagagttagcaggagattgagatgcagtttgaagatttagccatttcttcctccctctcctccatgaccccggggtcttcatagcctgcgtcagcccccaaagtctcctcttagcacaggytctaaggccaatcctagggactcagctttggtggtgtgggctggaaatgttgacaggcatcaccaggagtcctcaatcgacaagagtactgcttcagattactgcaggaggaggatgagcagtggcctctgggctgtcttggagtagcccctggaggccacagcccagccaggcacttgtagccctggggacttggtgtcatccagacatgggtmttcctgaactgaagtaagcctccagccctcttcagactcytctgcctgtgagcctcagcctttctgtgttcagccttatacagtttgaggttaatagcacagcaagcccacctccaatatgagacattgagatgaagtcaccctccaagatcacatggcctgagagtggtagattcactggctgaatctgaagcccaggctgctttgacatccaagacctgcacccagacacttctaccctctttccagccctcacagaatccttcccacccacgctctgaggtccccactggagtaactcagtctcatctcctgtgcacacctagatgccttggggctgtggccagcgctccccactcctcccatcttgtctgtccatcctggctatggcagagaaggaaacactgttgtaaaatgggcatccttgaggcaaagtcaccccaagttccagctccctccttcccttatcccagggcatggcttgaaaaggcagccccacacgattcctgtttaaacagacatagcagtcaacaaagcaggcatctgtggcacaaggctcttcggtgactgggcagttttcagccactttggcatatgtctamttaaaactccccggagtgctttggcaaccatatatttgatccttctacaaaagggaactgtttggaaatactatttttgaattcctagttttcagacccagagcagccactctcacttgctatttaataattaatatatgtggaagttttgcttactgcaaaatgatcgatatttatcaggtgacctggaatctctcctcgagccctcattggtgaggagtcgctgttgacaaggcctgaagaagccaggagcctctgaaatgattaaagtcttgtgcttgggctaattttyttgcaacaggttttaatctttgcaaattgcattcagatcctaccaactagaacgttctggtactcaagttgggctgaaaggagcttttactgggtgcatttcaaatctcctttctggtttcacattatgcactatttattctcctgaggaccacatttaagctccacagacactcaggctgaattaattttaaaataatctagtgtgttttcccaggttctcctaccaagaagatagataggcatttgcatatcttagtgttccatctcataccctgattttctgcttaacaaataaaatacatttcctctaacccccacaagctcttctgaatttccaatacttcaggctgaaccaggacagcgttagatactgacactgagaaaccacatttgatgaaaacatctcttggcaacgctgatgtgcaggactctgatgagcaattttccaatgatgaacagtctttcctttagtcgttcatcaaacatttattgagcatgggggttggacaggaggaatgcagatataaatcagacacagcttctgccctcaaggagctcatgggcatgtaaacacaatggaaccgaatgatgagaacagaaaccgaggggtgtgctgtgttctgagagcctgggatgaccgacttggtctgcagaactcagagatggcttcacataggaggcttgtttgatttatatcataaaggttgtagagacagtttccaagcatagaacatcccaagtagaggctcacttgggcaaaggcatgaaatagctgagcatattttagtagtaggaatccattgtctgttgtgtgcagaatttagagtttttgatgggacaagtaggagataagacttagagtcatgtagagcagataatgatggttgttgaaagccattccaaggaggtagacttcacattaaaagcagaaggaaggaatggggaaggttcttaagtagtagatttccatggtggggtgtgcaaaatccccctggcagctgaaagcaggtggatcagaaggaaagaggctagaaacagggaagcaagttaaggaggaaactgtttcattgtcccgggaagagataggaggacttggttgccacaggggtgtggggacatgcagctatcagggaggactttgagagacatttcagcaggttattacacaatgatggattagatgatggtagtcgggcagtggagtggttctcaatacaggaccattgccagccctgtgtttgagaacatttggtgggcaggcagaattgcctccctcaagctacacaccctccctaaacagctgatgtctcccgcatcagcacatgacaaaacttcataatattagaagtggcagttgttgccttcagtgattttttcctgtttgtgattcctccaggattaaagaacttctaaaactacctacctactgggatgataaattcatatgcattaagtatatgtctttcaaccttctgagagtagccttcgtactgagatttgggggattctgggattcagtgatggatttctgtgaaaaaagaggcatttggtcaatgacccctggaccagtggagggagagggaagaggcaaatatcaggtcactacagagaagaactttgtggcaggatacttgtcaagcaaagcagaggactgactctcggtagtaacaaggccacctctccaccttcaactaccatcattcctttgaatggtttgtaatagcctaatgttagagggagtcctctgttcaaakatgttattgaagagattcttgctttaggaaggctgttgttatgatgtggtcctccaagctcccactttctgaaagtccatctatatgtttgaattcatggctaaaggattgaggactatttaagaccagaaattgctcagaaaggtcagtgttctacctgcagatctctgaagggctgccttgtgcaagggcccagcagggttgtcctatgtagccctgagggaggaccagcagggggaaattaggaacaatttattgagctgcttcttcatagagctggtgatgaagctgatggcttgggcaggtggtgagttcaggggaccatcagcaggttgtcaaaggctccacagctgtcagtggagttgggctgggtgattttaagggcttatggaccctgaaattctataattctaagctcccgaagttagatggcaaaccctgagaagggttttttccacctagaattctcactgggccagcctgaatacaaagcatcacaaatttgagaatgacactcttaatcacactttatggcatcatttaccccttatttcaacccgtgtccctctcttcttccatcagccaacagactagagggcaggactgtgtctcacacttcagtatctccagcacctaatgaaaagccagagacagaggcagcacccagcatgctgttgatcaaatgaaggagtctttttaaaaaaattcacaaatcttaaccaaagtcccccctgtgtgcaaggtcttgagctaggtttgtgggagccccaaagatgaacaaaatcctacctcaatgaccgtcctcggatgcatgcatgctcactggagaaaaaaaaaagtcatctaacagtatttcaaagacatttcatgttaatagtccaagggtcctgcttagctggaaaatccccagttcctacagtgaacacttttaggtggtagcgcatcccacctgtggtacacagacactcattatgtaggatactcaaagttacggcataaacacgcacttcttccgatcacctcagatttggaggagagaggtggaaatattttatactaaaacagatatgcatattgcatggagtgcaaatttaaatgagtatttttaaaaacaggaggatctgatgaaatctcagggtgttgagactgtatttcatgttgccctcagactctgggttctttggcgggaacattggcaaggctgagcttagagttcaagggtatgcagggcagacaccacaccccagccccctgtgcttgcttcattctcagagcagcgctgatgcattttccaagtggggaacgttgcggatagccacagagatgtctgttaatgccaggaaaggagaaattttcaagactagatgagactgcccagaagagactgagcccctagccaaagttgcctgtcaagggacaattggctctgatttgtgaggtctaatttgataatttgatgcaagatgagtaacgcacgcaaagacgaatctatttgcagagcacatttcccagggaacaccactaattctgccaaagaatttccccatgctagaggaggaggaggagtccttgactttctcctgctccaatccccaagtgctgtcagcaagtccaactttgagaaccttttgtgttgaaaagacaataatcgagtatttaatgatggctccagaataaaacagcctttcatgtcatatgaagggacaagtgtagaactgtccagttttgagggactgacaaagcttcgtttaggccttggatgtgcaattagttatttttggtttatggaagtcagcacttccctcctctccctcatcccacagatatcagggaccgggactaggtgtgatggctcagctccccactacccagacctgggtgagattttaaaatgtattgctcaaacatttatatggtgtttactatgtgccctgcactactctgttttataaatgttacttaatccctatgatagcgctataaggtacttactataattatccccagttttacagaggaggaaactgaggcatggagagattaagtcatttgtcaaaaatcagatctgggaatcctgcctctggggtccatgctttaaaccaccataccatggtcccttgtcctgcctctggaaaaccagtggatcgctgcaatgggagtttggggctggggcctccctgctgagcctgtcgcaaatatgtgtggactggctggatccctacctcctcagcaaactccctccagccatcctgctgtctccataacccctctctacctgtgctttgcacttgatgttcctgttaccccatcttcagtccaaggggcccttcacacaacaagcccyggrcagaatctcactcaggcaaaggtgagactaagaaagagaacgcccargtagttaaaaaaaaaaaaaaaaaaaaaaaaaacacgaaagtctttactagtaaatcaggtgttgagtattcataatacaaaaagaccacttaactctaccaaaaaaaaagacttaatctcagggtttctttaactagctgtaatgtcccacacatgctttgaagtatttgattactaatcattaactacttaacctagaaactcctgagctcaccatgcttaaagccaaagacccactgggctgcttgcccatggaaaattaattaaaaaagaaagtggaatgggaattctaaaataagcagagaagtatttggaatacacgagctagtacacacacagygtccttgtgaactccttgattgcaaaagtaagaccagcctgagcttaacacaaatactccagacgttccacctcaggatgcaagcgaccagctgggcccaaccctttcctgaaagggggtcatagcttgtggtctcaaagtgtggtcccagaccaccaccaccaccaatgaaacagcacctgggaactttaaaaggcacattttcaggccttatctcagacctagtgaatcagaagtgagaggggcagtgatctatagtttaaaaagcccacaggtgactctaactcttacattccaggaggaacaggccagtcagtctgtaccacacgtaggcaccacagacacacttgggaaactgaggcagaaagatgcttggctgtgtaataacctgggatctgctcctcggtgcccaagagactcatggactgtggcttccacacgccccagtctacgcacagttctctatgttgagacacaaattgagtgcctcagcatgctctgtctccttttgcaagtgacaagactgaagcccagagtggctcagccattttcctgaggtgacgtggccaaggcggggcacagagtcctacgttctttgcttctgctcatgcctttccagttcctattcctgaaaggcccagaaggaggaggaattaggcttggagaagggaacctggctctaggaattattattagccttcaaaattctacacattcaaatttgatttttttcttttagctgatgtttccatatttaatttggttttcattccaattaagttctctgtgtgctacggcttctctcctgccaggtttaattgcccttacttaaattctttaattaaaagtattgtgtgtttccagattatgtagttgtagtattacacaaataatgtagatgacagggctggtgaaccaaatgactgtgccctccacagagggaggggccagcccaggtctctgcacraagccccagcctagagccatgagactgggccggaggctgcaggttggaccctgcgagtgaggacagaagtcggctaacatgtgtcccttcttccttccttcctccaatgctctgtgcccaacacagcaccacccagagtgacctggttagcctgtcagtcagattctgcaatggctggccctgtcattcagattaaaagtcaaagtcttgcttgtaattccagcactttgggaggctgaggcaggcagatcacctgaggtcaggagttcgagaccagcctggccaacatggcaaaactccrtctctcctaaaaatacaaatactagccaggcatgatggtgcatgtctgtaatcccagctacttgggcagctgaggcgggagaatcacttgaacctgggattgcattgagccgagatcctgctactgcactccagcctgtgtgacagagtgagactccatctcaagaaaaaaataaaaagccaaagtctgttcagtggccacaaggccctatccacttacccgcacctcttggacctcatctcctcccactaaccccaagctcagggcccacgactccgccatttctgccgtgggccacctcctcccctccttgyccttgctgagatctcaattttgattgaggatttccctggccacctcttacacttgccgtctgcctccagctctccaccacccygagcctctttccttgtctacatttttgtatacaaccttatcaccttctcgcatgctttggaatttatttttctgctttccctactagaatatggtctctacaaaagcaaagatctttttctgtttagtcactgatatatctcagtggcctagaatggtaggtgctcattaaatatgtgttgaatggatggaaggattaatgaatagtgtctctgcagagggccctcagaggaarcagacctaattttgaagctcgttgaggtgatccttctccaccctaggcattggggcaccaccagctccctcagtctagttcaccaccactgtgataggcaagggctggggctggccaccatcctagcgaggaacataaagggggcagacccccctgggttcccaggctgccactacttactgctcatttactgaccatgtgaccctggacaagtctcccagcctctctgggcctcagtctccaagcctgtaaaatggggataattattctctctacctctcagggcttttgtcaggaagacctggaattgggcatgtaaagtatttggcatagtactaggcaaatggtaaataagtgatagttgttattcctctcatctcagctgcagaacctgcaggcagaagtacagttggtaaaacaggaggctgctcccacggtgctgagcttcccaggaaggcactgagtgtgggaaaggaaggcttctttgcaatgtttgtgaatgaaattttccgagagaagaagaaagagtctgttcagtgaaagaggctgaggtcaagaagggggacaggaggaagacagtgctggtggccagtgctatctctgttttaaaagtttaagcaagttttaaactttaaccttttataatttttgttgaagagctccagcatcaaagggtggcctggyccctctgtccatatcccagatgtgttcccagggagcaggtcagggctctgctcagcgatgccccaccatggccttactaccagttctagagcaccctcccctcccagcctccagggagggagctctcctggcctcatactccaccctccctgacaggctcagatattctcayggaggttgtgtcccatccacccgcctcccccaaccccactcttggccgtgatccatccttcccacatcccttcaggyagccaatgcccagggtcaccgcacttctaagtctctagggtgctgaggctgtggctgggctgggcttgggaaacatcagatgggagtctctgaaggatgctttatgtctcagaaacctctgctcctgccttcctctctagaccttggcaaggtgtcccttgaaaggcaagcaaagaaagggctgtggtgtcttctgtgcgggacgtgtttctccaagagttggttgtctggggtctgcacagcacctcgctgttggcaaggcctgggccggccccaaggatgagctgagcagccagaatcttcagcygagtgggcagcggcasttggtccgggcccgtytgttgtgcgctttggtcacagcccccaccctgatcctccgatccgtacggtttatagctgataaacggattcctatcagtcctctggctcatccttccaggaatcaggacagaaatgaccatttgggcctgcagacaatgaaaccagaagtggggagaggcttgcccaggccacacagctaaccgccaggaaagcagctgtgtcctcagcatcctagctcagcactcttccctttctacctggctccggaaacgccaacagatcttgcaaattagagagcggggctggttttggtcccctgcctgcgtgctgctcccagcatggtggggaagacaaaccactgggctggcaggactgcggtggggccrgggaactggccacagatctgttcaagmagcatcagcaacacagcccagcctgggtgtgggcagcagatatgcccaggccacagggttttacacagaagctaaggaaatgtgggccatggagcaatggtctggccttgyttggagcaactggcacaggggatgcctctgggcctaagagtctagcttctaagggacaggatgggcacccaaggtggaccacagtttgagaggacaactygaggctgtgcttcacacccatcaggagcaccatgtggccccaaagtgccaattccttggctatattgaaggggcctcttgtccagtataagtgaggcagtgaccctgggcactgtggtcagtcctgaggggcagaaattagccagagcttgttcaaaggagggcaaccagtttggaaaattatacaaaattgtcccaccaggaactgggaaagttaaacctggaaatgctgggaaaaactgggagacgcaggcctcacctctcctgccggaagggaaggtgtggaggaacagcaggccgctggggaagcctcaggggagctcaagacaaggattttagcgcagtggaaggagcatgctccaagggtgggcagctgggggaagactgcatatttgggagggggtgagatccttctccctggaggtgccaagcagagctgaagggtcccatggccacagaggccattaggcatgtgagagcgagaggctggccttcaaggtctctttcagcrtggggattccagggcccttcctaggcttgtccaagggcccctttcagaggccgagcctgcaggtttctccctggcaaacagtgggccccagcagctgctgtttcagtttcctgtttattctttggtctctgtgctgttgagtacactgaatcactgcactccccgggcggggggtgccctggggtgtggggcacagcaggaggaatcttgctttatttgtgtgaatgcttctgaataggtttgtgtgatcggctgggccatctccccaacacaggaagtcggtaatcccatgtcccctcccaacacacacatacacagtcccctccacccgyaccccctgcttctcagtccctgcctccttcwtctgtgactcaaagtcccttctcagggagctggattttttatttcaatttttcaattgaagaacatggatacatacagaaacatgtataaaatacacactttcaactccatggtttaaaacaaagcaaatccctaggtttccatcacccagctcaggaaataggactgctagcaacacccttgtgatttcctgcccatcaccttcccagtcccttcttcccagagctgaccaccatcctgactttcacatcatggctttattttacctgtttgggaggtttatataaatagaataatgtttgtttgtattttgtctggctgcttctgctcgacattgtattggtgagatttatcgagtatagctatagtttttgttgctatataggtttccattatatgaatataccgtgagttatatgtctgctgtactattgatggacgtttgagttatctccaggttagttttataaatcgtgttctagaaagcattcatgcgcatgtttttggtataaacgtttctgatagaagtgttgggtcatagggttgtatatgttaactatagtaggtactgcccatttcaacagttgtaagaactgaagtttttttttagtcttaaatttttttaagaaatttttaattattatggatgtgttaggccattcttgcattgctacaaagaaattaaagaaaagaggtataattggctcatgattcttcaggctgtacaggaagcttttgcttatggcagaagatgaattgggagcttgcaggtcacaagatgaagggaggagagagagtggtgagaggaggtgccacacacttttaaatgaccagctctcgtgtagactcagagcggagagagcccacttctcaccaaggggatggcccaagcccgtcatgagggatccggccccacctgcaaccctggggatcacattcaacaaatatccagactacatcaatgggtacataatagttgaatatatttatggggtacatgtaatgctgtcatacaggcatataatgtgtaatgatcaaatcagaataattgggttatcttttacctcaagcatttatcatttctgtgttagaaacattccaattctacttttagttattttaaagtatacaataaattattattaattatagttaccctgttgcattactattagagcttattccttctatcgaactgtatttttgtacctattaaccatccctgctttttcctctcctccctactacctttcttagcctctggtaaccatcattctctctccaggaattcaattttttttttaattttaactcccatatgtgagtaagaacatgcaaaatttgtcttaaaatttatctttctgtgcctggtttatttcacttaacataatgacctcccgttctatccatgttgttgcaaataacaatctcccttttttttttatactataagttctggggtacatgtgcagaatgtgcaggttttttacagaggtatacacgtgccatggtggtttgctgcacccatcaacccatcatctacattaggtatttctcctaacgctatccctcccccagccccccacccaccaacaggccccactgtgtgatgccttccctgccgtgtccatgtgttctcgttggtcaacttggtccagagctgagttcaagtcctggatatccttgttaattttctgtctcattgatctgtctaacattaaaggtggggtgttaaagtctcccaccattatggtgttggagtctaagtcctgcacccagattattaaagcaagtnnnnnnnnnnnnnnnnnnnnaagtttttagagacctaaaataagagttagacccccacacaataatagtgggagactttaacaccctactgtcaatactagacagatcaacgaggcaaaaggttaacagggatatccaggacttgaactcagctctggaccaagtggacttaatagacatctacagaactctccaacccaaatcaacagaatatacattcttctcagcacctcatcggacttattccaaaattgaccacataattggaagtaaaacactcctcagcaattgcaaaagaacggaaatcatagcaaacagtctctcagaccacagtgcaatcaaattagaactcaggattaagaaactccctcaaaactgcacaattacatggaaactgaacaacttgctcctaagttactactgggtaaataacaaaatgaaggcagaataaaagatgttctttgaaaccaatgagaacaaagacacaacataccagaatctctgggacacatttaaagcagtgttgtagagggaaatgtatagcactaaatgcccacaagagaaagcaggaaagatctaaaattgacaccctaacatcaaattaaaataactagagaagcagcagcaaacacattcaaaagctggcagaaggcaagaaataactaagatcagagcagaactgaaggagatagagacatgaaaaacccttcaaacaatcaatgaatccaggggctggttttytgaaaagatcaacaaaatagaccactagccagactaacaaaaaaaagagaagaatcaaatagatgcaataaaaaatgataaaggggatattaccactgatcccacagaaatacaaactaccatcagaatactgtaaacacctctacacaaaaaaactagaaaatctagaagaaatggataaattcctggacacatacaccctcccaagactaagccaggaagaagttgaatctctgaatagaccaataacaggctctgaaattgaggcaataattactagcctacccaccaaaaaaagtccaggaccagacggattcacagccaaattctaccagaggcacaaagagttgctggtaccattccttctgaaactattccaatcaatagaaaaagagggaatcctccctaactcattttatgaggccagcatcatcctgataccaaaacctggcagagacacaacaaaaaaagaaaatttcaggccaatatccctgatgaacatcaatgtgaaaatcatcagtgaaatactggcaaactgaatccagcagcacatcaaaaagcttatccaccatgatcaagtcagcttcatccctgggatgcaaggctggttcaacatacacaaatcaagcaacataatccatcacataaacagaaccagtgacaaaaaccacatgattatttcaatagatgcagaaaaggccttccataaaattcaataccccttcawgccaaacactctcaataaactaggtatcgatggaacatatctcaaaataataagagctatttatgacaaacccacagccaatatcatactgaatgggtgaaaactggcacaagacagggatgccctctctcaccactcctattcaacatagwatgggaagttctggccagggaagtcaggcaagagaaagaaatacaggatattcaaataggaagagagagaggaagtcaaattgcctctgtttgcagatgacatgattgtatatttagaaaaccccattgtctcagccccaaatctccttaagctgataagcaacttcagcaaagtctcaggatacaaaatcaatgtgcaaaaatcacaagcattcctatacaccaataaaagacaaacagccaaatcatgagtgaacacccattcacaattgctacaaagagaataaaatacctaggaatccaacttacaagggatgtgaaggacctcttcaaggagaactacaaagcactgctcaaggacatgagagaggacacaagcaaatggaaaaacattccacgctcatgggtgggaagaatcaatatcatgaaaatggccatactgcccaaagcaatttgtagattcagtgctatccccatcaagctaccactgactttcttcacagagttagagaaaactactttaaagttcatatggaaccaaaaaagagcctgcatagccaagacaatcttaagaaaaataacaaagctggatgcatcaggctacctaacttcaaactatactacaaggctacagtaaccaaaacagcatggtactggtaccaaaacagagagatagaccaatggaacagaacagagccctcagaaataacaccacacatctacaacaatctgatctttgacaaacctgacwraaacaagcaatggggaaaggattccctatttaataaatggtgttggggaaactggctagccatatgcagaaaactgaagctggaccccttccttacatcttctacaaaaatcaactcaagatggataaaagacttaaatgtaagacctaggaccataaaaatcctagaagaaaacctgggcrgtaccattcgggacatcggcatgggcaaagacttcatgactaaaacacacaaagcaatggcagcaaaagccaaaattgacaaatgggatctaattaaactaaagagcttctgcacagcaagagaaatcatcagagtgaacaggcaactacagaatgagagaaaactttggcaatctrtccatctgacaaagggctaatatccagaatctacaaagaacaaacaaatttacaagaaacaaacaaccccatctaaaagtgggtaaaggatatgaacagacacttctcaaaagaagacatttatgcagccaacagacacatgaaaaaatggtcattatctctgstcattagagaaatgcaaatcaaaaccrcaatgagataccatctcacaccagttagaatggcgatcrttaaaaagtcaggaaacaacagatgctagagaggatgtggagaaataggaacacttttacactgttggtgggagtgtaaattagttcaaccattgtggaagacagtgtggccattyctcaaggatctagaactagaaatactatttgacccagcggtcccatcactgggtatgtacccaaagtatcataaatcattctataaagacccatgcacatgtatgtttattgtggcagtattcacaatagcaaagacttggaaccaacccaaatatccatcaacactagactggataaacaaaatgtgtcacatatacaccatggaacactatgcagccataaaaaatgagttcatgtcccatggatgaagctggaaaccatcatcctcagcaaactatcataagaacagcaaagaacagaaaaccaaacaccacgtgttctcactcataagtgggagttggacaatgagaacacatggacacagggaggggaacatcacacactggggcttgtcagggagtggagggctaggggaggaataacattaggagaaatacctaatgtaggtgacagkttgatgggtgcagcaaaccaccatggcatgcatatacctatgtaacaaaactgcacattctgcacatgtacctcagaacttaaagtacaataataaaaaattttaaaaacccacctactcaggccacagcaatggcggatgtccctcacccaaccaagcttgagcatcccaggtcaacctcagactgctgtcctagcagcgagaatttcaagccagtggattttcgcttgctgggctctgtgggagtgggacccactgatccagaccacttggctccctggcttcagccccctttccaggagagtgaacggttctgtcacactggcattcctggtgccactggggtattgagaaaaaaacaaaaacaaaaactcctgcagctagctcagtgtctgcccaaacagccgccctgttttgtgcttgaaacccagmaccatggtggtatagacacctggtcctggtctgccagttgcaaagaccgtgggaaaagcacagtatctgagccrgagtgcactgttcctcccggtacactctctcacagctttccttggctggggaagggagatcccccaaccccttgcacttcccaggtgaggcgataacccaccctgcttcagcttgtcctccgtgggctacacccactgtccaaccagtccgaatgagatgaaccaggtccctcagttggaaacgcagaaatcacccgccttctgcatggatctctcttacagctgcagaccggagctattcctattcagtcatcttgacagtgaaaccagagtctcattattttaatggttaaatattattccatcctgtgtatataccacatattccttattcattaacctattgatggatacttaggttgattccatatgttgtctattgcgaatagtgctgcaataaacatgggagtgcagatatctcttcartatgctggtttcctttcttttgggtatatacccaacaatgggattgctagattatacagtagttttattttcagttttttgaggaacctccatactgytctccatagtagctgtaataattttcattcccaccaacaatgtacaaaggtttccttttctctacatcctcaccagcatttattattgcctgtctttcggttaaagccattttaactggggtgagatgattcattatagtttttgcttacttttctctggtaattactgatgttgagcatttttccataacctgtttgccatttataagtcttttgtggaatgtctgttcagatcttttgcccattttttaattggatttttttgccttcttgctattgagttatttgaacttcttatgtatcttggttattaatcccttgtcagaggggtagtttgcaaatattttctccagttctgtgggctgtctctttgattgtttcctttgctgtgcagaagctttttaacttgatgtgatcctatttgtccatttttgctttggttgcctgtgcttttgaggtctgtctcaagaaattgttgcccagatcaatgtcctggagtgtttcccacattctggagtgtttctccaatgttttcttctaggagttttgtagtctaatcttagatttaagtctttaacctattttgatttgattttcatatatagcgagagatagggctctagtttcattcttttgcattttctcaggcaatttattgaaaagactgtcctttccccattgtgtagagaaccaagtcttaacactctcttgagatgtccgttgttgctatgggaatggtcatggcagacttggatgacatccttcaagaagtttgccacctctccctctctcagtgcacttcccactgtgagctggaaaaggcacaaartgaagagcaccagcccagcttgtagactgaggaggtggaagtggaggtggggcatgggtgggcagtagagacttcctggaggaaayggaggagttgagctttgatacatggttgcagcttagcctgtcatgggagcatggggaagaatcccaagcggagagcacagcttgcttaaagtgcaggaaccctgagttaatgtaaatgggttcagaaaagtacaaggratttgrtgtggctgcagcaaaagtcatggagctggggaaggatcagagatgaggctagaaaggcagcactgagccatggaggccttcagtgctgcactgaggagcttggactttgtcctttaggccaaacatgcattttagaaagatcactactcctgcctctggaggttggaagggagatccattagggagctgacacagttgtcccagtgagagaaagaagttggtggcctgaaccagggcaagtgtgatgggaaagggataaggggacagtcacatgacacaagagaggtagaattgccaggacttgaggcttacttggatgctgaaaggatagataaatgaaaatgtccatgtttctcacacaaatacctgagacagaaatacaggagtaggttctgggggaaaaagtgagtttgaccatatactcaagtgccattaagctacaaggggtccaattataagaacctccacccaccaaagcaattctgcctgcttgggaggccaaagtctagttgagcacaagtttggtggtaactcagagatgctcagacagtccaggctgccacctcagactcacagccagcaacccaaagggtccaagccctgaaaagatttcactacaaaaattgggggtttcctatttgctgctatagggctgatatgaggagcagaacatcaaggggctttgggtcataaactgagtatgaatggctacaaacattctggaacctcagtagcatggggaaaaatcatgcatgtcaggacttagggggcccagtggcctaagagacagtaaccaggaggctgactttggttgaaaccagtattgatgactccagaggtccaactgggggcatggaccctaggagcaggaagccccaggcctctggtgatgctcaaatgcaggccaatgatgggtcgtcccaagaaactaggcttttcagagaaaggacccagcccctggggtaggagctgtaggtgcaaacaggtgtaccacagcccagctaggtagacagaactacctaggggtggggaggcctctctcctagtgaagaactagggctctgtgaagacagctgtggcacatattcagtcttccagaggagactaatatatgagtgataggggagcctgcagtttcatgggaatgctgacctcctgggatckggccacacagataatgtcagccctcaccagccacttggcctgaggctcccgaatttctgcatgttgcctctatgccctctracccmactgtctgccctggcccctagggaggacccatccagaaccgcaagtctaagcgctgtctggagctgcaggagaatagcgacctggagttcggcttccagctggtgttgcagaagtgctcgggccagcactggagcatcaccaacgtcctgaggagcctsgcgtcctgacccaccggggccacttccggctgcctctttgctactgtgtagcacctgctgcaacrttgcctgctgtccacgtggggttgtttggagtctggggaaccaggttagtgggcccccaagaagagctttttatttcctattcaattttcatggagtttatagaaagatgctgattggtaggtgatggtatgatatcaaactattttgcagttgtaaataggggacagatggaaaatatttataactgacaataaaatattattaagaaaagggttttgcagtcatttggtgctctgtggagattcatgcctggttcctttgaacttggagttcctgtagccaaagatgcgtccctatgtgctcctttctggcttctcgtcctcagaaagggggctttaatgactagcactcagtgggagcttgttgtacaagctgccagctctcttcattagacccaaggcagcaagaagggcactgtgacctcaggttccaacccagaggaggacggtcccctctgcctctcccatggcaggttcccctctggaagatacctgcagcccttcattcctgagggaccacagttgctcactggtcactggagtgtcatctgctgggcttcaggccaccctgccctctcctgaagttgccaactcacctccaccttcaccccctagagctgcccccggcccagcccctcgccaggacactgcctgtgtccatttgccaagaccactcaggctcctcccatgaatcaggggttgtcagtttccttcagctgccataacagatctccacacactgcgtggctcacataacagaaaatgatcgtctcacagtctgggaggctaggagtccaaaatcaaggtgttggcagggctggttccttctgtgggctgggaggggaatctgctccaggcctctcttctggctcctggtagtctcaggccttccctggcggggcgatgtccatcttctcccctgtgtctttacattgtcttccctctgtatgtgtctgtctctggggcccaaatttcctgtcgttaggacgaccgcagtcatgttgaatgatggaccaccctaacaacctcatttaacttgattacctctgtaaagattatctccaaataaggtcacattctgaggtactgggggtgaggaccttaccatatccttttgggggactcaattcagcccttagcacctggctcactcacgcagggctccaggtcagcccctctgggacagcctcaggacatttgcacattaaacgcctgtgtttcctgcttccactgccttccctgatactggaaaggactcttttagcctgtgctgtaagacctcctattcagccagccctgctgcctggcccaccacccagttccctaactcagcccccagccctcgcctagttcctgcccatggtcccctctgttatgagtaatgaaagaagagaatgggctcctcacaccccccaagaagatggacacaattgttagcagcaacaatggcagaagccagagtacattgactgtatcctggccagactccaagtcactgctggccaagcacggtggctcacgcctgtaatcccagcactttgggaggccgaggtgggtggatcacctgaggtcaggggtttgagaccagcctggccaacatggtgaaacccagtctctactaaaaatataaaaattagctgggtgtggtggcaggcacctgtaatccgagctacttgggagggtgaggcacaagaatcacttgaacccaggagttgaggaggttgaggctgcagtgagccaaggtcatgccactacactccagcctgggcaacagagtgagactctgtctcaaaaaaaaaaaaaaaaaaagtcactgccaacagccatatagctccagcagcctgcatcactgcctgaggcctttctctggccataggcacctgcttagcccatgcagggcagacaggaagtattagagagcttggttcataggaacaacccccagccaataagggataggcttcctcacccttcaggggtgcaaattggaggcctgatcctgtagtctcagacaggccctggagggactcagccccagttgctcctgaatgcccctggcctttcttccctttcctgtctcatatccctcactcctctgcacttgccccaatcacctcccaaatgcttgtccctgagtatgcttctgggagaagcagcttacgcccactccttcggattgtccccacccatggcccatctgcacctggacaccagtgatacccagatccacgtgtgcaccccagagctctcctctaagttccaggcttgatctctcactgctgatgggccctgggcaggcgtgtggccataatgcagacaatgctgatctgagggcccccataaggcccggcccagggaccaggaccagcaccacctccaccaggtgctcgaaccagacactcctcgcgactgagctcttcctgtcctcaccctccaccaccccttcttgccctcagtatattatggcagcgatgcctccgaaacagctctgaaatcttccccaagcctcttcaacactcacagacagcctccccaactcatctatcctccacactgtgatagttacaagggtcttcctgaaatacaaatatgatcagatcccttccttcctgaaatcttcagtgggtctcatcaaaaattttaaatgactagctcaggcaccagccttgaagcttcctcatttggtgaatccagaggctgagtgtcagaagcccggtgtcctggctgccacacacacctggtggcatggtgttagtgccccacatcctctcccctattttgaggaagttttgggggaggtatattagtttgctagggctgctgttacaaagtgtgacaaactggggagcttcaacaacagaaaggtattggctcactgctctggaggctgggaggccaagatcaagatgttggcaggggtagctccttctgagggctgtgagggaaggatggcatggatcagttctgggtcttctccttggcttgtgcttggcctcttctccctgtgtctcttcacatcctcttctttctatgcatgtctctatttccaaatctcttcttcttctaaggtcgccagtcgtattggatcaagacttacccaaatgacctcatactaacttcattccctctgtaaagaccctatctccaaataagatcacattctgaggtactgggggttaggacaagtttggggtcaggtgacacaattcagcctcgaagctccctccttcaaggaacagggacataggggaggggtggtgagggccaggccaggccaggccccaggaggctgcctacgctcatcccgccttgctcaggcaagtccttccttgttgggggacatccccatggtcctgacctccacagagataagggtgggcacttcacaggtgacagggaatttttgcataagtatctgaggcattcatcattgtcctccatgtccacatctcttttaaagaaaactatcccaaccacagtcccaggtgtgaccctgtttgtgccatgaccatagctgattcagcctgacccatggacaggtattttgttggctgctgagtaggtaatgactaagcacaaaaatgaccagctggggccaatcaaattttgcctgtgaatttgcaccatgacacaccatattcagccaattgaagaaggccaggacccatggccatgcacaggatgtacctggggaagagccagcctcagaggaccaagaaactagacccctgtgcaggctgggatcatggggaaaaccacaactaagcagagaaaagaaaggagctgatgagcaaaaggcagcaaactggccctggagctgcctgggtttcctcctcccagacccaacccatacacaccctgatgttttttcttttccctcagctggttgaccagctccctgctctttacaacaaacaagactgatagaagcaggatgtaaagattttagataccaggacctactccctcacagcccctcgcccatgggggaatgcacacacaatccctacaacggctgtgcacacatgcaacagaggtacacatgtttcaccatctatgtacacatccacgcacaggttaacatagccacacacatacacatatgcacacacatgcagcaggttggacacatgcagacatacatgtacgtactcagatacacaaacgtgcatgagtgcaaacacactgactccawagagaaaagggatttctgctcctcccagaatctgcttttataagaatagggctgtcatcatttgacatggcccttgtgaagcaaaggttgttggaaatcagagctcttttattcttaccatttctaattacaagcaagagatgtaagggggttctgaggcaagacagaagcattcactctctgcccttcagattttatcgccatggtcaccactctctaaaacccagtaaaacaaacagaatagtcacccaaaaacgtgtcatctctcagccatgctccttctcctgccttcagctccaaacaggagggaggggaatgaggtagacaccctagaccacatctagcacctgaccccataagaccctcaagtcccactgccctgccctctgcctcagccaacctctctacccacagtcaggaattttaaccttccttgttgttttggaaacaagattgggcagaaagggcctggagagacattagccctaatgtgggtgtcttttaaaattatatggtgtagccacatcgtggaaaccaggttttaaagactgtcaccacataatgtctctatgtccctgtccaattgagccaagttgtccagatctgtaccctctgagtatctcttcctccccgtgagcccctcccattgccttctggctcctgccgctgccaccctcgccacagcctctagggggcactgtgctcccttcgtgctcccacccccaggttcctttacagtccaggtgaggtacactaggatttccaaaaggaactgaactactaaaggaggactccaaggaaatgatcctcaaaccaaagagatggcgtgagagttatttctccccagtactttctgttcccttaagttgttctactcacgcctttccacgggcctggtctgtctttggtttctaatcatggaaatgctcctggtagaacctgaccctttccccaacaaggggaaaaaaagccccttctgtactcaggatatgagtcggggcctcggatctggggaaggggagatgaaatgaagagagtttaacaaccgaagttcttcgaaagcatggctagggtagggtgacgaaccctgagacaagagcagaagcccttcctacccttagagctagaggggcaaggagagggaggagtgccagcaggctcactggaggctgcagccagcaggaccccacagccaaaggcagaagaacccccactatagaaaccacagctgagcgaagagggaaaaaccacagccaaacgaagggggggaamccccctctccatctgctgtcagatattccaccaaagcctcccactggccaaacccagctgggggtgggggtcgggggagccactgattcagcccacaggggtcaatacagagcaggccaagaagagcagggaatgagtcaccagtacatgccaccctcagcctagccctggtctggatgtcacaggccacttgcccatcctgtcttgccagtttgcatccctctcccagtccctgaatactcttacatggacactaaccataccacttcctttgacatttaaccattccttttattggtaagagagaggagacaggagagagatctccccaattacagcatgagccacctgaagacatcattggcactgcatccttctgtccaattcctctggggtcattgagacccagaccccctctcataggcttgcttcctccttatctctaaggaaggtggtcatgaacagccccagccccatcagcatgcagggacctgcagttttgatgccctagatgagtctggggtgagttttgatcttgtagccttggaatcgcaaacagactccatctgtttaagggcattcagttggtcctggctgcctgaagtgatgtgttggggaggattctgagggtctggcttccataggcaggagtatcagagaggatgagcaggagatgggtgaactgtgtgtgttatatatttggcctttccatcctgccctttctaccccgtctgctgtgctggcy

SEQ ID NO: 94397 - DNA, 25582 bp, Homo sapiens
cccagctactcgggaagctgaggcaggagaatggcgtgaatccgggaggcagagcttgcagtgagccaagatcacgtcactgcactccagcctgggtgacagagcgagactccgtctcaaaaaataaataaaataaaaataaaaaaataaagtttcctaaaacatatattatttttaaaacagcagaatctctagaaaggtaggatagccttgaaaaggtacagattcgaggaacacccttccaccattttgtggacttatacacccacccaggactgcccctagttgctatacccagagggcagcccctctgtcactaaggagcagtcatttatgtgaatcattattactgttgactcactgattcctggctcacaagcccctctgaggttaccaaaagagctccctgtttccctctctggagcaaagagtatccacaacttcattttactcccatcttctaagtatatttttctggaacctgggggaagcaagcctacttccaagccagcctttcatagcctgaggttccatccacatggaaacttatacataatgtgacacatctttacattcttccattcaaaacgcttcaaagttactgccattatgaaggaataacttcttcaagatcatggaaccccaaagggtttctttgtgttctttttgacagctaattttatagatggggtctttgaaaatgtgattcttggattgctctataacttcccttgcattatctttttagtcctctccaagtggactttcactcttcactgggccagaaccactcctgccactcacccccatggggccgaatccgggggtcatttctcagtcttcatcttactctgtctgcatcattgacacagtggatccctctccttcttaaagcactttattcagttggtcaccaggacatctcactctcctggttttctgcctccttccttggcctcctttgctctctcttccccactccagcctctgagcatcagagtgcctggggctgtccttgtttcttttctcctttctgcctacttctctagtctcctctagcctcatagctgtaaatataatctctatgctgacagctcctgcatttatatctgtaggccagagctcactgataaactccacattcacatatccaactaattcctccacatctccatttactttgtttgtctctttcctctcactggaatgtaagttctgtaagggtaagaactttgttttactcattgctatattccctaacattaaaagagtgcctggcacatagtagatgctcaataaatatttgttgaattgaatgttttcctgtagaaagaacagactttaaagaatcagtggctcacacctataatcccagcactttgggaggctgacgcgggtggatcacctgaggttgggagtttgagaccagcctgaccaacatggagaaaccccgtctctactaaaaatacaaaaaaagttagccaggcatggtggcgcatgcctgtaatcctagctactcaggaggctgaggcaggagaatcacttgaacccgggaggtggaggttgtggtgagccgagattgtgccattgcactccagcttaggcaacaagagcgaaactccgtctcaaaaaaaaaaaaagaatcaagatgtttgtacatcttacaataacctctagggacctctcatttcctggaagaatgttctgcccaatttattctgtcattcacctgctttctagtaatagtttgagccctcctggtgccatcttctgtttgagtcaagacagtcttggaaagccaaacacagtggctcacacctctaatcccaacactttgggaagccaaggagggaggatcacttgagcccaggagttcaagaccagcctgggcaacatagggagatcccatctctacaaaaataatttttaagaaagtattagccaagagtggtggcgtgtgcctgtggtcctagctacttgagagcagaggtggaaagatagcgtgagcctgggacgttgaggctgcagtaagccataattgtgccactgcagcgcagcgctccagcctgggcaacagagtgagactctgctcaaaaaaaaaaaaaaaaaaaaaaaacttggccaatcacactaccatgtccctttaattgaccaagataatacatattaaacctgtagcacagggcctaacacataatgagcacgcagtaaatggaggccttactctcagctttttctacgttcttccttcttgccacaggaccgcctggcccggtgcaccatgcattgcaatgacaaagccaaagattcaatagatgctgggagtaaggagcttcaggtgaagcagcagctggacagttgtgtgaccaagtgtgtggatgaccacatgcacctcatcccaactatgaccaagaagatgaaggaggctctcttatcaattggaaaataaaagtatttgccagtggccatcagggctgagggcaagaatatattttttataaggaattgggaattttagtcttttaagcaaagtttacgaatgaagaaatgaaggatggccacaagcgtaaggcatatgtcacttgcctctggacactggttattttatgtttcagtccctaaaaaatgaaatggaaaaaagtggtgctaaatcgagtcagagatattacaggagagttttagagcttattatttcctgtggccagtgcttgtcctggcagtaaggctctcccctgtaacaagccagagccctccaaggtaccagactcttcttactacacaggtactaacaggctggcaggttagagttggtggagtctgaggagagatattttctctttgttgccaacatcctgtttaccaaaagtgtcaccccaccatcttccataagctgtgaaacaaaatcaatgaggtcactaacttagaagggaaagaaagttttctgggtctttgttttcttgatttggggtaatttatacaagggcatacaagttgattttaagatgtggaactgggaggtagactagtttggataagaactttgaaatgttccttgtggatccccatttctggtcatcaagatgtggatgtacatttcttaaaattattacatgctgcatctttcagcctggagactgtgcagaaacatgagaggtgatgacacactaattatgggaagcagaattactggctgatggcccctgaggctgtgtgtaacaaaatgacaggacaatcttgcagtaacactttccccttgaagagaagggggttttgattgtgatatatactagtatctaggaatgaacagtaaaagaggagcagttggctacttgattacaacagagtaaatgaagtactggatttgggaaaacctggttttattagaacatatggaatgaaagcctacacctagcattgcctacttagccccctgaattaacagagcccaattgagacaaacccctggcaacaggaaattcaagggagaaaaagtaagcaacttgggctaggatgagctgactcccttagagcaaaggagagacagcccccattaccaaataccatttttgcctggggcttgtgcagctggcagtgttcctgccccagcatggcaccttattgttttgatagcaacttcgttgaattttcaccaacttattacttgaaattataatatagcctgtccgtttgctgtttccaggctgtgatatattttcctagtggtttgactttaaaaataaataaggtttaattttctccccactattgagtcttctttccttatatctgggtggtgaatatgtaactttctcaggatgcttctccttttaacaggttaaatgagttaaaatgtccagaagagtggaaattagttgttatggttcagatgcagaactggttcactgtaaatgggaaaaactttgagaggagactaggacattgtgacttgaagttcattaatgtagaaaagaaactgtctatgaggctaaaaagagaaattcattatctatgtcaggtctctagcttcaactaaacactaatagcaagtggtagtaaaggtacaaagctatgaccctgctagaaaaaattcagtgtctaggattttgagtactaagagagtgcaaaatatgtgatgagtttaagtctttactatcattgatatttatatagagccattccagaatatcaggaattaactgaatttttgagaactatcccctatttaaacacaaggtattctattttggtttagtcttctataattttggggtaacaactgggaacaagtccgagaccactttttacacatcttgacatgaaaaaagaacaccttatattagaaaatgtttgtgtgctgcacttcacattttatatacaggggcaatagcacatcagtgagttctggaggtagtgtttgaaaaatttcagaattcccaggcatgctggctaacccctgtaatctcagcactttgggagccggaggcaggcagatctcttgaggccaggaatttgagaacagcctgggcaacaaagcaagacctcgtctctacaaaaaaaaattagctgggtgcagtggcgtgcgcctgtagtctcaacaactcaggaggctgaggtggaaggattgcttgaggccaggagttcgaggttgcagtgagccatgatcacaccatgctccccagcctaggcgacagagcaagaactcatctcaaaaaaaattttttttgcaagacccctcagtcagaaatagattcaaattcttggagacagacccagtcaccttactctacaatggttcagaggctgctaatttacatgttacgggaaccctacttggtctgacagtatgctgtagggttacctgccaaaaaaatatagaggcccagccgggagcgggggctcacgcctgtaatcccagcactttgggaggccgaggccagcggatcacgaggtcaggagatcaagaccatcctggctaacacagtgaaatacggtgtctactaaaaatacaaaaaatcagcccggcgtggtggcgggcacctgttgtcccagctactcgggaggctgaggcaggagaatggcgtgaacccgggaggcagagcttgcagtgagccgagatcgcgccactgcactccagcctgggcgacagagcaagactccgtctcaaaaaaatatacatatatagagagaggcccattcctccagggatcattatcatttggtatattggtatatatgaagaaaataagcgatacgatccacagacatgcgggattggccgggtttgcccaggagctagagacgggaccgttatctcaatatctcaattttattttttaaatagagaaggggtctcgctatgttgcacaggctggtctcgaactcctgggctcaagagatccaaagttctgggatttacggcgcccggctttttttatttatttatttatttttatttattttggctgttccatagacaagagcagggataaccggctgggcgcggtagctcacgcctgtaatcctagcactttgggaggccgaggcgggcggataacgaggtcaggagatcgagaccatcctggctaacacggtgaaacccgtctctactaaaaaatacacaaaattagccgggcatggtggcgggcgcctgtagtcccagctattcgggtggctgaggcaggagaatggcgtgaggccgggaggcggagcttgcagtgagccgagatcgcgccactgcactccagcctgggcgatagagctagactccgtctcaaaaagaaaagaaaaagagcagggatacccaccggtggaatacccgttatctcaattttgtacaaggaaaacggaattcagaaaggtgcctagaggacgcacccctccgtcctggccaatcgctgaggacataaccggaagctcaacgatgaccgaggcgctgagatatcgcgaggtgaaatgtaaaaactgccaacaatccattggctaacgaggtcgatgacgccagacgcaagacgccgggcctacarcgggagcgtgaggaaagccgtgcgttgcgttccaaggcatctgtgagcccgcggagtatacaccatgagcaaagctcaccctcccgagttgaaaaagtaagtatgtgtgagagccaaaccgaagtggtcagttatttgcgtcctgcgagtcccttggttccctctccgttagccgaatgtcttgagccgcttcacttcatttcttcttccggtccgaggtcgccgrgatcccggccaggctcccgcgcatgagacgtgaagcccgcgcagagctcgcgcgtcggtgtggttacagccggcagccacggcacctccttccggccgactagtctccaggtcccgcggtcyggcccctggtcacccggcgctgtccctcgttccttgaagatctccagtgctaccttttgttgaacatctcgaatagtatcatgttctagatagacggctagagggggaaattctctgaaggaactaaggaggggctggaagggaaggaagtgtttttaaaactacgtgaggcatcagaatccgaaagccactttagtcttagcaaatgtgtttgtaggtgtttgagcttttacttagaaacctcattcctttttcttgccttcttttacgttaagcttgaatgtcatgtgttatcttgctctgatgttgaaactatataagaacattcatttttctttttttttaagaacattaattttttctagtcagagaaggctaattttttgaagttttttctacacacccagtaaagtcaaacaactttaagtaggagagccttactttaggtaggactcaacgtaaagctttgaattcctcaaatactttttgagtggacttaacaggttatgtgtttcctgactacgtttctgttttgcttatacttcctgatgctggaattctacatgtattagttggattgcacaaaggatgcaaaatttttacagggatcagttttttctggcgtagcatgtggttggctttgtgtatagttagttcatttattaccaggcccatggaagtcagacaaaaggtaaagttcctatttaataattttgcggccgggcacagtggctcacgcctgtaatcccagcactttgggaggctgaggcgggaggatcacctgaggtcaggagttcgagaccagcctggccaacatggtgaaacccccgtctctactaaaaatacaaaaaattagccaggcaggtggtgtgcgcctgtagtctcagctattccggaggttgaggcaggagaatcgcttgaacccgggaagcggaggttgcagtgagtcaagatcgcgccattgccctccagcctgggtaacaagaccgaaactctgtttcaaaaaataataatatttttgcatttaaaggtccatttgtatcaaagccatcttttgtatgaaaactacttctatgtatattttagttaggtctgttaaggaattaattattaaaacataagcccaacgcggtggctcacgcctgtaatcccagcactttgggaggccgaggcgggcggatcacgaggtcaggagatggagatcatcatggctaaaacggtgaaaccccgtgtctataaaaatacaaaaaattacgtgggcttggtggcgggcgcttgtagtcccagctactcgggaggctgaggcaggagaatggcgtgaacccgggaggcggagcttgcagtgagccgagatcgcgccactgcactccagcctgggcaacagagcgagactccgtctcaaaaaaaaaaaaaaaaatagaagttactcagaaattattgtgaaaattactctttttatctgaaagttatttttggtgatgtaagtatcctctggattcatcagggactggtgaaatggtgatttttttttttttaacaaaaagaccattctctacttgtaatctaagattttctttctgattcataacatagtttttgaaaatttcagagaaggaagctagttttaatacctttctcttcctcgtaggtttcatgaattgtgaaatccggtcagatctgccgccaaaatgacttaaaaattttttcttcctytgctttctcacagatagcatcttcttttacaccattatgccctccttctggtgtagcataactcaggtgttcttaaatggggagtagggaatctggtgctaccggcttctagtgagtagacaccagggtgctgctaaacatcctactgcttattcgactgcccccaacaatacaaaattaactggtcccaaatgtcagtagtatagaagttgagatacactggcttaactgaattcttccttccacttcttaaaatttgctgccacggtagtcttgccagtgactgctttaataatttatcacagtatgcaaaatcgagtctgtacttaacccagcattcaagcaccaaaccttctagctgctaatactcaggtattccgttctccagtcacactgaactatttgtgtttgctctcacttgctgtgtgactttgaaaaattgctttagcttttccaagcctagttctccatctgtaaaaacggtggaaatgatagaccataattgcaaagtcgttgtaaagattgtataagatcttgtgtgttatatttgatacgttttatgtatcttattaaaatatagtttacttcatatatgtgtgtgtgtgtgtgtgtgtgtgtgtgtgtgtgtgtgtgtgtgttttgagatggagtttcactcttattgcccaggctggagtgcagtggcgcgatcttggctcaccgcaacctgtgcctcccgggttcaagcgattctcctgcctcagcctcccgagtagctgggattacaagcatgcaccaacacacccgactaattttttttttttttttttttttttttttttttttttttagtagagacgggttttctccatgttgatcaggctggtctcgaactcccgacctcaggtgatccgcccgccttggcctcccaaagtgctgggattacaagcatgagccaccgcgcccagcccataaatatatttttacttgtaaatgtatctactccctccttcagtcatgctccttgttttatatttacattttcccatgataatcctatacattaaaattgaataagtgccccacttcgtggcccatatactaaacatctttttttcatttttttatattttaaaatttgaatgaaatttttaaaattgaatgaaattttatgttttctggcctatatggaagaaattaaaaactgatttgactgcatggcttaatctcgtattccactaaaatggaatttttttttaattcatatcgtttgaagtttcaaatgtgcatttatyattctaaaatatacttaaatgttgaggactaccctgaacatttatgcttgatgctttaatattaaataaaagaacactacttatttcaaatataaaatacctattgaattggatatgatttgattactgtttgctgtctttacaacttagttttggaaataaccaaacataggcaagtctttgtttttctcttgtgactataaaatccagtcattgaaaattaggtcaatgagaccagatgtggtagctcatgcctgtgtaatcccagcggcactttgggaggctgagggggagtatatttttcgaggccaggaattcaggaccagcctgggcaacataatgagactcccatctcttaaaaaaaaaaaaaaaaagaaagaaatttaggtcaatgaaacaacgtagtattgaacaataagaatgtaattcacattagtatactctacttaatgtaaattaatatagtctaaatatgtttcatttttattgcctttcctcttcccaaattactttgcttcctagaatgtctaatttaggtaaccctttacgcccccactctttttttcccctgagacagtttcgctctattgcccaagctggagtgcagtggcgcaatcatggctcactgcagcctcaacgtggcaggctccagtgattctccgacctcagcctcccaagtagctggaaccataggcatgtgccaccacccccagctaatttttgtatttttggtagagatggggtttcaccatgttgcccaggctggtctcaactcctgagctcaagcagtccacccgcctcagccccctaaagtgctgggattacaggcgtgagctacctcgccctactccctcactctttacagcaatacattatttttactattttagatttcattattcccattgtataaattttagcaaattatcttaactatacctatttacttgtttatgcttaaatttttttaattggttatataatctttacccttttcctttttcagatttatggacaagaagttatcatgtaagtttgttgttgttttggggttttttttaattatttaattgctttttacatgtgtcttagcaatgtttggagcaactttataaaaatttaaagcagccaggcgcgatggctcacggctgtaatcccagcactttgggaggccgaggcaggcggatcgtgagatcaggagatcaagaccatcctggctaacacggtgaaaccccgtctctactaaaaatacaaaaaaaaattagccgggtgcagtggcgggcgcctgtagtcccagttactcgggaggctgagtcaggagaatggcatgaacccaggaggcggagtttgcagtgagccaagatggcggtactgcactccagcctgggctatagagctagactccgtctcaaaaaaaaaaaatttaaagcacacaggacctctaattcacatccgttagttaagcagattacttaatcctaactagacaattttatttacctaatttctgataattaatttaacagcacttcagactttatcttatgtaagcccttcctcactttggcaaaattaacaggatttatcaaccttttttctttaaacaagctacaaaggacttagacaaggaacagttatcttgtttcttgggaatatgtaggaataacatttgttcaatttatctaaaaatctgacccacacagtacttgaaatatatgtaggggaaaaaaccatgagcgttagaggtaagcagccttcagcttgaatctcacttctgtcgtacagtagctgtataaccatgaacccagttacttaaaagctcgggcacggtggtttacacctataatcccccagcactttgggaggccaaagcgggaggatcccttgagcccaggagttcgagaccagcctgggcaacatagggagcccccatctttataaaaattttaaaaaagctctgaagtttagttctgtcctataaagtaaggataatactactttttaggattcttataaattaaaatgtggaagtaaatacaaaaatgtttaacccagttcttgtcatacagtaaggatagtgggtttcagacatctcaaatacttgtgttttatcccacctgatttttagtgaatgcttggtagctaatggaatgtttttctaaaacttctttttctctttttaatagtgaaattaaatggtggcagacatgtccaaggaatattgcggggatttgatccctttatgaaccttgtgatagatgaatgtgtggagatggcgactagtggacaacagaacaatattggaatggtggtaagtaaagatacaagagttctctkggagatttcatttttcttttggaatgtgtattaactttcctggttagtaacccccagaaatggcaaataacaggcaagattagactttccatctcctttttagttgcatacggcagttactcagctgtagtaatatcctggttacctgtaggtaagatctcaactatacagaacctaaggtcctagcgcttgaaatagctgttggaaatcctttttgagctttattctgcaatagaggctcatagttggtccttcattagagcagtagttctgaaaccttaatgtgtatatgaatccccagggaatcttcttaaaatgaagattctacttcagtaggtatggggcagaacttaactaaggttttgcatttctactaatgcctaatgcagatctgccagttcacaggtaacactttctgattttacttgtatacatagttaacctggattttctggtttaccacacccaaaattttaaggtagccaaggtaaaagttacaagggataatcacaatgacagttattcacatgagagaaaaagcaggaaaaaataagcacatactgagccctcataggattaaacattcctacattcattgggccgtagttttagtgattgctgaagaagagttttgatacccagactttgagtccctctttgtctaacacaggacaacatacctaataaagcggtaagcccaaagttcttgaaaaaggtgaaccaaaaaggacaacttacttttagcaaattattaagcataaagacctccaaggagtggtaagagttgctaattattagccttgatttattaaccttgatttttaagtttgagcagtaaagttgaagatagacctattttgacatctctgcctgtttaatttttttacataccattctttccaaggtttgtgttattacttatttcagatactttttcattactgtattttgaaaagcaaatcaatagttatgactgaaaaaacagtttagagtctccagataccacactgtacccccaagtttcatgtaaattgacttgtctttcaggtatattcccttgtgagcttctgttgaataaggctgccagcatgattagtagccaagtccttttaaaaacattttctagataccccaagattttcctctcagcccttatttttacaaataaattttcattctaatagaaggtagattaggtttttagttccttgcaaaaaatttgctgaaaaggattcaggaagaacttggcacctaattgtcaattctgctttgagaagattagagaattatgtaacacactgctcattggaattttatcagagaaggaatagagcatccctctggcaattttccccctaaactttatggactttattttctttgcacagaaattggttgaaagcactgccatcccaagtcatttaagtaatgattacctacttagtgtgttgggcagcctcctgttccatctctgaggtttatgtgacacacacgccccccaacccccagccaaagaaaaaaaaaagtttttatcagcagacagtaattcttgctgctgagtcttcactttgaaaaagaaataataacacatcagacttctttaataaaagacattttaaaaggcaagaacagagatgaactttttgacttttctaaagttggaagaagggaaacaaataggttaaggttttgttattttgttagaagttgtttaacaaaggacagttggcttcattattaccttgtccaagtcagtgatccattgaggccattgaaattacttaatactgttttattgcagttatgtgtgtgttggctgggcacagtagctcacatctataatcccagcacttcgagaggctgaagcaggaggatcacttgagcccaggagtttgagatcagcctgggcaacatagtgagacctcatctctacaaaaaaattagaaaattagccgggcatggtggtgtgcacctgtagtcccagctactcaggaggctgaggcaggaagtcaaagctgcagtgagctgagatcacactactgcactccaatctktgtgacaaagcgagatcctgtctcaaaaaggatgtgtttgttttcaggagtgagtttgtttttaacctgtcagttggatcgttacctaatgataaatctcaactatcttctgagacatccccagagttgtcagtggcatcgcctctatcttactttttattatgttacatagttcaggcactcttgctagggttgtccttctgtagcatcattgaagcacaaaaaagggagcagtatgtaattctggacctgatggttcaagtttgatttggagaattaggcctcaaacacagtggcaaaagaggaagagcactacaataggcctcctttatcctcagagtaggtaccagaaaccacagatagtagtgaaccctatgcacaaatttctgtgtgtgtgtgtgtgcacgcgcgtgtgtatgacagagtctcactgtgtcaccgaggctggagtgcaatggtgtggtctcgggtcactgcaacctccgcctcctgggttcaagcagttctcctgcctcagcttcccgagtagctgggactacaggcgcacaccaccacgccaagctaatttttgtatttttagtagagacagggtttcactatgttggccaggctggtctcaaactcctgaccgcatgagccacctgccttagcctcccaaagtgctgggattacaggcgtgagccaccgcgcctggccagcacgaacttctttttacttcttcacaatctcacagatagaagattcgtccttaccataaatcttggcagtctcaacatatgattctttttcttattaagtcaagaacttgtaccttttcacttaaaggaagcactttacagcttctctttggcatatccatattgccagcatcactgctcttatactttcaggctagtattaagttaaaaaaagggttacttgaacacaagtaaccctttgataccacaacagtcaatcataaaactgagataactgattaatgggcagcatggagatgctagacaaaggataatccacatccagggacagtatgaggtatcatcacactgctaagaacagcatgcagtgtaaaacttacggatgtctgttgctgggactatgcatttaatgtttttggaccacagataaggtgggacaaagttcaccatttagccttattttctaaatattatgtgacaagacaaatatgtaaatttagcagggagctaggcaggaaggctagcttttcttgctttggtcaatgagatgtgatgttcaatatctgttgccaaaaaaaaaattgagaatttaaaattctgataactggccaggtacagtggctcacacctgtaatcccagcactttgggaggccaaggcaggaggatcacttgagactaggagtttgagataagcctgggcaacatggtgagaccctgtctctacagaaaattttaaaattagcccagcttggtggctcatgcctctggtcccagctacttgagaggctgaagtgggaggatcacttgagcccaggaggtcaaggctgcagttagctgtgattgaaccactgcattccagcttgggtgacagagcaagaccctgtttcaaaaaaaataataattaaaatgaaaataaaattctgataactaggtaagcatgtttctactcctggcttatgctgggcatggtgatgtgcgcctatagtcccagctactcaggaggcagaggcaggagaaccacttgagcctaggagttcgaggatgcagtgtgcagtgattgtgcatgtgaatagccactgcactgcagcctggtcagcatagctagtcccagtctcaaaaaaatggaggggagctctgttaacttagaagaagagtgtcaatctttagactctttcagttcccattgtcattttcagggcactgtgtttactggtttttgttgttggtttgagataaggtctcactctgtcaccgaggccggagtgcagtagcatggagcttggttcactgtggtctcaacctccctgggctcagttgatccttccacctcagcctcccgagtagctggaaccacaggtgtgcaccaccaccctcagctaatttttgtatttttgtagagacagggttttaccatgttgcccaggctggtctcaaactcctgggctcaagctatctgcccacctgggcctctcaaaatgctgagattataggcgtgagccaccatgcccagccattcttttttaaatctgctctttactaccttatcatactcattgctgataattggctgccaggttccaagacacttatcctaccaattgtgttcccttctattctgtcagctgcagtaatcacatgtgagttcttttattcatatttaccaggttattgagccctctgtgtgcctgctactattttaggcactggggttttgcacctaagtccctgccctcataaaatttacatttgtatggagaacacaataaatcatagcgtatgtgtaaataaaacaagcatgatactgtgagaaaagaataagttacaactacttttactctagctgcctataagcatagctccactttgaatctttttggaatgcctccatttctaataaacacctcaaattattacattacctttctctcccctacattacctattctttccctcccgtacccctccattcacctatccaattctacttgactgatgggtgatctatcgattatgatgatctccagtctattagggacttactgtttttagtcccctagccttccagtttcgcttatttttctacccctcttgaattcatttaccagctgattcatctatactctgataagtttgtctgttggtttgttttggttttggtttgttgttttttttttttttttttttttttttttgacaaaagacagtttcgctcgttgcccaggctggagtgcagtggcgctatcttggcttaccgcaacctccgcctccygggttcaagtgatttctcctgcctcagcctcctgagtagctgggattacaggcatgtgccaccacacccrgctaattttttatttttagtagagatgggggtttctccatgttggccaggatggtctcgaactcccaacctcaggtgatccacccgccttggcctcccaaagtgctgggattataggcgtgagccaccacacccccgataaatattcttatcttcatttatggcttatctactaggtcaagcactgttctcctagggccttttttttataacttctctttctgcctctaggttctgtcctattcaaacttcggcgtatttatataatatcttgttgcagggacacttatggttgtcattcccccaagtgaaactctcactggctcattgttagtttctgatgtcctccaaacactaagattggcatttgaagctttccaagattgaatgccarctatctttgtttcctgattctcttcgtgaactttttactgcattcaaattagattacttccttatcctctcatactttgtcttcatcttagttctgtctagaatttcctacaatctccttttcaaaattctgcccaatttccaagacccaggtaaaatgtcattttcataaagcatgcctttcacaatttcccatcctggtttcttccctaaatgatctcatacctccaaactgtacctaacatactctactgtacatattttactcattaatttttggatcccatagagtcagggatgggcatttaaatttgagtcctgcattttagaaggtgaaattagggccaggcgtagtagctcacgcctgtaatcccagcactttgtgaggctgaggcaagcagattacttgaggtcaggagtttgacaccagcctggccaacatggtgaaaccccgtctctaccaaaaatataaaaattagctgggcgtggtcagggctcctgtaatcctagctacttgggaggctgaagcaggattgcttgaacctgggtggcagaggctgcagtgagccgagattgcgccactacactctagcctgggcaacagagtgagactgtctcaaaaaaaaaggtgaaattagtcattggagacttggcattagaatctcataaagcaaattgttagccttaaatccaaaagatgtctgtcgtataaagggcttagagttgtttggtgtccctgtggcttgaacaaagctttgcaaaccgacatgtaatattaaaaaaccattaatgatttggtgaaaattcttaaatcatyatagttatgtctgttacctgagttgttcttttcaaatttatttttctctttcttaggtaatacgaggaaatagtatcatcatgttagaagccttggaacgagtataaataatggctgttcagcagagaaacccatgtcctctctccatagggcctgttttactatgatgtaaaaattaggtcatgtacattttcatattagactttttgttaaataaacttttgtaatagtcaaaaatgctttytcagatgttctgaatatagaatatcagctctcattccagytttttytaacatgaattttcctggttgacrttgatttcaaagggttttatgcattaaagtgaaagaatcttattaaatgtgaaacatggcaaggattccttctgtccatcatctttcaacactgaacagataaagaagttacaaacatgagtgagtttcttctaaaacactaattttcaaaacttgtaagaatagtaactttgatctagyctgactttcccaagtacatctacattccaaatatagtacaacagaagcaaaagacaagaagtaatgatgtagttgtttattttgaatataatcatgaagtggggaaaaattttaatacaagagtagaaagaggattccagagaaaaacattccagtgtatcatggttctttgtgagtgagtagagaggggtagtgaggatgctgtccacaatgtattcatctagttaatgaattgtatggcccacaagctcaaacgagagatacattacagatggttgtattataaacctaatcttaagaaaccttaccaagcaaatgcttaaagactgatttttttgtgatctgataaaaagcctgcaaatcgtgaatcacttttaaactgtacagaatggactacacaccagtatggtaaagttcttgtaaaacaccaaacacaatggctcatagatatatacctctctcactcttaaatggcatttcctaattatagaaaatgtttacaacaaaagaacaagagggatcaaactaacaatcaataaggagaactgatgtgaagtcccatacactgttactccatttttcagcaactctttataactccttcattgacttgactcctttacaacatacagctgaattgtagaactagttcttcaagtgtggttcctatagtagaacagcagcatcactggggaacttaataaaatgcatcttcttatatcccataacaaacttattgaataaacagggtggagcctagcgatgttttaacaagcccttaaggtaactgatgcatgctcaactcagagagccactggagcagagctggctttcattcagcccctgcatcatttttaccagtctcttctattaaaaaaaaaggtctggagcagtaagctctgacagtgttttttcttccaataaaactcttaatactatagttgcataaaactacctaatgcgcccagagtagcaggttctgctaggatttttctcccagtaaaaaagcactcaacactgtagttgcattaaaactacttgatgtccttggtgtattgataacctgttttgcttttgccaaagcaatttcagatgccctactggaaaatttatccagagtaggtttgatgtaataccagcaacatttttaattttttttttttccttttgagacacagtctcactcttgcccaggctggagtgcagtggtgcgatctctgctcactgcaacctccatctccagggttcaagcgattctcgcgcctcagcctcccaagtagctgggattactggcacacgccaccatgcctggctaatttttgtatttttagtaaagacagggtttcaccatgttggccaggctggtctcaaactcccgacctcaagagatccacctgcctcagcctcccaaagtgctggtgagccaccatacccagcctaaactggtttttgttttttttttctgagacagagtctcgctctgttgccaggctggagtgcagtggtgcgatcttggctcactgcaacctccgcctcccggttgaggcaattctcctgcctcagcctcccaagtagctgagattacagtagctgggattacagacatgcgccaccatgtccagccaatttttgtgtattcagtagagatggggtttcaccatgttggccaggatggtcttgatctcctgacctcgtgatccgtttgccttggcctcccaaagtgctgggattacaggcgtgagccactgcgcccagcctaaattggtattataagtaaaaatatatcccattgcaaaacaagtctacaaatgatggaaattaattagtatttaccaacatttagcatatacataacagtattactttacaaattgtcttcattaaaaccacaaaaggaaacaaatatgaatacctcaacatatctgttaagaataaaactagaaaaaaacactcttttgacaaaccatgagtttaatcccctacctatcaaatatatcttggcagttttatcagcatattaacattcacaactgtggtagggaagaagtcatttttactcagaaccaaagtttacactattttgctaaagtagctaatgccatgatctgatgaaggactttgaagtttctattcaatggaaggattttttttttttaagatggtctctgttgcccaggctggagtacagtggcatgatcatgattcactgcagccttgacctccaaggctcaagtgatcctcccacctcagcctcccgagcagctgggaccacaggcgcgcattaccatgcctggccaactttttaaaaattttttgtagagatggggtttcaccatgttgcccaggctggtctaggcctttgtaattttttaataacactacatgttaaattggttgcatttacttttgaactcttaatcttttgcttgttctgttctaccagtgtcttgacagttaatcatgatctttgcacagtagatgcagaactagttctgaagttttgctgcctgttaattaccatttggatgctttaaaaccctacaggtgattccaatgtgcagccaaggttgagaccactgtcttaagatttcagcaaccaatttctcacccagaatgctacagtaaatgaaacacttaactctttggacatatgctggacttggttaactttggtgtcattccaagtattctgttctagtgccaactgctcaggagttatttaagttgcctctgctgttaggctgtctgtgcttattatcaagattacttctaaagttcttactaagagaactgagaaagttctaaaagaaagatccttgcaaaatggatctgctttgatacagattgggcttcttaggacttctaaggcactaaaaccctttgtaggcattttcacacccacattggtgattcccaaccctgggtgcacattagaaactttaaatagctacaatgctaaggtcctatcctcagtctttgaatctgaatctctggttatgggggggtctcagtatttttaaaagctcctgaagtgaggatttaatactagaatgccagtttcttaattcagtagcccatatttgcttttcattttacttgagatttttgtttaacatcttcaagttacattactaagacttctaaatttcacccctaatcaaatcaagacagaagaatcaaaagacaacattctgaaagtcaaggctttaggcatgggcacacgtacttcaaaccggtatgaaattactaagagtcaggcataagacaccagctcccataaattttatctgactgaagattatatctagctgtaaaattcaaaaggactactccccaactaagatgtctttaagttctccctcaggtactcaccttaaaatgctctacaattttgatcaaaatccagcgcgccactcccagacctactgaatcagaatcttcaagagaggagcttgagaatccatatggtttaacaaactccaggtgattatttttatttacttttgagacggagttttgctcgtgttgctcaggctgaagtgcaatggtgagattggctcactgcaaccaccacctcctaactccaggtgattcttattatcagacaagtttaagaaaaactcctaatggatagtgaaagaatacttaagaaattttggagatggcataagtgcaatagctataccttcacacttaattagaaccgtgtgttttcctatgaccagcagggattacttttattaaacaatgataatggcaaaatatctggttcaaaatcatctctgctcagattttgttcttttttgccactgatagtcatttggaactaggaggggaaaaaggagtgtgtcacttcatagttcagttttaagtttctcatataagccatcctgatcaatcatgtctgtgtgcccgttccagcggtgataggcaaggagtgcagcgttgtgggctgcaatggcactcatctccatggcacttgctgcacactctatgccattgaggtaataaagtcgatcatggagaatgatagaggggcatttctccgggggcttatagtgaggatatgcaagccatggcttcttcacagcataatcataggacagaaagagctttaaaatttgtgctttagtaagagtttcttgggaaaagatcttccaaacatatgttccatctgttgatggctcaggatcttccttttctctcacagagggcacaatcccaatactgttaatgaacaaatctgaattatcagtggttaaaactgtattaaggccaaatttatctatgggtctagagctaaagatagatgtattcaattcccccttaactaaagttgtcactatatgttgataatattgatggaattcctcaattggaggatcaaagttgagaaaagtaatattcgacatttttcgattcaacggagtggccaccaagacgatgtcatagaagtctgaacgagtctcagttccaatttggtagaccacttcatacatctttgttggatttcctagaggaaataaggaggcatatatttgtttagtgtttctaacataccttctaaaaataattgtataccttcttcataatttctctataattctaaagaattgaagaagttatatcccttaagatagttgtcccttgcatttttattacattgaggccaatttcttattcagaatgtcagtaagtacaaaatacagaatttttacttttgaaggtaagattatctttcggccgggcatggtggctcacacctgtaatctcagcactttgggaggccgaggtgggtggatcacgaggtcaggagatcgagaccatcctggctaacatggtgaaaccccgtctctactaaaaatacaaaaaattagccgagcgcggtggcaggcgcctatagtcccagctactcgggacgctgaggcaggcgcctatagtcccagctactcgggacgctgaggcaggagaatggcgtgaacccgggaggcggagcttgcagtgagccgagataggccactacagtccggcctgggcaaaagagcgagactccatctcaaaaaaaaaaaagattatttttcaaatccaaggagtgatgccacagcacttaactacactggggaattttttttttttttttttttttttagatggagtctcactccgtcacccaggctagagtgcagtggtgtgatcttggctcactgcaacctctgccccctgggttcatgtaattctcctgcctcagcctcccgagtagctgggattacaggcacctgccaccacgcccggctaattttttgtatttttagtagagacagggtttaactatgttggccaggctagtcttgatctcctgacctcaggtgatccaccctccttggcctcccaaagtacagggattacaggcatgagccaccgtgcctggcccattggggaatatttctatatggtacaatatatacaatttcaagtttcatcattttagaactgagtaagagatgacagaagagaagtgtttctccctgagcaatcattttctgcaggggatatcaggaacaataagaaattcaagcttacctgtgtacttggtctttgttttctcctcgatgtacattactgagccagatataagattgcttttggatgcctgcagaagccctgagcaaacaagtttattgccaccttctactgcccaaaggccagaatcagaacaggacagtgacaccgcccctgtcaataggaggaaaaatgtgttttaattctgactttttgtaagaggctctctacccactctcccttcccaattacatgttctactccaaatgtctctagacattgctaaatggcccctgggagcaaaatctcccccagttaagaattactgaactaatgaaagctaaagaccctctccccctaaaaatgcacatctacatacgcacaattttgctaacaatgtctgaggttcacagagaaaagtagcctccaatccacagcctaaagtcaggaaccaccatagcatcaggtaagcccctctgtgaactaatgtccaccactgtttcaagccctggcttacccacaaaggcattgatgtccgtgctttggccataattgaccctcataacaggagcaatcatttcattgaggaacttctcagaaaagccggccttttgcaaggtttcaagaagtgttcgattaagcattccaaggaagtcatctcctcctagagcatgaagtaatttttcgacactactgaaggcatagtcatgagactggtagcggtagatcctttggaaaagaagagaaatccattaaataccaaacaagatgtggggaaggggatgtataaagaagggaagtggcgtcataagaatcaaactgacatctaggtgcagtggctcacgcctataatccccacactttgggaggcagaggtgggcaggtcacctgaggtcaggagttcaagaccagcctggccaacatggcaaaaccccagctttactaaaaatacaaaaattaaccaggcatagtggtgtatgcctgtggtcccagctacttgggaggctgaggcaggaggactgcttgagccccggaattcaaggccgcagtgaactgtgataatgccgctgcactccagcctgggccagacagtgacagtgtctcttaaaaaaaaaaaaagaaaaaaaaaaagaaaagaaactaaggaagaaagaaagaagaagaaaaaggaaaaataaaaagtagaagtaaggccaggcgcggtggtttcatgcctgtaatcctagctctttggaaggccaaggcaggcagatcactaggtcaggagtttgagaccagcctgaccaacatggtgaaaccccgtctctactaaaaatacaaaaattagctgggcctggtggcgcacgcctgtaatcccagctattcaggaggctgaggcaggagaatcgcttcaacccagaaagcggaggttgcagtgagccgagatcacaccgctgcactccagcctgggcaacagagcgagactccatctcaaaaaaaaaaaaaaaaaaaagtagaagtaaaatactttgtctaaaggccacatggcaagta

SEQ ID NO: 94398 - DNA, 31309 bp, Homo sapiens
tatttttgagacggagtctcgctctgtcgcccaggctggagtgcagtggtgcaacctcggctcactgcaagctccgcctcccgggttcacgccattctcctgcctcagcctcccgagtagctgggactacaggtgcctgccaccacacctggctcattttttgtatttttagtagagacggggtttcaccgtgttagccaggatggtctcgatctcctgacctcatgatctgcccacctcggcctcccaaagtgctgagattacaggcgtgagccactgtgcccagccttagaacaggattttttttttttaattaatacttttggtctctatagatttgctgtttctgaacatttcatgtaaatggaataatacgtcttttctgactggcttcttccacttagcataatgttttctaagcttattcacagtgtaatttatttatgtcagcacttcatttcttttcattgccaaataatattccatgtatgtccctatacatggggtattattatatgccacatttgatccatcagttgatgaaatttaggttgtttgccacatttgggccattgtgaacaatgctgctatgagcatttgtgtgttaagtcttgagtctctctataagattgtctgtttctttgcagtttactcagttaggaaactggtttgtcttaatagacctttcaccgtctggatgttgctgatcttaacactgtggtgtcatttaacatttttgtctgccgttgtgttttctctgaattaatattgagatctagaggctcaatcagatatacctgcaaatttttttagcagtaatacttgatgagggtgttatgttctttcattaggaatctcagtgcctgcctgggagtcgtttttgtgatgtcagtaggcagtattattgcatagctccattaatttattaggggttcaaacttggtgcctatttctcaagaaattaatatggaagctttttgcattacagtttcaaattcattaaactggtgtgtgtaagtacttagtgtagtttttttcttttttttttttttttgagatggagtctcgttctgttgcccaggctggagtgcagtggcgcaatcgctgctcactccgcctccggggttcaagcgattctcctgcctccgcctcccaagtagctgggactacaggcgcccgccaccatgcctggctaattttttgtatttttagtagagatgaggtttcaccatgttagccaggatggtctcgatctcctgacctcgtgatccacccacctcggcttcccaaagtactaggattacaggcatgagccaccacgcctggcctagttagtgtattttaactagctaccttattaaattttctcataagtccttacagtttttcataagagtttctaaaactttgtagctgattatgctatatgccagttagcatttctgatgggcccctccctcctttctccttgccaccctgcattgcctaggacttcagaacaccctggtcagcagcagcagtgagggtgccccctcattataggaatccttccagaggtgtttacactcacccaagcatggatgcacactcatttctctctggtgttataattgatgggcagacagcaatgcacacggatccatgcatccctttggttgtcctgggaactgcactcagccatgacacatgggctgtgcaatcagggcccacagacacggccctcatctgtgcaggaccctggccggcatttgctgacaataacatggccagttggtcttttctaaataaagcaccgcatacagaggaagtatgctgaagctgggctagcatcaggtgtagaaactgcaggctgaggaggcagcagcctgacccggcctgtcagtcatggaagtcccagagtgctgccagcgttgctgttagagcacttgtctgcccgagtttatttcctccaggggcacatcgggggcctgctctgggccatgcagatgcccaggctctgccctggagtagtgggggaaaagttggtatgagcattttaaagatggggaagagggctttcccctctattcctagtggtttcccctcctttctgaagcagaattgcaggacagctcccgagggcagcaggtcagcctccacaaagagctgggggttgtggggtttggtggtagcgctgagaaggggtagggtggctttctctttggcctctttctctttggctttctctttccaccgcgctgagctgctgaccctttcccatggagcgatcaggaggagtctttgattcagaacactgaaacctggcacgcctgaggagagttagaggagacaggaacaaaagctctcccagaggacttagagctctcaggcatcggacgggagggggacacagccacatgcttcctcttgcactgaagagggttgcctttttcctgtttgctaaatgccagacttgtggatggaccaacaggacaacttgcccagcttgaaggtttttaacagaatgaagcaatgggaaaatgttttcaaatttatgcccccccttccacttttgttttaacttagaggagggagtaaggaggtgggcgtggcaatatcagaaagggaaactagcagtgtaataataatattaatagtaccaagtgtatactgcaagccaagtgctgttctatctaaatgctttatatacaatgatttccttaaattctcacaataaagcaacaagaagagacacagtcctacagaggaggaaattgagacatagaaattaaatgacttgcccaaggtcatactgagaaagtcatggtgccagaattctaactcaaacattttggttccagtcttctgccctttttttatttttatttattgattttttttttttgaggcggagtcttgctctgtcgcccaggctggagtgcagtggcacaatctcggctcactgcaagctccgcctcccgggttcaagccattctcctgcctcagcctcccgagcagctgggactacaggtgcccgccaccacgcccggctaattttttgtacttttaatagagaacggggtttcactgtgttagccaggatggtctctgcccttttttaactaagcaaaaaaggaagctggagaagaactgtaccctggagatgccagcagtctccaaggagctccccgcaagcatcccagaggaaggggtgtctgccaggggtctccactgtagtttctcttttcccctttgcaggctcagagcaggctgaactcacagccttgtgcacctgtccctgtgcatcttcctctaccttgtcctcttggctctgttgagcggcccatgtagccacactgactggtgggcaggtgacagactggcacatggcacgtgggctttggtacacttggggtctctgtagcagtgccagcagctcccactgtgcaagactgctgctggcagcgtgaacaggagggccaccagcagcagtgagtctcattgcaagaacacagctggcagtcctccgggagagaaaagccggggtgggccagggcctctggaagatgtggggtcttcccatcccccacacctagcctgagctgaacagagggcaagctaagagtttggatgtttggagagacatgaggaacggtcaggtgtcaggaggacaggtgggttaaacaacaaggtggggcttggagtgagggtgaacacgaggacagaaagacactcaaggcagctggaagtacaaatggcagactacagcctcagccacttaatgttcacaggccacaaggcagcatctggctagtcactcagatcctctaatagacaaaccaccaaacacacacacacacacacacacacacacacaccctggctggacagacttccagatggacagaatcccagggaaacacccagctggacaaacagacagattactgacagatgggtagaccctcagccagacatccaaataggcctgtggccagagagacacctgggccccccagccaggcaaaggtcagaatccctcaaggacaggtgccctccccaaaatggacagagacattaccccagaggagagaacaccccacccacctagtcaaccagaccttcagctggacgacatgccctccaccagtcagacagacctcagcctatgaggacaggccctcaacaggatccctgctgctggacagagatcctctagcccataaagactgccctgaataaccatgtgtgctcaggggctcacattttcccagaaaatgtctttattttctgaaagcttactgatgcttctgtattctacctccctggatctccatggccatccacaaaccctcaatgattatactgagagtcactatcatgcactgagcagagctctcaatgacttcccagactcttcggacccttcaattactaacactccaaatcccaatggccccacaattactttcacttcttgtcccaagtatccactggcctcccaatgactgtcattaatatctactgacaccccccccccccatgaacatccaagggaccccgactggcttccaatgaattccctatcaccaccatcctaaacaattacctccctgagaatgctcaaagatgaaactgataaatgatgaacatgaatctcacagtgacccctgcggaccccacgataaatcaaacagccctagctgctgatccccacagagccactttgatcgctccatcacttcagccaaggtcagcaaacgacagcctgtaggccacacacacacactagaataattcatgacacatgaacattacatgaaattctgatttctttgtccataaatggtttctttgggacacagccacactatattgtctgctttcatgctgccacagctgagttaagcagctggggcagcgatagcaaagccaaaaccacttcctaccgggacctttaagaaagtgtgcccttaaatactctgatagcccctagtgaattaaattgaccacctgacatcatgcccctgttgacccttcagagactcaggcacacatccaggccccaatgctacctttcaacccctcaacgacctcaaactggtgtccactgacgccccttccagtgacacccctcttaattcttccgacctcggcgagaagggggctaacctaggcctgtccttgaagagacccaggtgccagtccattctctccagcctcccctcggtgatcccggaagctggaacggcggctctcctctgacctctgcacactttctgaagatgggagtgtcagggcaggcaaaaaagagaagctcttcgttccccagaacccacttccagtgcctcagttctgtttcccagcaggcttgtgcaggtcgagatgctcacacaggactgaccctggtgccccagcgcatccgggaaaaaggaaccacaaattcctcgggaaatacacagagaagatcccgctgccacttggcctttcccacggcgtggctgcccctccccggcctcccttgggcccggctggagcgcacagcgcgggacgcccccgacccggggtcctctggcacgaggggcagcctgatctcggcgaccgtctccacccaaggctgctgcccgccccagctcggactccgcgcggcctggctcccaggggacgggcgggagggcccggcgagaccgctcggccgtccacccagagccggcacccggaggtcggcccctgggcgcggatcccgatctgagggcgggtcccaagcggcagggagcgaacctgggaccgtgccacccccccaccagtgggcgcggcagccgaaaaaaaggggaagcgccggcgctggactctgctcagggcagcccgcgaggacctagggctccggccacagcggcccgagcgcccggggtggggctacgcgggctcagaacacggtggctggggcgccctgcccgccgctgcgcgcttccattggctgccgaggcaagggcggggactcagtcaccggcctccgcctcccgcggcgtccacactcgccgcgcgcgcggcggccgggctggaccttgctggcccgcggcgccatgagccgcagcctggactcggcgcggagcttcctggagcggctggaagcgcggggcggccgggagggggcagtcctcgccggcgagttcagcgtgagtggcacacggggtccgcgagcggcgcgccccggccctggccctgcgtacgcctgtcctccgcgcacggcgggctctgcctttctgtctcggtgtccccggtgtctccccgcctcggggggtctctccgtgtttctctccccagcacttctctgtcgctcttgctgtctccgtcttcactctctgccccccggccccggagcgcgacgtccacggccaggccgggacggaccgtgcacaccctcgttcccggtgtcctcgtcgcgctcccggaacaacctggctgcgggcgggacaggtggggcgggcgccgcaggggagggcgggcggccctgctgcgctggacagccccggccccgccgcttctggcgacctgactgtcccctgtgaccacaggaaggaaggggctgcagcagggcgaagaggaacacggaggctgtggcgtggtgagggtgtgaacgccgggctcgaatccgcgtccgggcccgaatccgcttcccgtcccgaatccgcgtcccggccatccgcgtgtggtccaggcggtctacctggcccctctgacctcggcttctcccttggtgaaatggggacatgaatgaccaaactggtctaaggattaaatgatgtgggtgaaaagcacttagtacatattgggcgcacacttcgtaggggcgttcgtcactgcctataaagattctaaacgtgggccaggtgcggtggctcacacctgtaatcccagcactttgggaggccgaggtgggaggatcgcttgagctcaggagttcgagaccagcctgggcaacacagcgaaaccccgtctctactaaaaatacaaaaatcaactgggcatgggcgcatgcctgtaatcccagctactagggagcagagacaggggactcgcttgaacctgggaggcagaggttgcagtgagctgagatggttccactgcacagctgagatggtgccactgcactccagcctgggccacagagtgagatcccatctcaaacaaaacaaaaccaaacaaaaaatctaaacgttacaatacaggtagtgcaagcccagcattaggaaggctcacgcagaatgctaggcactgtacattacagttgatgacgtgtttaaagtgtaatcgcttatgtaccagacatagaaacataccatacaaacgcataaactgatatatggtgacatgtatcaagtttagaaatatgacaaatatataaaagtattataaatgaccgtttatacaataaacattgcataactgcataaaacaatacaacaaatgaatataacaaagattataatttataaaatgaccaaagttatttgataaattcataagtagatataaaatatgtaacagatggccgggcacggtggctcacgcctataatcccagcactttgggaggccgaggcgggcggatcacgaggtcaggagatccacaccatcctggctaacacggtgaaaccccgtctctactaaacacacaaaaaattagctgggcgtggtggcgggcgcctgtagtcccagctactcgggtggctgaggcaggagaatggcgtgaacccgggaggcggagcttgcagtgagccgagatcgcgccactgcagtccagcctgggcaacagagcgagactccatctcaaaaaaaaaaaaaaaaaaagtaacagataattataaacctaagtaatttacacacatgtagaaacattgtatataagaaactaagaaatgcataataaatgtaaaatatataattatacaatataagaatgtgtgtaacaaatgtaaacataatacccatgtgatatatgacatcatgcgactgggtgggttctgaaccgtgtacagtgcggagggcctcacatgcggaaggctgggtggcgagggcacccctgctccccaagcctgcctcccgcatgtgcaggaatcactgcgctcttctaggtgttcccactacacaagggcatcatgagggcttaaatgacccaatggacacaagtaaagcacttagaatagtggctggcacacagtggtggcatgggtgttacttattatcattgagattacgaatacctgacgatgatggtaatacacgattcactaattattattataatctcccagtaacacagtgcctatagtatcttgtacataatatgttatccattataatgcctatgcattcattgtacattgtcttatatgtttagctacatagcccataatatatttcattacagttattgcttacaagacaatgtcacagattgagtgtgcagggggtgggtgccgagagggtctgagttcaaccctcaccgtgtgacttcctggttgggaccttccacaagtcgctgaaccacgtggtgcataaactttcccgcctgcacaatggggacgtcaataatagtacccacgtcgtaggaacctgtgatgattacatgcccttagcacagagagtggcacagagaaggtgccctgggtcactatttcggtatcattattattaggcaggcccagtgccatcagggtctgcactcacctccccaggccactggctttgtatcctgcaagcgtgcctaggtggcctgggactctgacctggctcctctcctgtctyctcccctccctgacccactcataatgctctaccaggacatccaggcctgctcggccgcctggaaggctgacggcgtgtgctccaccgtggccggcagtcggccagagaacgtgaggaagaaccgctacaaagacgtgctgccttgtaagtcggggcttccgtagggagtcggtgcagccttgcacgccctgccacgtccaggcgtcagtgtgcactggagtcacccactgtgctctcctcccagagcctcaccctctgcactgctcagcagcccacaagggcaccttggtgggatctctgcatgtgtgtggtcccctgctggctttcagctagggggctgtcagaggctccgtcaccctatcctacccaaactccacgtttctcaccttatctgctgacagatgatcagacgcgagtaatcctctccctgctccaggaagagggacacagcgactacattaatggcaacttcatccgggtgagggttggggtcacggaaggaggtggactgggagtggccaggggtgggccgcagaatctcagtcgtgaattcggccttcaccagggcrtggatggaagcctggcctacattgccacgcaaggacccttgcctcacaccctgctagacttctggagactggtctgggagtttggggtcaaggtcagcacttgggggtgcggcacaatggtggggtcaacatctaagtaccccctcrgcagtttccctggccccctcacccaaatcaccttcctctcccctgaccctccttgtctaggtgatcctgatggcctgtcgagagatagagaatgggcgggtaggtgccctctgcccccaggtttcatgtccttgtgggaggagggaggagggatcttgctagctcctccttgaccccaggacccgagggtccagctcttggagtgaccttattgtagctctgtgggaagccccattgttcctctaagtttttgttgatatgttattcatcccccagtgttggcaacccctctcctgctgggcttcccagccatttcacaccttagaccataaggccctattctgactgcttcccctgtaggctctgatctctctttccacctctcttccctttattcactccactctaacaactctggtctctgctgttcccatgttccagggatggctctgcctcagggtctgtgccttggctattccttcagcctaggacatccttccctgtggcttgctctatcacctccttcaggtctttgctcaaatggtaattcctcaatgagaccttccggggtgggtcttcacaccattttaaactctcagcacttccattctccctcccttgtcctacttttccttctttcttcacagttcttatgaactcctaacacactggataatctacaaatgtattatgtacattgtttatgcttaatctccctgatttagaaggtaagatccacaaggccagggatttttgttttgcctgttaacataaattagttactaaataaataaatgcatgtcaatattgaaggctgaaggcacatagcttcatgtggtttctacattcttgcctactccatggatggggtaggggttccctggggtgactagctgatggtggaggctgtatgatctgtagtcttgtctctttctcattcctgattttggtaatttgtgttctctctctctctctgtctcatctctctatttcgctatctcttttttcatgctcctgcctgttttttgtaaacagtgtattagaacacagccacactcatttatttacatattgtgtatgcctgcttttatgctacagtggcagagttgagtagttgcaagttgaataaattatatggcctgtaaattctaaagtatttatctgaccctttataaaaatgtcagccaatctttggactagaagtttatcattttattattttttcaaagaacctgctttggttgtattcatttgtattcattttctctattgattttttcattttccactttttttttttttgagacagagtcttgctctgttgcccagactggagtgcagtggtgcaatcttagctcactgcaacctctgcctcccaagttcaagcaattctcctgccccagactcctgagtagctaggaatacagacacatgccaccacgcccaactaattcattttctactttaatttcaagtgtacttgaaaacaatgtgtattctgctttggttggctggagtgtcctgtaaataccaattaggtcaactgacagactttttaaaaagacacttttatatctttactgtatattttatatctttactgatttattttctctaaatgtatggattgcttagagaggagtgttgaaattaccaactgttcaataagtattaattaggtcaagtttgtcaacagcactattcaagtcttatttctgacaattttttttgtctgcttgccctattatttgctgaaagaggaatgttgaaatctgctttaactattctttcagttttacttttcatgttttaaaactttatgattgagtacatatacatttaggattatgtcttcctaatgattggatccctttctaatatgtaatgactctttatttgttaatatttttttctgaagtgtactttgatattaatacagccatttaaatttctttcttttctttctctttctttctttctttctttctttctttctttctttctttctttcctttctttcctttctttcctttctttctttctgtttttttgagatgcagtttccctcgtcacccaggctggagttcaatggcgcgatcttggctcactgcaacctttgcctcccaggttcaagcgattctcctgcctcagcctctcgagtagctgggattgcaggtgcctgccaccacgcccagctaatttttgtatttttagtagagatggggtttcaccatgttggccaggctggtctcaaactcctgccctcaggtgatccacccgcctcagcctcccaaagtcctgagattacaggcatgagccaccgccctcggccttaaatttctttagagtttgcatatgtcttttcccattcttttactttgtatctatgttcatctttattttttagtgtgtttcttgtaggtggtgtattgtagggactttttttttttaagacagaggggaatggagtggtgcaatcatagttcactgtaacctcaaaatcctgggctcaaatgatcatgctagcgcagcctccctgaggagttgggactacaggcatacaccaccgtgcctgattaattgttttttatttcttgtagagattaagtctcacgtataatccaggctggtctcgaactcctggcctcaagctgtccttccacctcggcctcccaaagtgctaagattacaggcatgagccactgcatctagccaggacttacttttaaatctaatctgacagtctctgcctttaattggaatattcagcctttaatgtaattatcaataatgttgggtttaaacctaccatcttgctatttgttttctatttgctctgtttgttcttttcttctttttttctctttcagagtgagaattttttattaatctattgcatagtaattattcccttattagctatacatctttattttaaatatttagttgtggctttagggtttacaatatatatctttaacttatagtctatagtcaaataatattctacatttcatgtaaaatgtcagaactttactgtagtatatttcgattacccctttccatgctttgtgctattgttactatatattatagttctatatataaaatatactccacagtacactgctattatagttgttttagaatatctttttaaacagctttattgatatacaattcagtcatttaaagtgtacagttccatcatttttctatattcctgagctatgcaactattaccacagtaagatttttgtttttgtttttgtttttgtttttgagacggagcctcgctctgtcctccaggctggagtgcaatggcgcgatctcagctcgctgcaacctccgcctcccgggtccacgccattctcctgcctcagcctcccgagtagctaggactacaggcgcctgccaccacgcccggctaattttttgtatttttagtagagacggggtttcaccgtgttagccaggatggtctcaatctcctgacctcgtgatccgcccacctcagcctcccaaagtgctgggattacaggcatgagccaccgtgcccggcctaccacaataagtttttgaacattttcatcattccataaaaaaatccaggccagacatggtggctcatgcctgtaatcccagcactttgggaggctgagactggtggatcacgaggtcaggagatcaagaccatcctggccaacatagtgaaaccccgtctctactaaaaatacaaacattagctgggcatggtggcatgtgcctgtaatcccagcaactcgggaggctgaggcagaagaatagcttgaaccagggagttggaggttgcagtgagctgagattgtgccactacactgcagcctggccacagagcaagactgtctctcaaaaaaaaagaaaaagaaaagaaatcctatatccattagcagtcactccccatttcccagcaacctctacagccccagacaatccctaatctatttttgcctttatacatttgcttactttggacatttcatataattgaatcacataatatgtagcctttttttgcttagcatttttgttttgttttgttttgtttgctgaatactattccattgaatggatctaccacattttacttattggttgacagaaattgggttctttctactttttggctattatgaacagtgctgctatcaacactgatatacaagtctctgtgtagatgtgggttttcatgtctcttgggtattgctgggaattgctgggctatatggaaactctatttttaacattttgaggaagtgccaaactgttttccacagtggcagcatcattttacatttccacggcaatgtttgagggtccccatttcttctccctgatgcttgttactgtcttttttttttttttaattatagccatcctaggggttgtgaagtggtatgccattgtgtctttctttaaattatgtggtaaaatatacataacataaaatttgccagtttataggtgctgtgaggaatgttaaaaataattttgccatttaaaccatttcaagtgtacaattcaattgaattaagtacattcacaatggattaaccattcctactgtctattttcagaacatgttcatcatcccaaacagaaattctgtattcattaaacaataactccccattcccccatttccaggtaacctctattctcctttctgtccctatgaatttgcctattctaggtacctcatgcaagtggaatcaggaatacactaatatacaatacttgtccttttttcaaggttcatccatgttgcagtgtgtatcagaatttcactgttttcaaggccaaataatatttcattgtatgtatatatcacattttgtttatccattcgcctgttggacatctgggttgtttgtaccttttgactattgtaaataaggcggctacaaacattggtatacaggctggacacagtggctcacgcctgtaatcccagcactttgggaggccgaagcaggcagatcacgaggtcaggagatcgagaccagcctggctaacacgatgaaatcccacctctactaaaaatacaaaaaattagccaggcgtggtggcagccgcctgtagtcccagctactcgggaggctgaggcaagagaatggtgtgaacccatgaggcggagcttgcagtgagccgagatcgcaccaccgcactccagcctgggcgacagagcgagactccgtctcaaaacaacaacaacaacaacaacaaaaaattggtatactagtatctgtttgaatccctgttttcagttccctgggtatacacctagcatggaattgctggatcatatgataacgctatgttcaacattttgttttccacagtggctgtaccattttacgttcccatcagcagagagagagagagggagggagggacatgtgtagtttaatgacagggatatggtctgcattgttaagactatcttgtcattgtgtaaacatcatagagtatacttacacaaacatagatagtatatacattttttatttatatatttttcatatggaaaaccaaatgtcccagcaccattactgagtatcaatcatttccccaacttaatatgcagtgtcaatatcaagtgccatgtatcaggtttctacatatgctccattataatctatggcaccaccattgtatatgtggtctgttgttaaccaaaacatcattatgtggcatatgacaatgacatatatgccatcctaatgagtgggaagtggtacctcattgtggttttggttttcatgtgcttattcgtccatttgtatatcttctctggccaaatgtctattcatgtcatttattcattttaaaattgggctatttggggttgtctttttattattgagttgtaagcgttattctgtatataagtcccttatcagtacatgatttaaaatgtctttcccattctgtgggttgtcattccactttcttgatggtgtgttttgaagcacaaacattttgtgaaactttaattccaatctattgtgttgctgtgcttttggtgtatctgagaagtcattgtctaatcagaggtcataaagacttactcctgttcttccttctaagtgttttatagttttcttgcttacagttaggtctcagatttactttgaatgaacttttgtatgtgatgtgagataggggtccacattcactcttttgcatgtgactatccagttgttccagcaccatttgttgaaaagactatgctttgcccattgaaccgtcttggcccctttgttgaaaattaattggccataaatataagggtttatttctgaactctcaattttattaagctgattgatgtgtttatccttgtgccagtgtaacatagttttgattattatacctttgtagaagttctgaaatcaggaagtatgagtcttccaaatttgttcttttttccaagattgttttggctattttgggtaggtcccctgctgtgcagaagagttaaacatggcaagcataaatgtttatgcttagaaaggccttcctgtaaggttgactcttgggtggcctctagaaacctaggtttctgataacagtggctcactatgcctgaactgttaatacaaacaatatgctttatgcagaacacctgttctcctgctggtagtctgacattttggtacaggctaggcagagtgtgcctacattctgtgcagacggtgccccaataaaaatcctgggcactgagtttctaatgaacttttttatgaaacgctgttgagttttgtcaaattttgttctttgcatctattcagatgatcgtgtgttttgtattctactaatatggtgtatgacattgactttcatatgttgaaccaatcttgcattcctggaattaatcccacttagtcatggtgtttaatactttgctagtacttcattgagaatttttgtgtctatgtttgtgagatattggttagtagttttcttttcttgtgatgtctttggttttggtgccagggtaatactagcctcatacaatatgttgggaaatggttcctctcagttttttgcaagagtttgtgaaaggctggtattaattcctctttgtttgataaaattcactagattatcttttaaagatgtttaaaatgaaatatcttttacatttagccacttacttttctccctgttattttgtgtagatctgtatttccatttgtatcacgttccttttgtatgcagagcttacttattctatttatttaagagatagggtctcactctgtcatacaggctggagtgcagtgtgcagtcaccactcactgcagcctcaaactcctgggcttaagcaatcctcccacctcagcctgccaagtagttgggagtacaggtgtgccactgcactcagctaactaaaaaagattttttttagatacaggctagctatgttgccaacacacctagctaattttaattttttttttttttttttttttytttttaagatacaggctatgttgctcaggctggtgttgaagtggcctcaagcaatcctcctgccttagcctctcaaatagctggagcagccactgtctgtaagcatctgaagagcttactctaatatttctcataatgcagatttgtttgtgatgaattccctcagctttcatttgtctgaaaaggttttcagcatttttaggatatcatagcattgacttgccgtttctgacaaaatgttgctataattcttaactttgttcctcagtatgtgatgtgtccttttgtgcataatgcttttaagattttctcttctggggcctggtgtggtggctcatgcctgtaatcccagcactttgggaggccaaggtaggtgtatcacttgaggtcaggagttcgagaccagcccggccaacctggtgaaaccctgtctctactaaaaatacaaaaaaaggttggacatggtggtgtgtgtctgtaatcccagctactcaggagcctgaggcaggagaatcgcttgaacctgggagttgcaggttgcagtgagccgagattgagccactgcacgccaagcctgggtgacagagcaagggtctcaaaaaaaaawttttttttctcttcttcattctttttcagtaatttgatcatgatctgccttggcgtgactttctttaggtttaggtttattctccctctggttcattgactttcttggatttgtgggttcatagtttcatcgaatttgggaaaattttcacctattatttctttacataaagtttctgttatccccctttctcctttccttctggactccacgtgcacatacactagactggtatatttctacagagaactgattctttttcatttttttcatttcattttgaattatttatattgctatgttttcatgtctattgatcctttcttctagtgtctaccctgctattagtggatttttcatttcatatattttatttttcctctttataaattccattcaggttattttttgtatctttcattccactctgcatcatgttcatgttttccttttcatctttgagtgtatttgtaatagccattttaagatttttgcttctttcctgaactgttatttctgggccctttcctattgactaatttttctcctggttatgggtcacactttcctgcttctttgtatgtccagcaaaattttattggatgcttgatattttgaattttgcacaggtaagtgttggattgttttctttagagtgttttgccttttcaggaacttttggatggttgatcaagtagcctttgttctagaattaatttagccgtacttctaatgtgtggtcattctaggttccctactaaatgccccttatagttgataatgcctctacactctagctagagggaatgtgaattctttctcatcatgagctcaaggaaatgttcatcctacagatccctactattctttcatggtaagttattcttgcctggcctcatggggtttcatgttgtatatattcagattattcaaccaaagaatcaaggaggggacttctatgcaagttattgttttgtttttatttgcatacctctgttccttccaggactctgccctgcaaattctagctgcttttgcctccttgagccatggtctctggctcaactcagtgggatcattagactcatgtcttacagcctggtgacacttccatgcaataagccggagtggtctgttcagtgaccacagtactgcaacacctgccaaccagtgtctgaaaatagtggctcatgtattttgtccagtttctagttgcttacagtgggagggtatcctggactgtatttcccctgcatggtcagcagcgcacctccattgagtctgcatgtgtttaatctgatggctctgttggctggcgtctgttataggttataagtatagctgcctgtgcttccaccacgagcacctggggtgtcytgtggcatgattgagctagctctgaagctgactccctcttctcactccctgccttttctcccttaccttttgcagaaaaggtgtgagcggtactgggcccaggagcaggagccactgcagactgggcttttctgcatcactctggtgagctgtgggagttttcaaggaagattcccagggtggaaaggctttgggttgggcctaaaaggttgaatgatttaacccacagtccactcatactgcaggaaaccctctggtgttagcctgcaaatagttagaacttamtatagggatagcctttgcatttttattttggctacaatcagttaatctctgtcatgtaaatgtgcctggttaggttgttgaaattcttacttctcttaccatttcaaaagagcttggggaactctctcaagtcatacatacagttagtacttaataaatgcaataaaagtttcattttagaacaaaagacatctcttttcattgcaaaagggcttgtgtttttataatagttcctcttttgctcctgtgtcaaatgtttccttaatgaaagctttggggaaagtttgggctatatgaatttttaaaatgttttctgtatttgattttttaatcaggaatgctttgctttctataaatgtcttctggtacctatgatctttgttctcctccctcttcttacttgccccaccccccttactcagataaaggagaagtggctgaatgaggacatcatgctcaggaccctcaaggtcacattccagaaggtactgtgacaggggaggaggaggtaaaggggctcctgaaaggggagaggtttcctctcctgtaaaaatgggcatcatactagtacccacttcctcagttattgtctggtagacataaatggaagatgcctagaagtgggcctggtgtatagtagatggccaattaatgcttttttcttttttttcctaagtcttttgctcatctttttctgtgtttcaggagtcccgttctgtgtaccagctacagtatrtgtcctggccagaccgtggggtccccagcagtcctgaccacatgctcgccatggtggaggaagcccgtcgcctccagggatctggccctgaacccctctgtgtccactgcaggttttggaaatgggyttcaggagggtctggtgaggcagaggggacagagcatggaggggagtacagggcatggggctagtcttgtagtctgagtgcctattttgagaacccttgctcaccctccatggactgtaattgtgagcacttgttcagcacagactcagctggggaataagcacacagctsytgctcaacaaaatgtaagtgattaaaaaggttttccttgttcagatataatctgaagattctgggaatcaagaggctctgcaggggatccatcaggaccctcacccccatccccaaatgccccatctaaaaggggttgtggtcaggacctgaccaggcacactctgattctcttgtcagtgcgggttgtgggcgaacaggcgtcctgtgcaccgtggattatgtgaggcagctgctcctgacccaggtacvatrcargcatcctgtgtgtgcagtgtgctgcccatgaccacgtgtcctgctcaagtgccttgtctgtctgccccagatgatcccacctgacttcagtctctttgatgtggtccttaagatgaggaagcagcggcctgcggccgtgcagacagaggtgaaccctgggtctcctaatcttcagggacagtggcccactgctgtcatttgcccctgccttcccttcttgatggtccctcaccccaacaggagcagtacaggttcctgtaccacacggtggctcagatgttctgctccacrctccagaatgccagccccsactaccagaacatcaaagaggtacagaggctcctttcccactctcctgtccaccatcagcaccctcagagaccaggaccccgagcagggtccagcccccgggactactgggagcaggcactgactatgacatccacctgtgccctcctccaggcatccttatcaggctctcccatcttaagctttctcccagagccccttgagaggcctggccagcttcctccctcaggagcctcccctcctgtttttcttcagaattgtgccccactctacgacgatgccctcttcctccggactccccaggcacttctcsccataccccgcccaccmggaggggtcctcaggtacccggctccatccccggattcttccctgcccaatttctcaggctaaccccttcttcatccttggaacaccagtccgttccttgttcacttcgccaagtgttcgctggccctttcttcgaattgagctctgggaacccaccccaagatgattcaattatcccaagatgattcatttaccccttgcctctgcctctaaggcttgccctgccttctgagttaggcctttcctggatcctctaatcaaaccttaattcaggtggctcacccctgtaatcccagcacttcgggaggccaaggagggcggatcacttgagcccagctggagaccagcctggttaacatggtgaaaccctgtctctactaaaaatacaaaaattagccaggcgtgctggtgagagcctgtaatcccagctactccggaggctgaggcaggagagtcgcttgagcccgggaggtggaggttgcagtaagccgagatcgcaccacggcagtccagcctgggcgacagagcgagatcctgtctcaaaaaaacaacaaaaaaaattcagcaaataattctagacgccgccttcttgtcaggccgcacgttgggtgctgcggacatgggattgagccgccttcgcagcggagacttaaggcccttgtccttgcggccatcccttcctgtcttctatgccacttccgcattcttttgttcagtagacgttgacacagaaatgaccacccctcaaaccaacactctgccccaaattaccctccaggctgaccccgttcctccttcatccccctaacttgcagggcgctagggacacagargcgaggcctccaacccaaggagccctccctcccatctagcgcaccgcctcggcgggaaggaagcccgtggtttgcgcgctgagcagcctccccactcccgccctgcccagcgccgccgtttcacttcctcccggccctccctgcctgcaggagcatctctgtgcccgggtccccgggccacgccatggctgacacctacgcggtggtgcagaagcgcggggctccagcgggcgccgggagtgggacgcagacggggacggggacggggacgggggcgcgcagcgcggaggaggcgccgctctacagcaaggtgacgccgcgcgcccagcgacccggggcgcacgcggaggacgcgagggggacgctgcctggccgcggtgagtcgaggcttgctccttctcagggcatcatcctgctgtgatccgcagggcggaaccatcctgcagtggtccgtcaggccctggcggccgcggggaccccagccgctagcctggccacgccccgacgctgatgtccaggcgtccctggccacgccccggaagcgccccctggcggtcgcagtcgcggtccaggggcagggttcctggcaatacttgtcttggccgcgcccaaaggctggaggccacgtccggggtgtgtgccttctcccgcccggcgccctcggctctccccttcgggcctccggggaagcgtccccgctaggggtggggtcttgggactccctggggcttccggagctgacccgtggggggtctsctgccctcagttcctgctgaccaaagtcctgccggatctggcgcctacgaggacgtggcgggtggagctcagaccggtgggctaggtaagtcaggtagagcctgggttgctgggactttgctrctttgagtgaacccaggagtctggggttgatggggcatggagcttagtcctgtggatgtggctgcagtgaaccaggaggacctggaggcggggggatggccttcttcatgtctgccagcytccacacacctcagcttctccatgagacccacggcacccttcttctcccaggtttcaacctgcgcattgggaggccgaagggtccccgggacccgcctgctgagtggacccgggtgtaagtctaacgccagttcctgcctgttgcctcttgtgagctcggactgctgatgccccggtgctgctgagcgccgtgcgcagaatggaaacagtgggcctggatcaaagttaaagtttctcagggtgggaaatgtgggggctttgccccaatgactgtagcattcaaggcttgaggctggaggaggtagctagggtatagtggctggtgaggctgcacagagcagattcaagaaagaagatcaggaaggggcatgacccctgagttatgaaggggagaagggacagatgagcttccggagactgctctcctcaccacacagcactagtccatcctcagcacctgagcctccctcacttggacactcaggggaccacacagagaagtggatggacacttcgccatccaggcagaactaagccaggcataaccacagccaagcagattaaccccaggcagaccgataaaaagacctccagataggcagacagacagatggaccaccaacctggacagacagccaaagcttcagagatacagtccacaggtggacaaagggatccccagccagagagagagagaccagccaacagcttgatagaccagtgcagccagagagaccaccaaacasagcccccaaaagacagacatctctgctagctggacagccaggtggaccccctaagttagattactagacagatataaacagatcccctgctgaacagatayacagagttctcagaccccacccccaccctcaggtgggctggctggctgacagaccttctggccagacagactcctaaccaaccagatggactgccagacaggcagacatcagccacatggaatcctgacatcccagccagccggccagactctcatcttgatgtcttgatggatggaccccagctagtcagacatgatcctccagattgacagacaagtcccccaaatgagtacacatctccagctattcagacagatggacccccagcaaatcaggacctatctaggcagaccccagccagacccccgccagacagactcccaaccagactgaccccttactattcacacagcctgccgagtagctgggactacaggtctaattttttttttttttaagaaatgagtttttgccatgttgcccagactggtcttgaactcccaacctcaagcaatcctcctgcctcagcctcccaaagtgctgagattacaggtgtgagccaccaggctcagccccctaagatttgaaacactttaaatggcccatggtagggttcctgctaggataaaacattaagcggctgttaaaagaaataaaaggaggacacgtctctgtgcactggtgtggacaaatctccaagtcactgcaaaatggaaaaagtataagatgctctttccctgaacctcaagggtcccgcccctctcactttcaggtctctggacctctgactgacactgtgcctgcccaggtccctgtatgcactgccacagtgccctgggccccatgtccacccctgtcctgcccttctctgggatagggctggccttcctctgcctctgcctggctgcatccatggtcgatctcaagtgccttggcatgaactccactctcctgcagccttcaatcaaggaatgatggggatgtgtacataccccaccccaccccttggcagggtgatgctgaggtgtggatttttaacagttcccagactttcccaggaggcttgggtttgggtgcccacagtgggagctggtgtgatatcataccttcgccggccgcctttccttcctgttctctgtgcccctactcccactctagagctgccccgtttctctgttttcgtgaaagagctgaccctgtgctgcctcccactctcccaatgcccctgccactcctgtgagcctgctgctggtgaggtcggtgctgacctctgtgttgctggataatgagtcatctatctctggaggagaagaaaggcaggtcctccacagccctgataaaatctccaagtctcccagtttcgggtccctctcctgggatgcagacccactgcctgcccagctggtacgatccacatgccctcttcttgggaataggggcatgggaaagtgactaaagatactgttctggctgctgtgttcactgtgagtaataaactgtccatttctccgattcagaggtctgtttttcctttttttcttccccaaagatggagtcttgctctgtcgcccaggctggagtacaatgtcgcaatcttggctcactacaacctctgtctccgcctcccaggttcaagcaattcttctgcctcagcctctcaagtagctgggattaaacgcgtgtaccactatgcccagctaatatttgtatttttagtagagatggggtttcaccacgttggcaaggctggtctcgaactcctgacctcgtgatctacctgcccctgcctcacgaagtgctgggattactggcgtgagtcactgctcccggccttggtctggtgttttatacacatgtgcatgtgatgtggagctgtgcaggccaccttgtcagcatgcgaggagggtccagtctctgcgccttcttggtttctgacttcacacccagtagcctcactcctggcccagcatggcaagcacagtttccactcaggcatttgccctggttattctctctgccttggatacttttctcctagattctgcctctaatatatttgaacatttacctcttaatattgtttcctgtctctcctgatcagaatgtaagctgcgtgagggcaggagtttttgtttggtttacagctactgtcccagctccgagaacagtgctgacacttaggaagtgtgcaggctgatttatctcacaccatttactccgggtttcctcacttctagtaaagtatgacaccttgtctcaaatattcttttcctctttccagacccatgtctttgctcatgtagatcactacttcaggctgacataaaaaccgttctcttgttaagaaagctcagcaatgggagaggcaatcctccacccgtctcttgctctcctacaggtctttcctggaggtagtgggttgaatggtggcccccaaaaagataggtccaagtcctaacttctagaacctgtgaatgcgaccttatttggaaaaagggtctttgcaaatgtaattaaaacacctggagatgaaatcatcctgtatttaggatgggccctaaacccaatgatgtctttataagagaaaagagagagagacgcagagacaaagagaagaaggtcattgagatggaggcagagatggggatgaagtgtctgcaaaccaaggaatgccaaagattgccagcaaaccaccaggggccaggagagaggcctggccgattctccctcacagacagtagagggaaccaccctgctgacccgtcagtttcaggctttgggacctcagaactgtaagagaataaacatgttttgagccacacggtttatagtcatttgttatggcagccacaggaaactcacacactgggtatccaggaatgcaaggcctggccgctcctgaactgggcatctcagagctgtgtttgcaataggacactgcagcaggtgatgtttccttctggatatgccctgagctcagggctcctcttctgcagtgcagcccactgggtgcacagcatctgtctgggctctcacaaacccccatgggatgtgggggtcaatgggaccgttgcaggcaccatactcgtgttgctttgtttctgacccagtaggaacagtgaaggctcagctgtcagtttccaagtaggatcggatctgatgatgcctccttttcacaggagttagttacttctccttttctgctttcaacatcccctgccttgacttctctcctttgtatggcatttgtttgtcttagaccgtgacgtcctgagagaaaactaggccccatttgtggttaggttggtttccaatctcaggggcagagagctgctttacataattgatgaaaactttgtttctgtttcctaactctcgattcagtgcttttttcacatactcccaagcttacatgtccttgctaccttcagaaacaaaacatggtattaaaagttgctgctggatattgggcagctgatatctgacctcatgaagcagaaggggagggtgaggaattgccacttgcaatagggatcccctgagcttccctgatactaacatggtgggggggggggcttgataaaaaacaaagggcaggctcaagagctcagggctgctgctgagagtctaatggcttctcagcccctggtaaccttaccctccaggccctactcccacctcctctcctgcctcccacccggtcagtgctccaccaaacttcactgccttactggagtgctcctccctaccctctccttcggcccagtctccttcatcccgggagacccagctcacatctcacctgccctggggatgtggggccttctccctctccagaatttctcttccctcacactgctcctcagagcacttggtgtccacttcatcacacccctgccctgggccggcaggatccgggggctacaggcaggttctatgggtcagggatgggtcttgctcctctttgccacctaggtgtttggagcttcccctgcacagagcagtgctccgcaaatgcttgtggatttcagctcagtcagtgtaattgctcagttgtgtaccagagaaatggtcttgttggaaagagcctgcagaatgccaactgcagcctcagcgaaggtgatagaaaatatcactaagcaacgatggcttatcactctttgttcaattatagctaagttcagcccaaacataaggtcaatatctgaataaactatgcagtaagtgggaattgtttcatttattttatggcatagttattttagaatatacaaaatggtcgaggagacatgaatccttaagagtgtatgaaaaagacaagtgtttataaagccataccagcatccaatcaatgtcagaagctttaagagctgagaaatgtccaaacataaagtgtacttgagaagtgatttccattggattccattgctctcaaacagaccctggctctgcagccttacttttgaggatgacttctccaacagatctgtctgcctgtctggggacagatgattgatgaggtcagcaagctgaacgatgtcacctctccagccccaagcctttttcaggtaccagaaatgggaatttttatattatctcatttaacatgtcttggcgagcaggaccccaggtttttaagtctttgggttctcccataggtttagcactgagttgttgatcaataaacattttttgaatttaataagaaaagaaaagcttggtgggaaagagctctaaagttgaactttctccaccctgaccttcaaaccagtcaaagagccccaccagggtttgggatcagtagctctgccactgccagccaatgtttcaaatttgcattgtcatatgtacagcagatgcctctaagcagtcagcatccagaatatcaacaattacttgcaatattttggtgagatagccgacttccccagaaatgtgcctactgtatacacaccatccccagtgttgacatttggaaaatgggagaatctcatgatctccttgaacctgggacaaatgtgtttggtcccttcctcactgaggctgaacaaagtccattccaaccctgcaatacagaaatgtggcccaagttgctgagtgagtggggaggaagtagtcgctgcataggccgctggcaactactcattcagaggcctttgttcgtttgattttgcttagacaaacctgaccccataggcacactcaattcatcagctcatgtgtcccatgtgccagcaacagaatagtgtgcctaagatgtgttctctaagtgactgaactttcctgcttttcaggcagtctagtgatgggtcaagagagcctaagagctatttgaattgaggaggattttgattacactagaataatcagacttcaagaaatttaccattaacaccaactatgtgcagctctcaccattagtgtctgtcttcctacacaagtttattgttaaattatatttgtctttttttttttcctggaaaggcaagttagatgtctaggggattttatgtctgataaatgcctctagttggagatgtattacaaagaaatttagactccccaggactgagtggagtaattagtgtatttctagaatggcttcaccatttgctggaagacagaatatgcttcatggccatctcctaccaatttttggctccttctttctcctccccaatgccccacccctactctttccaacatcagctatttttatgttttccccaaatctgaagcttcttgatatatgtagttttgaagagagacgcacaacactgttttcttctagatagctgagttctgtggttctaagatgaatagctagttctagctttaatgtggaattgaggacatggtgttttgggtaggtgagagacagaaaatcatgatatgttagaactagaaagcaccatgtttcctagatgagggaaaggggagaggatgcaggtagtggtggtgaggaactcagtcaggagacagttaccagtggatgtgaagaaggataagggcaacagaaatggaggtgcgactacaaagtggtaaaagaacattgactacctgctcagggccaatgacctgcaggcaagcaggtcaaagcagggagttcttggcaggtgaaatttataacaagatagagtgcttcttgcagtgtctgttcttttttttagggacagcgtctcattctgtcacccaggctggagtgcagtggctggatcatggctcactgcagcctcggccacctgagctcaagcagtcctcgcatctcagcctcccaggttgatgggactgcaggcacatgccaccatgtccagcctagtgtctgttcttcaggttagcaagagcagggtggatctagggctctgagcaggactggctgatcaaatgtcttattcacactgggaagctgttcccccgcatgagagcaagagataagcccacatcctgtgtggcctctggatgccctttgaagctgtatctgggttccagcttagggagctagagtcactgggagggcagagcaggcacaggagagtcagagttgccagtcttgctttggttccacaggtttaagggacagaatttgcttcagtggctttgtctccacctggtttcattcccacattcacacccacaggggtgacactcggaatgtgtggaaggaggagccagggtgttgggacagggcaggctgggggcaaggccagttttcaaccccatggacctgcgagggggtggcatgcattcagcccctgcctgtgtctctggtctggaaggaattgttggcattaaaggacgtgccaagggctaggcacactcagagagcagggtgcaagtgggaggcgaggaaggaggggatgctgtgcagggtactgggggcatgtgcagccgctcacctgacctgctggacaggccatggctcaggcaccggcctgcgaccagcacaggtggatcagattggtctcccagtcaggagttgggaagttgagggccaggagttactggattacccagaatactcagacttaaaaagcaagcggagaaacttgctgtgtgtgcttagatgtggacatggaaaggccttgctggaaaaaaaaagagcagaatgtaaagtatacgttgcaggagatgagtagacccagacgtggggttgtactgtgcctgagatgccatgggacaccctgttctggaggaccccgaatagccacacccagattcctgactcagggaagctgtgagataagaagtattgttgttcaagcttctaagattgggaataatttgttttacacagtagatatgaaatgtaaaacatgtcacctgaaaggacatggactgtttggggactcccctaaaatccatcctttagatcaggagcctgcccaggatttgctctcaccctctgggacctggtgactctcgtccaagatgctccttctcacctggctttaattctggggccagcctga

SEQ ID NO: 94399 - DNA, 134990 bp, Homo sapiens
  misc_feature (1)...(134990): n = A,T,C or G
cccttaatatctcagaatgtgacctcatttagaggcagggtctttacaaagtaattaagataaaatgacatcattagtgggggccctaatccaatatgactggtctccttaaagaagcagaaatttggatagagacatttaaggagggaagacaatatgaagacaggagacaatgaccatctacatgtcaaggagagagacctggaacaaattatttccctggcaaccctcagaagttgggtgctccgaaagaaccaatcttaggccaggcgcagtggctcacacaggtaatcccagcactttgggaggccaaggtgggcggatcatttaaggtcaggaatttgagaccagcctagccaacatggttagacctcaactctactaaaaatataaaaattagctgggcatggtggcgcgcatgtagtcccagctactcgggaggctgaggtaggagaatcgcttgaacccaggagacggaggttgcagggagccgagatcgtgccactgcactccagcctgggtggcagagtgagaccctgtgtgaaaaataaaaaaagaaagaaccaatcctgctggcattttgatctcagacttctagcctccagcattctgagacaataaatttgttgtttaagccacccagtttgtggtcctctgttatggcagccctagcaaactaatataaagatgatgctttaatgaatatattcgtatgtatatatttttcacaaagatgcaggtatgctggtagaattcaaagaagtaaatgtatcatctttcaaccaatgatactttacctcctcttcaaatttgctcagctgaatcaattatactccccaagcccctctcgcctggtcacagaatggccaacagcgtatcctgaacacatgaagttcttccatgcctctgtatctttgcacacgtcctttgctttgcctggaaagcccttcctcctgaaatgctcctgaaaaactttaatacaactactcatgtactgcctcctctgtggaacctactgtggtaggcagccactaaaatgaaccccaatgatccccacctcctgctattcacacctttgtgtattcatcacctttgtgtatttcccttttcttgaatgtggactgaatttattgactcacttctaataaatagagtatggcagaagtgataagaccatttctgagattaggttacaaaaagactgtggcttctttccatgggtgctttctctcacatactcttggttctcttgctctctttcttggtcactcacgttgcggaacgtcagtggccatgttgtgaggaagccctggggagagggctgcctatgtagggagagatcaaggccttctaacaaccacatgagtgaacttggaagtggatctccccccattcaagccctcagatgggattggcagctgacagcttgactgcaatcttgtgggagatcttaaatcagaaacactcacctatgccatgccaacatgcctgtcccacagaaactgtgatctagtaaatgtttatcatttttactttaagctgctaaatgctggggtaatttgatatgcagcaatagataactaatacattttccatcttccctctatcttttctccgagcttccagagttatttgggtttacctctagtagtgctcatagcacaatatactatttttatttctaagttgctctcccctactggactgtctccaaggccaggaaccctagctcagtcaacttcacatttattgtgtcttttttttttttagatggagtttcgctctttttgcctaggctggagtgcaatggcacgatcttggctcactgcaacttccacctcctgggttcaagtgattctcctgcctcagtctcctaagttgctgggattacaggcacgcaccaccatgactggctaattttgtatttttagtagagatggggtttcaccatgttggccaggctggtcttgaactcctgacctcaggtgatccacccgcttcggcctcccaaagtgttaggattacaggcgtgagccacacacttattgtgtcttatccaaggttcaagccaccatcatcacttccctacacagttgcaataaactccagactgggctacccaaatcccctagacccttctaattctttctcctcctagctttatgaaatctttcaaaaatgcaactctgatcacttgaaggcttaaaatctttctcttcattcttaagataaagacctaaattcttaatacagcctcccaggcctggcattatcttcctgtctcactatagtacctaacatgcttctggccaggcacagtggcttacacctataatcctagcactttgggaggctaggtgggaggattgcttgaggccaggagtttgggactagcctgggctacatagtgacaccccgtgtctagaaaaaaatttttttttgaataaagatacttccttcttcttctcagtataacaacaacactggcctctcagttcctcagctgagccatgctcctttctcagagcctttgcacacactgttccctctgctgggtatgctttcccccatcctcaatttctatttatcctttggatctcagctcagtgtcactttttcagggaaggccttcctgccttctattctaaatcaaagaacactgtagttttccttcaaactgcttacataatcaggattaaataattgggcccggtggctcatgcctgtaatcccagcactttgggaagttgagatgggaggatcgcttgaggccaagagttccagaccagcctggtcaatatggtgaaactctgtctctactaaaagtgcaaaaaattagccaggtgtggtggtgtgcacctgtaatcccagctactctggaggtttgaacccaggagatggaggttgtagtgagcagagattgcgccactgcactctagcctaggcaacagagtgagagtctgtctcaaaaaaacataaataaataaataaataggtaggtagtttggtatagtacccagcagagtccttctactcaggtggggatataacattgagaaaggaaataaaaacctaactattatacttcttaacagcatttcgtagatgttaaaatcttggcccgctggcggaactgtgaggttaaaaaagcatgggttgtgcagtcagacccagttttggatcccagctctgctctttagtagctgtgtgacattgggcaagttactctcctctctgttcctcaaatttctcagctataaaattaggatataataattatatctttcaggaaggttgttggaggaagtcaatgagataatactcataaaacactaagaacagggcttggccttagcaaatgctaatcattgttatccactatattttatctgtggttaaaaaaaaaagattgcccatttctcatgtggtactggaagaagctggggaatatttgtggtactgggaagttgtctgtgggaagttaggattgaaacagtgaaaaatgtaaggcctctgcctgtaatcccagcactttgggaggcctaggcaggcagatcacttgaggtcgggagttcgagaccagcctgaccaacacggagaaactctgtctctactaaaaatacaaaaattagctgggtgtggtggcacatgactgtaatcccagctactcaggaggctgaggcagaagaatcccttgaaccaagagaggcggaggttgtggtgagccgagagcacaccattgcactccagcctgggcaacaagtatgagactctgtctcaaaaaaaaaaaaaaaaaaagtgaagccagtggaagaaaggaaacaggagaaatggttgccagctatgttctagttggttccaaatgacagcagcaccagtttgtactgtctcccagaagtctgtgttcctactgtttacacatgcatcttcacaagccattgctgacagatgagatatgctgagagagggttacctgttcagattcttgacacctggcaacttgtgaaagctaatttttttggaatctggaaaactatcaaactccttttctttctcttcaccttattgggaaccttttggttgatcagagcctaccatgtatcagtcattcaaaagctataataaaataatgaattcagaactgcaacaaggaagtgactcaaggaccagggccctctgctgctgagactcaggggaaatacgtttcattaaaaaaaaaaattagaagaaaaaatccagtctgtctcgctggatcaaaaaaaaagaaaggaagaaagagagagagggagagaggaataaagaaagagaaagaaaaagaaagaaagaaaaagaaagaaagaaagaaagaaagaaagaaaacaaaagaaaaaaaaaagacagacaaatagttactctttcctgaagactcagtgttctcccaaggcctcttccttctttcctgaaggcacactcagatctggagcagaagctaggaagctaccctgagataaatcactttccccaccctttttaatcttgtgaaagagctgctgccaattttagaaattcctcctttgatcagaagataaagcagaacaatgctgcggaactaagttgatttctaagggacattcttctagagtgtgtagcctgcctggaagtgtgtgtgcatagaggaggggcggggttgggggaaagataggagttggaaggggggggggtgtacaacagccagtagctacagccgtaagaaataatcacatttgtttctagaattccccatagaatagaaactccatccaattttaccatccctgcggaggtgcaggcatgtttattacagcgctatgagggattcatccactccacattccccattgccctagccccctttcgccaacccccgtccctgccaaatcaggccaatttctttctttccagttatttgctgaaagttcaacttctcttagagccttctaattatgcgtatatcatataggctgataatttttagtttaggctgagaaatgcagcctaaatcagtctgccacatcagattgtgaacgtctggatggtgtggacccccttctcctactgcttaaaagacaatcttgttgtaaaacgctatggaatcgttcctctccccttaacatctttgtgccccagaagccccatctgtaaatggggataattttcctatatcttcccatggttacgtaatttttagatctaacacgtgaggaccaaacgctttacaagcataatctcattaaattctcaataagaatatattattatggaggttgcatgtgaaaatactttgtaatgtagaaagagccgtctggctgtgagttattatcagggggttatcttccttacctggctgttgtgaggatgaaacgagacgccgacctgaaagcgttttacgtgctatcaagcattttacagaaaccacgtgataggctactaattacccaccgtataccacctgacccaccgtgaggcctcggtaaatactggttggagtggacgagtttaagtcttgcctgttcctttcagtcttccaatcacaaagtaatctcggcgccgccaggggccaagacacaaatctgggaacctcagcctagatggaggagggtgcggggtcccgggagaggggatgagaacaatagggtacttcagtgcccgggccctgtttagcgggtcttcggactcagggcccgaggggcggccagctggggtgtccggagagctcccctccccaggtctggggtgtgcacggagaggcgtccagagcctgctcagcattcctcgggagagagccagaccctggtcccccgggcccgtgcgccccagcgccccagctcccttgctcacgccaccccggcagcgtccaagccccgcccgccagctcaggtaggccgtccgcgccagccaattcgcaacaagtccgggcggggaaggcggtgcttccctgtccggaagtgacgtgctgcgcttggctggctgtggagtcggccgaagctttcggcggcggctgagccagctgaggggaaaaatggctcggactgtggcggcttcggcggctcaggttgtggtagaggcggaggctcaggcagcttgaggtgaggagcggtcggtgcggctggggacgatattcggggtcctgctctgcaagggtggagaggggccccggggttcccgggctggaagggtctcttgtcgcggcccccagtgccttgggtgcccgcgtctgaccctccatcccgtgctcttggcgttgcccagcccgactcccccctccctccgggccttgcttccacccaggccgtgagcaagtsstgcgctggaggtgcgaggagcccgcgtccccaccaggcccctcttctcgggagcggaggtgcgccagggagttagttttgtcccacagaaggagggcagsccccccggccgccggcccccctcccccgccttgtcccgcgggaccgggctggagccgcagtggccggtcctattttcttggcagattgttagttctggcgagtgtgtgtgttgtacttctcagtgacggccccttctttcacctcctgtcccatctctggctctgggggccaaggatactttttcttcttcccggaccccccactcccaccgcgttgcctttagccgcgaatccacttgctttgggaacactattctttcagtgtgtatttagcgcatcatccttctgagagagcggtcagattaaaaaatactagcttaactcttcctgagtgacggaggaatcataaataattgaagaaaaaggcacatacttattttcctcactgaatttctggctttaaaaacgacattctctagctgtggaattattttttgggggaggagggattgaggagggaaatgaggaaggagaaactaaggaaaaaagtctggacataacgtggaagagagagcctgttgtagttcttttcctatactggcccgatagaaattgaggttataattatattcttattttgaacagtgggggtttgaattaagtgaaacgaaggaggcctgcctctttgaacaagattagttattaaagaatgtcctgaaatctttcctggtgggtttcaggcagaaaagctctgttgggaaaatttttaaatctattgtagcatcaaaggccacagcatataagagatgcaagaagaagaaagctgtttgtaggggaacggtgaagacatagtagaaagagggaaggctgcacagaagtccaggaactaattccaggagagactttgtacctttgcctccttggcttgtggttcaagtctccacaagagactcctttagcagctctgccatagttggggttggtgctcttttttttttttttaattgacatggggtctcactgtgtcgcccaggctggtctaccatgcccagcagaatggtgctttttttttttttaaatttgatctaaccttatctggacaggatggtgctcttattcacagcagcaaattagacgaaaggaccctagttgaagtatacagattttatttttatataagatatttgtttagtatcaagacagtggttacatactgaaaaacaatgtaactgggaatagagagattttatttgttaactcagatttagttcaaaagtgattttacgtaggtagaaagcacatatggagtttcttccataaattccgtaattttggctgaattaatacattctaaagtaggttttttcttatcaaartgtcttgctatttgtgttttatatgcgtgtttcytgcagttttctttgcaaataacatgttttaatgttttcatcacaggttttacaatttttttctgtttgaatctcgctctgtcgcctaggctggagtgcagtggcacgagagctcactgcaacctccacctccagggttcaagtgattctcctgcctcagcctcctgagtagctggaattacaggcacgcgccaccacacatggctcatttttgtgttttttcaatagagactggtttacactatgttgaccaggctagtctcgaactcctgacctcaagtgatctgcccgtcttggcctcccaaagtgctgggattaaagacttgagccactgcacctggcagttttttctgttttatagaatacaaaagctggcatgtttgcattgaggaattttagaaactaactttttgtaatgaataactgtatactaagtttgtttcttctgcaattaatagttctaaaattttcaattaattgaagattgcttgcattaattcccatgtccaggactctttctgtagcacaaagttttgcatttaagtaagcacattcaataagtgaacttatacctaaagagtgttgaatttcctgagaactcagagttcttatagagcatcagagcagcagtagtgcaaagcattttttgtaacttgtttttctttgataacatgaattattcttttttttttttttttttttttttttgagatggagtctcactctgttgacgaggctggagtgcagtggcacgatcttggctcactgcaacctccacctgccgggttcaagtgactctcctgcctcagcctcccgaggagctgggactacargcgtgtgccgctatgcccagctaatttttgtatttttagtagagacggggtttcaccatgttggttggccaggatggtcttgagctcttggccttgtgatctgcccacctcggcctcccaaagtgctgggattacaggcttgagctaccctgcccggctctttttttcttttttgagacagtctcactccgtcacccaggctggagtgcagtggcgtgatctcagctcactgaaacttttgccttctgggttcaagcaatcctcctgcctcagcctcccaagtagctgrgattacaggtgcacaccaccacacccacctaagttttgtattttggtagagacggggtttcaccatgttggtcaagctggtcttgaactcctgacctcaagtgatccgcccgcctcgccctcccaaagtactgggattacaggtgtgagccactgcgcctggcctatgcattgtattaatttagcatattccaaaaataatttaagacaggcaaatgataaatgtggatgtttctggtggtgcatcacattgtaggtgatttcattttagtagttgtacctgcatagggctaaaaattaaccctctcaaagctctgagagtgccggagggcctgaaagagtgcctggtacttcaaaggttcccagggataagaaaaatgaatgagacagtgcttgctctcaagaatttctcatccatttggaagacaacgtacattttataacagtataattataagggcaggctaaataggatatggtcacctgggctgggagatggaaaaggaatgagggggtttgaggaggaagaggatgctcaagttgagtcttaaatgattaattccttctattcataagggcaggatggataaacgtgatcaggttctaggccctgctctgcttctatcaagcggtgagatattgagcaaactgcttaatacttctggtatccattttccttattcaggattcgactacatatataaagcagtgctgtacatgagaaatatgtgagccaaaaatgggagtcacataggtaggagattttacattatttttttcccctaaatcttttaaatctggtgtatgttacacttggtacatctcaatttggaacagccacatttcaggcacttaatagctccatgtaactagtaactgccatattggacagtatagatctagaggctgggtgcattaatgcatgcccatagtccagtgctttggaggatcgaggcaggaggatctctcttttttttttttttctttgagacggagtctcgctctgtcgccaaggctggagtgcagtggcgtgatctccgctcactgcaagctccgcctcccaggttcacaccagtctcctgcctcagcctcccgagtagctgggactacaggcgcccgccaccacgcccagctaattttttatattattttagtagagacagggtttcacrgtgttagccaggatggtctcaatctcctgaccttgtgatctgcccgcctcggcctcccaaagtgctgggattacaggcgtgagccactgtaccctgccagcaggaggatctcttgagcctaggagtttgaggctgcagtgagctatgatcaccactgcactccagcttgggtaacagagtgagacactgtctcaaaaaacaaccaccaccacaaaaaagatctagaggctattctgtcttggttctctgcttgaaaaaggaaaagggactccaatgagaaaattatcactggtaatttataatttgtaatcattttgatggtactcatatatgatgttcttttgatgagaattatggtcatacttgcaaatattgctgtaagtatctttcaggttgttcataggattatggttgggatgagaagaaatgtctttgttttctctgcatctgtagtggagtcatatttttgttatctttattttgttcatttatgtatactttgtatcctttttttctacagtatgttatttctttttttctttcttcttttttttttctaatagagatggtgtctcactatgttgaccaggctggtcttgaactcctggcctcaagcgatcctcccatcttggcctcccaaactgctgggattacaggcatgagccactgcactcggcctgcagtctgtttttctaatgtaatggatttaaaacacaatgagagtgcatatggacattttagaaagttaaaaggagaatttatacaattttaaactaattcttggatttcttaaaattttaaacttagctatttgggtacaaaaacaaatgggatttataaatcctcttttaatagatttgaaggcagttattgttggcttagcaacaagtatttatcttttaaccttgagactgcattaagatagtgtataattaacatgcttactgttaaacataaggctttctgttagtattacagtataacagttacattattgatatgactgatgtgcaatgttggtgcacttaatttgctgtgcactgagcttggttaaaaaacactagtggctaattttagacaagatagctatgactgacaataatacatctttacacttggattgactgatggttatagcttagctaacactgttttccctccaagaccttattacctgtgaggtaaatacagcaagtattctgattttgctgaggcccaaagatgttgtgacttacttagcataataaattagaagcattgcttgaattcaggtcttaacaatgctaggcccagtgttctgttcttttttttttttgagggaggttctctctgtgtcgctcaggctggagtgcagtggctccatctcagcctactgcaacctctgcctcccacacttgggtgattctcccaccttagccacccaagtagctgggactacaagcacgtgccatcacgcctggctaatttttgtgttttttgtagaggaggggttttgccacattgtccaggctggtcttgaacccctgggcccamcttggcctcctaaagcgctgagattacaggcataagccaccacgtccaccccagtattcttttcttttcttccttctttcttttttttttttttttctggagatgaagtctcactcttgtcgcccaggctggagtacaatggcgcaatctcagctcactgcaacctccgcctcctgggttcaagtgattctcttgcctcagcctcccgagtagctgggattacaggtgcatgccaccatgcccggataatttttgtatttttggtagagatggggtttcaccattttggccaggctggtcttgaactcctgacctaaggcgatctgcccgcctctgcctcccaaagtgctgggattacaggtgtgggccaccgccccgggccccagtattcttttcattgaatctcttcatatggcatttgagtgtttagatacatagtacaaaccagatttttggagtgtataaagaaatagttacttcctgcctttgggaagtttatattccaactaggagagaccaactaactacaatccatgtagcaaaaagtacttcagttatttaaaaaaatttgttacgggaaagaaaagatgtaagggataatatagtcaaatggaaaatagataagagttaattagacaagatttttgagtaaagagtttagattgtaaatccttactataggaagaagaagatgatgaggtgttaaggatagtgttatttcaatgcacagagaacaacttaagggaaaacttagctaagggaacataaaacgtaggtttagggaaagcttttctttttttttttctttttttttttttttttgagacggagtcacgttctttcaccaggctgtagtgcagtggtgcgatcttggctcactgcaacctctgcctcccaggctcaagtgattctcctgcctcagcttctcaagtagctgggattacaggcacacgtcaccacgcccggctaatttttgtatttttagtagagatggggtttcaccatgttggccaggatggtctcaatcttttgacctcatgatctgcctgcctcggcctcctgaagtgctgggatgacaggcatgagccaccacaccaggcctagggaggggttttcaaggcttattttttatttttattttttagatagaatatcgctctgtaacccaggctggagtgcagtggcacgatcttggctcactgcaacctccgcctcacaggttcaagcgrttttcctgtctcagcttcctgagtagctgggattacaggcgtctgccaccacatctggctaatttttgggtttttagtagagacgggatttcaccatgttggccaggctggtcttgaactcctgacctgaagtgatccgcccacatctgcctcctaaagtgctgggattacaggcatgagccaccgtgcccggcttgaatcgcctagtttcatctgactagatctcataatgacatttatcaggctagaattctgtgtgtattgaaatgtatgacatgatactacmattgttaaggattctttttgaaaagtcatacttattaaggtataatttacacttagtaaaattcatctgttttaggtgtaaagttctgtatagttctgctaaaacagatgaattacaaaaaacagtgacagttgtgtaactgccaccaccacaattaagatacaagatatagaatatttccatcactccaaaaatttccataattatgcccttttgaagtaaatcccttcagcccacccctcactccctggcaacagctcatttgttttttatccctatagtttggcctttcccaaaatgccatataaattggcatcacacagtgtatatagccttttgagactggcttctttcatttagcataacacttttgagattcaataacatgtctcttttttattaataaacttttttagaaagtttatagaaaaatcatgaagttaccaatttacagaaaatttgtaattgtagtacagagaaatcccttaaaccctgcacctagtttcccctatgtttaaatttatgtaaactactaatttttgctaatggtcaaacctgcaaggttctagaattaagtttgttgaaaatgggaaacaatatgaagatttcgatcaagacgatgactttctaatgccttttttttttttgaaatgcagtctcgctctgtcgcccaggctggagtgcagtggcgcgatctcagctcactgcaacttcctcctcctgggttcaagcgattctcgtgcctcatcctcctgagtagctgggattacaggcacgcaccactatgcccagctaatttttgtatttttgtattttttgtattttttaccatcccaaacaaactctgtagctgttaagcagtgactgttcattctcttctcaacccagcccctggtaaccactaatctacttttttttttttttttttgagatggaggctggaatgtagtggcacgatctcagctcactgcaacctctgcctcccaggttcaagcaattctgcctcagcctcccgagtagctgggactacaggcatgtaccaccacgcccagctaatttttgtatttttaatagagacagggtttcaccatgttggccaggatggtcttgatccacctgccttggcctcccaaagtgttgggattacaggcgtgagcccctgtgcccagcctctactttttgtctctgtgaatttacctattctagatctttcgtgtgattggaatcgtgtaatatttagccttttgtgtctgacttatgtcacttagcgtaatgttttcaaggttcatacatgttgtagaatgtatcatttttatggctgaatcatatttaatgtaccacattttgtatattaattcattgatggatactgcatttgttttcaccttttggctattataaacaatgctgctatgagtattagtgtactcctattttcagttcttttgggtatatatctaggagtggaattgctgggttgttgtaattccatatttaattttttgaagaaacactaaagtgttttccaaagtggctgtaccattttacattcccttagcagcaaagtatcagggttccactttttctacacccttgccaccacttgttgttttccttttttccagttatagccattctagtaggttgactagtgatattgagtatcttttcatgtccttattgataataagttggcttttttttttttttcttgagacggtgtctcactctgttgcccaggctggagtgcaatggcatgatctcagctcactgcaacctctgcctcccaggttcaagtgattctcttgtctcatcctcccaagtagctgggattacaggtgcctgtcagcacgcgtggctaatttttgtatttttggtagagacagtgtttcaccacgttggccaggctggtctcgaattgctgacctcaagtgatccacccacctcggcctcccaaagtgctgggattatagatgtaagccactgcgcccagactaaggtggctttttttttgttttgttttgttttttatgaggtcttgctgtgttgtccaggctgggatacaatggctattcgcagagacaatcgtaatgcagtatagccttgacctgataggctcaaaggatccttctgcctcagcctccagagtaggtgggagtacagatgcatgccactgtgcacagttaatggtagcaacatactgatgcttgtttcaacaatggtcaaggcagggtgatgttaacattttttaaaaggaaaaataattggatggaaacgtattttaaaatcgctattatatgctaagcattttattatataattttatttaactctgaaaacacagtattatctgtgttttacagatgagaaaactaaagacaaagggagatcaagtaacttactttaaaaatcacacagttggcctggcagtgtggctgatgcctgtaatcccagcactttgggaggctgaggtgggtggatcacctgaggtcaggagttcgagaccagcctggccaacatggtgaaaccctgtctctactaaaaatacaaaaatcagccgggtgtggtggcgggcacctgtaatcctggctacttgggaggctgagttaggagaatcggcttgaacctgggaggtggaggttgcaatgagcggagactgtgccactgtactccagcctgggagacagagcaagactccatctcaaaaaaaaaaaaaaatcacacagtttataagagggaagtctgatatttgcttgctgctacatggttctttctcctgctatcactgttatataaaactatgaatttaatccacatgttgatgtcatgtgaaagtaagacttttttagtcatagaaattgatggagtttgggggaaaattccagaagtagtcatgtcagtttttcgttattttttattattcactattcagggtttctcagttgcaactcagttttatcttttttctaccttaagccatgttaaatgcaggtatataccataacatttaacacagaagctttactgttatctgtcatgttggaattggggtgatgtcaaagtttatttaatgattcatgtcaagtgaatgaacaatgaagtagatcaaagttcagtaattatctccacaaagcagtactactgttgggattctgagttagattgaaaacttcttggtcagcaaaatgtctttcaatarggatctcttgctgtgactatatcccctttccttgtccccctcccacatacatacagtgatacacatatgcagacatagaaaattatcatggttagataccctggttgtgaatcacttatgtgtagaatgttgctcctaagggctgaagactactagtcttcaggaataatgactactagtggatattaagctatggtgcaaccrttgccttttgtcaaaatagaattaaggcctttattaatgtgcttatagtagttgtgcagtggataatcgttttaatagagtaatatggaggctaaagaatggagtgggggccaggtgcggtggctcatgcctgtagtcccagcactttgggaagctgaggtgggtggatctcttgtgcccagaagttcaagaccagcatgggcaacatggtgaaaccgcatctctactaaaaataaaaaattagccaggcatggtggtgctcgcctataatcccagctactcaggaggctgaggcgggaggatcgcttgagctggaaggtggaggttgcagtgagcctcctgaccttgtgatcctcccacctcagcctcccaaagtgcggggattataggtgtgaggccccgtgcctggccaggctcacctatttttaaacttgtgacgaagcttgggaagactctcctcttcacttttcccatggctcactcttttttatgtccaggttgtggctccaatttttttttccctgactaccctattgaaaattgtatccttgccgggcacggtggctcacgcctctcacgcctgtaatcccagcactttgggaggccaaggtgggcggatcacgaggtcaggagatcgagaccatcctggctaacacggtgaaaccccatctctactaaaaatacagaaaaattagtcaagcgtggtggccggtacctgtagtcccagctactcgggaggctgaggcaggagaatggcgtgaacccgggaggcggagcttgcagtgagcggagatcgagccactgcactccaggctgggtgacagagcaagactccgtctcaaaaaaaaataataataatagtatcctccccaactaaatcattctctctcacattactgttcttttctcctatttcatttactgtctgtatgtaccattttgtttacttgtttgaatcaaaccacttcttaacatttccattgctgttatcctagtccaagtcattattctagactttttcagctacctgttaattggtctcccagtttccatttttgtttgttatgcctattttccacagaacaatagggatcttgagcaatgtaaatcagatcacatgactgtgtctgcctgaaattcaccctgggcttcctattatacctaaaattcagtatagtatcccccatcttggaggtatatcaaatttaataattaaaaaagtttttattgatagatggagattttaagatttttttggagagatttctgatttttgatagttgagcttagtgatttaacttgtttctgatttttttttgtttcttttcttaatccacaatgtgatagtatgtttcttttcttttttcttttcttttctttttttctttcgagatgaagtctcgctctgttgcccaggctggagtgcagtggcactatctcggctcactgcaagctctgcctccctggttcatgccattctcctgcctcagcctcccaagtagctgggactgcaggcgcctgccaccatgcctggctaattttttgtatttttattcaagatggggtttcaccatgttagccaggatggtctcaaacccctgacctcgtgatccacctgccttggcctcccaaagtgctgggattacaggcgtgagccagcgcgcggggctcctttttttttttttgcaatagagtcttgctctgtctcccaggctggagtgcagtggcatgatattggctcactgcaacctccgcctcctgggttcaagcaatcctcctgcctcagtctcctaagtagctgggacgacgacagcaacaacgactgctatgtggtgcactccaccatgcctggtcaatttttgtattttttggtagagatggagtttcaccatgttggccagactggttttgaactcttgacctcaagtgatctgcctgccctggcctcccaaagtgctgggtttgctggcatgagccactgcacctggccatgtttctaattttttttttttctttgagacagaatcttcctctttcaccaggttggaatgcagtggcgccatctcggctcactgcaacctctgcctcccggattccagcgattctcctgcctcagcctcctgagtagctgggattacaggcgcctgccaccatgcccagctaatttttgtatttttagtagagacagggtttcaccaagttggccgggatggttttgatctcttaacctcgtgatccacctgcctcggcctcccaaagtgctgggattatgagtatgagccaccacacccggccccctatatttctaatttttataaaaaaatacatcacaagaaatccacagggtaaaattaagttagattcgaatgaggaagtttcattgtgtcataccctcaacttggaaatgtgactgcatacttaacgtaacaaaatttggagaaaagaattaaactttacaagttaaatttaatattatagaaatctaagagttagarttaatctttttttttttttcttcgagatggagtttcgttcttgttgcccaggctggagtgcaatgtcgcagtctcggctcactgcatcctctgcctcctgggttcaagcaatcctcctgcctcagactcccgagtagctgggataacaggcatgtgccaccatgcccagctaattttgtatttttagtagaggtggagtttcaccatgttggtgaggctggtcttgaacttctgacctcaggtgatccacctgctttggcctctcaaagtgctgggattacaggcatgagccactgcgccaggctagaatgaatcttatcatccaatgtctaacaactttatgtacttgagaaattgaagctcagagaggtgaagtgctttattcaagttgaaatagctaattaataataatagggatggggcagaaactcagtttttcttttcttctaattcaaagtcctcatttgttagtttgtgatgcctgtatttagcaatttcttttttctttcctgcctcaggtttatttgtacaaatagcacaggaggtgaggaccccagccccatgcagacggcagcctgggcaggttgcaccagtccttgtgtcctcacgttggcaggcagatacctactctgaagcctttgtaggagcctgagcacctttgcgaacctgagctggaactgaagctggagttgcagcctgggccttggtttgatccttgtccttgtcgtttggccggcacaacccaagccccttggcaatgcgggcacaagcacgcttcccaagcttggggtgggcaatgtaggcaagtcgatggagcttgctgctgacaccctttgggatcttgggcttaacctcctttacaagggccttcatagcctcaccacgtggactgatggcctgccaaagcctgcatcttctttaggcccttcttgttttgcttcttggcaatgcacatgttcctcaggaatttggggtccaccccattgagagagtcatatctttgtgatcggggtatcttttctctttcttttgtctgatctttgcttttgttttcttttcttttgttccgttcaccttccgtccgctcccgtcccctcccgtcccctcgcgctcccttcccctcccctcccctcccctcccgtcccctcccctcccctcccctcccctcccctcccctcccctcccctcccctcccctcccctcccctcccctcctcttttcttttcttttctttttttgagacagagtctcgctctgttgccaggctggagcgcagtggtgcgatctcggctcactgcagcctccgccttctgatttcaagcaattctcctgccgcagcctcccgagtagctgggactacagacgcgcgccatcatgccccgctaatttttatatttttagtagagatggggtttcaccatgttggccaggttggtctcgatctcttgacctcgtgatccacccgccttggcctcccaaagtgctgggannnnnnnnnnnnnnnnnnnnttgcagcctgggccttggtttgatccttgtccttgtcgtttggccggcacaacccaagccccttggcaatgcgggcacaagcacgcttcccaagcttggggtgggcaatgtaggcaagtcgatggagcttgctgctgacaccctttgggatcttgggcttaacctcctttacaagggccttcatagcctcaccacgtggactgatggcctgccaaagcctgcatcttctttaggcccttcttgttttgcttcttggcaatgcacatgttcctcaggaatttggggtccacccccttgagagagtcatatctttgtgatcggggtttcttttcttttcttttcttttcttttcttttcttttcttttcttttcttttctttttttgagacagagtctcgctctgttgccaggctggagcgcagtggtgcgatctcggctcactgcagcctccgccttctgatttcaagcaattctcctgccrcagcctcccgagtagctgggactacagacgcgcgccatcatgccccgctaatttttatatttttagtagagatggggtttcaccatgttggccaggttggtctcgatctcttgacctcgtgatccacccgccttggcctcccaaagtgctgggattacgggcgtaagccaccacaccyggcttgatcgcagtttcttaataccatttctgtgccattttcgggaatgttgtgtgtggtgtggttcttggacttggccatgtctgcaccctaagccatggctcctgaagcacctagaaccggaagctatattcagcaatttttaagttgaatttctgttaatacctttagatttaagaatatttttyaaatataaaacttagtgggataacaaagccgatttctaaggaaatattcttcagggaatttcagtttctaactgcggcggaaaaatctcttatttcaggatagtttttattggaagaatgtcttagttcattttctgctgctgtaacaataccacagattgatactttataaagaaaataaatttatttggcttacagttctggaggctgggaagtccaagggcatggtagtactaacatccgcttggcatctggtgagggcgttcttgctgtgtcctaacagagtgcaggcgaccacatatgacagagaggaaatctggctgaactcatcttttaatcaggagcccattcctacagttatggtattaatcccacaattatgacattgtgtgagtgtactcccacagtcgtagtcatgaggactatgccctcctggcctaatcatctcttaaaggtcccacctcttaatactatcacaatggcaattaaatttcaacatgagttttggaggggacattaaaaccatagttgttttcatagttaccacataataattggctgaatgtttaaagtcaaatactgtatttgctataaaaggttgactagtgatgaggtttccataacagttgttttgtggccaggcacggtggcttacgtctgtaatcccagcactctgggaggctgaggagggcagatcacttgagatcaggagtttgagactatcctggctaacatggtgaaaccccatctctaccaaaaataaaacatttagctggttgtggtagcacacacctgtaatcccagttactcaggaggctgaggcatgagaatcacttgaacctggagatggaggttgtagtgagctgagattgcgccactgtactccagcctgggtgacagagcaagattgtctcaaaaatacaaaaaatacagttcttttgtggggattatttgtagttgttggaccagaagcaattatttttttcatatgttaaaagagttgtataaaatatgagatggagatgtacagtatagtaatgtagcttattcagcttgttaaattaagtctcctgttctgatttagattgacccacaatgttggatttagcttggagaatataactttactgtatcagcaatattccccaaagagcatcttcaaacacatgkttaaacaaataataagaggatccatatgtttctattacacctgcattattaatttatttatttattgagacaggggtctcgctctgttaccctggctggagtgcagtggtgcgatctccgctygctgcaacctctgcttcctgggctcaagctttcctgccacctcagcctcctgactagctgggactacaatcatgcaccaccacgctggctaatttttctattttttttttttttttttagtagaagcagggtttccttatgtttcttaggctagtctcaaactcctggactcaagcagtctgcccaccttgacgtcccaaagtgttcgtagtacaggcatgagccaccacacctggccaagcctgaacttttaactagctttcatcattaaatgaacctaaaacttttatgaagatcctctccgagttagctraactgtaaagtttgaggacacagtcttccataagaccactttcacttctgacaccaactgcaagtctgggggctggggaggttcccaaagtttcgataacttgctaaaaagatgccaggagaactcactgctaagagctattatgttcatggttacagtttatttcaaggaaaggatacagattaaaatcaaggcaaggagcccatagaaccaagttcaagagggtctcaaatgttggagcatctggtattcgctccccattaagtcaggaggtgttactctcagtatcagtatgtgacagtatgcatggactgttgccatccggggaagctcacttgtgcttcagcatccagattttcaaattaggacttcattaaataggcatgtttgattgatggattgcccacatagttgagctcagtctctagattggattcagactgatactgggtgacccaaagtccccatcctaaatcacatggttggcctttctggttggccaaccctggccagaaggacactcctgtcaagtatgacatagattacctctcaggagcagagggcacctgtctttgggcaaggctaaattctttaataggtaggatgtaaaattaaaacttacctccatggtttctttaggaacagactctgtagacaatagatggatttgatcctaactccatgtattaataagaaccgacataatttctttcaagtagtcatttaaactacattataacctcattgggtgaatcctctagtatatttttatcctgcttgggcttcactgaacttcttggttttgtttggttgatgtctttctttgtggaaagttctggccatttccttttaaaatatttcttctgtttcattctctctactctccttcttggactccaattacacattatattagaccatttgaaattgtcccacagaacttagacrtgctgttgtatacccttccccctctttttctctgtttcattttggatattttctattgatctgtcctcgggtttatcaatccttctgcttagtccatctaattaattattgattttgaatatatttttcctttccagtatttcttttctgtagttcctgttactatgctgaaatgtcccatcacttcatacatattgtctatcttttctactagatcatttaatatttttatcataatttttttttttttttgagacagagtcttgctctgtcgcccaggctggatggagtgcagtggcgcaatctcrgctcactgcaacctctgcctcctgggttcaagtgattstcctgtctcagcctcctgagtagctaggattacaggtgcgcaccaccacgcctggctaatttttgtattttaatagagatggtgttgcaccatgttggccaggctggtctcaaactccttacctcaggtgatccattggcctcccagagttctgggattacaggtgtgagccaccgcacccagcctatcataattattttaaagttactattttttttgagatggagtctcactctgttgcccaggctggagtacagtggcatgatctcggctcactgcaacctctgcctcccaggttcaagcaattctcctgcctcagcctccagagtaactgggattacaggcacgcgtcactatgcccagctaatttttgtatttttagtagagatggggtttcgccatgttgcaggctgatcttgaactgctgacctcaagtgatccacccaccttggcctcccaaagtgctgggattacaggcctgagccaccacgcccagcctaaacttactatttaataataattccaacatttggggcatctttgagtttgcttattttgactatttcctttactttkacttaccattggkcacattttcttgcttctttttatgtctcataatcttttwttttataccagacatyttttttttttttttttttttttttgagacagagcctcactctgtgacccaggctggagtgcagtggctcaatttcagctcactttttagtttttcatacttctccaaaactgtcttcttttaaaatcactaatattagggaggggaaatgtgactgctaatgagtgcagggtttctttatggggcgatgaaagtattctgaaacttggtagtagtgatggtcacacgcctgtgaatatactaaaaatatactaaaaacaactgaatatactaaaaacaaccacaatctctgcctcccaagttcaagcaattctccagcctcagtctcctgagtatctgggattacaggcctgtgctaccatgcccagctaatttttgtatttttagtagagatggggtttcaccatcttggccacgctggtcttgaactcctgacctcaggtgatccacccgcctcggcctgccatagtgctgggattacaggcgtgagctgccgtacctggcatgtataccagacagcttctataaaacaaaggagaacctgaagtttacttattttttacttaatatttacctccaaaattccatttattctgtctggccactaaattgagtaagtctaatttataagtaagatgagtctgtgctttgttgcagctgtagtttgattcagtttaccactgggtccaaatactttggggcagaattatgactttctcctcagcaggatttgggatctaagcactgacatgatttcagagatctgttttgccagctgagctgccagctttttaggtcgctgggaggttctctttgttctttaattgtgcttcttgcctttctgtgtctcaggagatctctgcagcaaaggagatctctgccttgctgctcttacccttgcctyaggagggcagctgttttacattctgtgaaggcctggaatgccgtggagrgctttttctcagctcttgcctccacagcctttggtagccaaaagcttggattacctcagatggatttctgtctgccacttgccaatcctcctttggaagataactgccttgtacttcagggaggcctacatacttcagatgggatctctttcagttcttctgatctgtcttcagctttcagtgtgctacctgtgtatttagtgaagacctgtaggagagttggtagatgggtacagatgggttccatgtctggggctccttgtaattctttttccagcacattagactactcagctttacctccaccacgccttagaattttaatctgtcatgctagcctacatttggcattaaaaatttcttaaaagtctggtttgtttcttcttatccccatctacagtacgttttctcctgatgctgctgcaccagggaagagagtagtgttgggcctctctctctattaaagggcyatcactttctgaaatttaattcattaggtgtttgtgtgttctctgttctgtgacatttctttttctttttttttgagacagggtctcactctgtcacccaggttggagtgtagtggtgcatgatctcagctcactgcaatctccacctcctgggctcaagtgattctcctgcctcagactcctgagtagctgcagattacaggcatgcaccaccatgcccagctaatttttgtatttttagtagagatggggtttcgccatgttggccaggctggtctcgaactcctgacctcaagtgatccacccacctcggcctcccaaagtgctaggattacaggcgtgagccaccatgcctggcccaaaatccccgtatttatcatctttattttgagatattaaaacatgcaaatgatgaaaaatttaaaactaccaaaatttagcaaaaagtaaatctgcttcctaccattggctcccagctgtccctcatttttagttattgacttagtagtttcttacttttgtcatgatagtcccctaaggtgtctcttcctttccaagtcaaacccctccatctgtgtttctgattgtatcctgttcaactgtatccagtttgtgagcgagtatatatcttctgtctctgtgcctctcagtctttttccccgaatccttcccttcagtctatggcctttcccattttaaacagccattctgataccacctcttcctatttacctctctctcctagttccctttgaaagcataatatacccttgttacttataattccttacttttcttttagtttttcatacttctccaaaactgtctttttaaaaaatcactaatattasgggaaatgtgaaaccctgccaatkagaaactctgctaatgggtgcagggtttctttatggggtgatgaaagtgttctgaaacttggtggtagtgatggtcacacacctctgaatatactaaaaacaactgaatagtatactttaaaagggtaaatttcatattaagtgagttatatctcaataaagctattattttaaacatcactgagttcttagatttagtgttttattccagtccttatcctgtgtcatctctctgtagtttctgacaatattaaccatttcctccttaggatactctgttccttgtatttatttgataccagtcttcatgtgctaatcgctctcatgatttttttcttgtttcttttttatcttcactctacacattctcccrgggcaatctcaactacttccatgactttaggtcttcagctgtacacttagataacgcctaaagatttatctctagccaaattgctctgttgagcccaaagccagtatttcttttttttgagacaggatctgctctatcacccaggcactagggagccttgacctggctcaagcaatcttcccacctcagcctcctgagtagctggaactacaggcccgaaccaccacacccagctaatttttgtatttttaatagagatggggttttagtgtgttgtccaggctggtcttgaactcctgggcttcaattcctgaccattcgccttggcctcccaaagtgctgggattataggcatcaagccaccgtgcccggccaaggccagtatttctatccccaagcagacatgaactgtatttctcacaattacttcaaaataggaatgtgttttggtctgactaaaaagggccatgtggctctgaagaagaattccgagatatacatatggatttttttcccttagaggaagaaattgacggcatattatttggcacatttaagatggcttctaaatactttaaaaatgaatgcaacaagagggggttaaaaatctattgtatctctytattatatctcttaggttaaaatactcattttgaatgtgatatttttgttccatattaatttcacctatttgtttaacaactacttgaatgaaagctttgttattccaggactagagtgctgggaatatagcagtaaaccagacaaataaatcccagcttcatggaatttatagcctagagggggaaatgcaggcaataaacaaaataaataagtaaatatatagtatactagatggtagtaaatgctaaggagaaaattaaggtaaggtgataggcagtggagttggagaaaattgcagttttaacttggttatcagggaggactttacacaartgtcaccttttcaatgaagacttgaaggaagcgagggattaagccattcagtgattcagcggaacagtctagtcagaggtaacagaagagcagaggccctgagttgggagcataaggtgttgaggaacaacaagggggccagtgtgatggaagcagtgcacagttacaggagggagataatggggggccaaatattagtgtgcctggtgggycattgtaaagattgtaccttttctctgaatgagttaggagctattgaaaattctgtgcagaggagtgacaagttctaggtttttcaagatcactccagctactgtgttgagratagtctgaaggtggggaaaggaggggttataaatgtagcagggaaacagtttggggaaggctatttcaataatccaggaaagaacaagagatgatgattaattggtctaggatggtattgagaacgtaatgaagaaatgtttaggttcagaaatattttgaagatagagcctgtaagtatctgatatagtgaccactaaatgttgttgccttcctgataagctataactgaattagaattttctaatataatagaaataagtaaatttactacctatgcatacaatgatgagagtgtataatcatttctctcactgattgtaatatcttactatagtagtttccccaccttwtccttagtaggatatgttccaagatccccagtggatgcctaaaacttcggatagtaccaaaccctatgtrtacagtcatgtgttgcttaatggctgggatatgttctaagaaatgcatcagtaggcaattttgtcattgtgtgaatgtcatagcaagaacttaaatcttgatggtgtaatctactacacacctagggtatgtagtatatagccttttgctcttaggctacaaactttatgacatattgctgtacatatattaaatgctgtacatactatagcatgttattttactaaatactgtaggcaattgcaacaattgttaagtatttgcrtatcwaaacatagaaaaggcacagtaaaaatatggtataaaagatttaaaaatgtacctgtgtagggcacttaagtatgagtgaagcttgcaggactggaaattgctctgggtgagtcaatgagtgaatagtgagtgaatgcaaaggcctaggacattactgtatactactgtagattttataaacactgtacatgtactatgctaaatttgtaaaaatatatatwtttttctttttaattaaaaaaaaaaatcttttttagacagtctcactctgttgatcaggctagtgcaatggtgtgatcacagcttactgtggcctggaagtcctaggctcaaatgatcctcccacctcagcctcctgagtagctaggaatataggtgtgtgccaccacactcggctaattattttttaaactttttgtagttgagaaaggtgatctcgctacattgcccaggctggtctcaagctcctgggcttaaggatcctctcctcttggccacccaaagtgctgggattataagcatgagacaccatccccagccatttttctttcyttagtaataaattaaccttagcttactgtaacctttttactttataaactttttaattttttttaacttctgacgcttttgtaataacatataagaacatagtacagctatacaaaaatactttatatccttattctacaagcggctattttctattttttaaattttaaatttttttttactttgtaaacttttttgttaaaaactaagacacaaacacacatggcagcctaggcctacacaaggtcaggataatcaatacagctgttttccatctccacatcttgtttcactggaagtcctcaggggccataatatgcatggagctgtcatctcctaggataacaatgccgtcttctgaaatacctcctgaaggacctacttgaggctgttttacagttaacttttttttttttttaaagtagaaggagtgtactataaagtaacaatgaaaaatataggaaatattactaggagtttttcatctctgttataacattataatcttttttctttttagagacaggatcttactctgtgctcaggcaagaggtacagtggcatgatcatataactcactgtaacttcaaactcctggtctcaagtgagtgtcctacttcagcctcccaaagagctgaaattgagtggctagaattgcaggcatgtgccaccatgcctggctaattttttttttttttttttaaagagggttctcactatgttgctcaggttggtctcaaactgctgggtttaagcataccccactcctcgacctcccaaagggagggtgctgggactacaggtgtgagccactgcacctggcccattataatcctgagggcccactgtcatatatatggtctgctgttggctggagtgtcatgtggtacatgactatactgtgttttttcctatatgtacataacttacgataaagtggttttctttttttttgttgtttttttacagtttctttctgttgcccaggctggagtgcagtggcacgatctcagctcactgcaacctctgcctcccaggttcaagggattctcctgcctcagcctcccaagaagttgggatcacagacgtgtgccaccacaccacgcccggctaatttttgtatttttagtagagacggggtttcaccatgttggccaggctggtctcaaactcctgacctcaggtgatccacccaccttggcctcccaaagttctgggattacagatgtgagccactgtgcctggccagtaaagtttaatttataagttaggcacagtaagagaataacaataagtaataatagaataattataacagtatactttcataaaagttgtttaagacttatgaattgttgatatctggaattttctatttaatatttttggaccacytttgactgtgggtgactgaaaccttggaaagagaaactgtggataagggggaactactgcattcattttttaatgttttacttgtattttaaaatgcagtgaggcagagcgtggtgactcatgtctgtaatcccagcactttgggaagccaaggcaggtggattgcttgaacttaggagtttgagaccagcctgggcaacatgcatggcaaaacctcatctctacaaaaaatacaaaacttagccaggtatagtgatgcatacctgtagttccagctactctggagactgaggtgggaggattacctgagcctgggaggtcgaggctgcagtgaactgtgatcatgctgcttcacttcggcctggcgacagagtgagaacctgtctcaaaaatacataaataaataaataaaaatgcagtgaatgttttacataaattgatcatgttatgtgcagtgctcattaattcacagatgatgaacatttgagaaactctattttataaagtttgttatagtcttatcctttccccatgtctcttaatgagtgacagcagtctccttaatttagcctctagattggcaaatgaaagggggacagtatagcttttatttgtattttttaatgttatcactaaaagataaactttccaagtcgaactttttttttttttttttttgagacagggtcttgttctgtcgtccaggctgaagtacagtgaatgatcttgactcactgcagcctcaacttgctgggctcaagtgatgctcctacctgtcagcctccagagtagctgggactacaggcatgcgccaccatgcctagctaatttttaaaatttgtgtagagatggggttttgccatgttgcttaggctggtctcaaactcctgggctcctcttgtctcagcctcccaatgtgttttgtgagtcactgcacccagccaagagtagattattctttatggttaagtaacgcacagaaaagtgcacaaatcatatatgattatttaacaaataattataaatamatacttgggtaaccagtcactaggttaggaagcagaacattgctagtaccccaaagtccccactatatttctttctgattataactttgtgagtaactactattctaacttttttttttttttttgagacagagtttcactcttgttgcccagcctggagtacaatggcacggtcttggctaaccgcaacctccatttcccaggttcaagcgattctctttctcagcctcccaagtagctgggattacaagcatgtgccaccacgcctggctgattttttatatttttagtagagatggggtttctccatgttggycaggctggtctcgaactcctgacctcaagtgatccacccgcctyggcctcccaaagtgctgggattacaggtgtgagccactgtgcccggctattctaacttttgataatcatttccttcacagttttgccataatgtaagcattcttaaataaaatagtttttcatgtttttgaactttatatgaatcaaatcgtgtgtgtgtgtttgtgtgtgtgtgtgtgtgtgtgtgtgtgtgtgtgtgtgtgtgtgtgtgtrtatatatatatatttaaaaatgggatctcaccatgttgcccaggttggtgttgaactcctgggctcaagggatcttcctaccacagcttcccaagtagctgggactacgggcatgccacacccagcgccttacgtgtgtgtatatgtgtgtgttttctgtctttcagttgctcaacctgtttctaagttttattgtacaactctagtggatccatttgcattgctatatagaattccattgagtgaactgtgttataataaaaaaaaaaaatcagatgattggtgactgggggctcttagataacttcaggatgggtgttggttgcctgaaagaccaaaacatgattagagggttagggaggggagaagtgctagagaccaattaccaatggccagagacttaatcaaccatgtctatataatgaagcctccattaaaacccttaaatgacagggtttggagagcttctgggttggtgaacacatagaggtgccgggagatagtgtccagaaagggtatggaagttctgtcccgccacctctaataccttgccctatgcatctcttcyctttggctgttcctgagttgtatcctttataataagtcagtaataagtaaactcttccatttggctgttcctgagttgtatcctttataataagtcagtaataagtaaactccacctgagttttgtgaaccattctagcaaattataaaacctgagttgggttcatgggaacccttgatttgaaggcaagtccaaaacagtacaagtaatataggaacccactacttgtgaccgtagtctgaaatgagggtatccgctggaatgcagtggcacaattttggctcactgcaacctctgcctcccgggttcaagtgattctcctgcctcagcctcctgagtagctgggatcacaggtgtgcgccaccacatctggctaatttctgtatttttagtacagatggggtttctccatgtcggtcaggctggtctcgaactcctgacctcaggtgatccacctgtctcagtctcccaaaatgctgggattacaggtgtgagccactgcgcctagcctttttttttttgttttttkttgttgttgttgttgttgttttgttttctagtagttctttttaatgtattagaaagattagctctttgtgataggaatagcaaaaattttttcttggtttattgcttttcactgacatttttatggttctattgtttttatttatttatttttgacagagagtctggctctgtggcccagggtggaatacagtggcacgatcttagctcactgcagccttgaccccctgggctcaagcagtcttcccatctcagactcccgagtaacatgtgccaccacgccctgctgatttttatatatatattgttttcatagagttaaggattcaccacattgcccaggcttggttcagttatttttattttagcttttcattgcctgcagcagtgcttgatgcatagtatacacccaataaatatttactgaggaaatgaatacattcattggtgcttttttgccaaacaaaagttattttaaaagatgtttatgtgcttgaatcttttacatatggcttctagattttgagtcatattaggaggcctttatgctgaggttacaaagcaattctatgttgtcttgttttcatgatagaatttctttacactgatatagagccaggacaatggttcacactgtaatcccagtgatttgggaggctgaggtgagatcacgtagggctaggagttcgagatcagcctgggcaatataaccagaccctgtctctacaaaaaatgaaaacattagccaggcctggttatactggtaatctcagctactcgggaggctgaggcaggaggatcccttgagcctctaggagtttgagattacagtgagctatgatgatgtcactgcccttcagcttcagtgatagagtgagaccttgtctctatttttaaaaatttaatctttttgtaacttatcctatgtggttgattgtgaacacatttctctctaaaatgttaagttttctaaatctagaatattaaggtaattagaaagtaygtactttaaaaattaaaaagttataaaggataagacctcatttaaaggctgtaggttggccaggtacaatggtttctgccagtaatcccagtgctttgggaggctcaggtgagaggattgctttgagccaggagtttgagaccagcctgggcaacacggtgagaccctgtctctrtaaaaaatttaaaaattagttggatgtagtagtacatgcctgtagtcccagctgctcaagagtttaaggcaaaaggattgcttgagcccaggagttctaggttacggtgagctatgatcgagccgctgcacttcagcctgcgcaacagagctagaccctgtcttcaaaatarataaataggccaggtgcggtggctcacacctgtaatcccagcattttgggaggctgagatgggcggattacctgaggtcaggagtttgagaccagcctgaccaacgtggtgaaaccccatctctactaaaaatacaaaaatcaggccgggcgcggtggctcacgcctgtaatcccagcactttgggaggccgaggcgggtggatcatgaggtcaggagatggagaccatcctggctaacaaggtgaaaccccgtctctactaaaaatacaaaaaattagccgggcgcggtggcgggcgcctgtagtcccagctactcgggaggctgaggcaggagaatggcgtgaacccgggaagcggagcttgcagtgagctgagattgcgccactgcagtccgcagtccggcctgggcgacagagcgagactccgtctcaaaaaaaaaaaaaaaaaaaaaaaaaaatacaaaaatcaaccaggtgtggtggctagcgcctgtaatcccagctactctggaggctgggaagtggaggttgcagtgaactgagactgcgccactgcactccagcctgggcgacagagcaagactctgtctcaaaaaaaagtagataataaataagacagtaagttatctgtgggacttaaaaaaataaaaataaaattttgttctcccccagaataacaggaatttgaggtattttattggcgtatggaaagagatgactgtggggaagataaatttttccttaccacccagaaagcaatgatacttgttcaccatgttttttgttcctgtttctctcttcataaactctaaccttgcactgttcactagatacctttgtctgctgagcacttgaaatgtaactagtccaaattgagatgtgctaatgcataatatgcacagatttcaaggacattgtgttttttaaaatcataaaatatttcatatttttatattacctgttaaaatgacaatatttttgatagattaaatatgtcttttttcattaatgtagctgtagaaaattttaaattatatgtgacatgcaattttttttttcttttttttttttttttttttgagatggagtctcactctgttgcccaggctggagtgtggtggcatgatctcggctcactgcaacatacacctccagggttcaagcagttcttcttcctcagccttgggagtagctgagattacagacacccaccactatgcctagctaatttttgtattttcagtagagacaaggtttcaccatactggccaggctggtctcaaactcctgtcctcaggtgatccacctgccttggcctcccaaagtgctgggattacaggcatgagccatcgctactggcctcattctgtttcttttggacagcgtcgctstaaccgaatcacatcaaatacctggacattcttttatttttgtctttgtgacaaatttttatagttcctaacaccagagtacttggtttctttcatcagatgacattttttccttccatgaatcagtagagatatgagaatattatcttgtcatgtactggggtttttccttttaacagagatggaacaacttttacttttagttttctattaccatctccctcctagtttttaagataatctgctcccccaccccacttgtttattctaaactcaaccatgttattttttagtaaagtttgaattattaatgagtcattttagcctgttttttctgtttcagaatttgagcttctctttgataaaaggaatggtgtcttatgttctctagtcattgatccattcattcaactgcattagaagtttgagagtagaagatgagaaaaagttcttgccctcagtgaaattacaaatttgctagtcatctggtgatgataaattaactgataaattggtacatgttataactaaatagtagtattaattacctcatgatataattaaaagaaacaaatttattaaaataaaataaccttatgattgaagatgaaagttgatatttatagtgggtaaattatactaatttagacacttacccagataactttaaagtgcattgtggagaattagtactgcctgaaattgagtcctgatttcaccacttgctagctgctgtgagactgagcagattacataacttgtatgcttaaatttcttcatttgtatactagggatactaatagctactttataaaatttgtgaggattaaattagttaatacattgcttaaagcaatgtttggcatatagtatctatatatctctatacatagatagagatatgcagatatttgctgcagttttatcagatactttccatggttgactgcagtcataattattttatttttgtttggtttttgttttattttttagagacagaaactcattctgtcccccaggctggagtgcagtgacacaatcatagctcactctaaccttgaacacctgggctcaagtgttcctcccacctcagtctcctgagtagctgagactacaggcatgctccaacacatccaaataactcttttttggtagagataggggtctggctatgttgcccacgctggtctcgaactcttgacctgaagtgatgctcctgccttggcctctcaaagcctcaaagtgctgggatcataggcctgagctgccatactcagcccataatcttttttttttaatttttaaaatttatatatttatttatttacagagatagggtctggccatgttgcccaggctggtctggtactcctgggctcaagcagtcttcccacttcagcctcccaaagtttaagaatcacctcgcccagcccatgattttatttttaatggtggtataatattcagttccagctgggctcagtggctcacacctgtaatcccagcactttgggaagctgaggcgggtggatcacctgaggtcaggggtttgagaccagcctggccaacatggtgaaaccccatctctactaaaaaaaaaacaaaaatgagccgggcatggtggtgggcacctgtaatcctagctactcaggaggctgaggcaggagaattccctgaatccgggaggcagaggttgtggtgaaccgagatcgcaccattgcactctagcctgggcgacagagtgagactctgtcccccacaaaaaaaaaaaaatcagttccatggaagtaccctaatttattttcctttaaggtttatattcatttggggggacaaatatctgtattgttcaactcaaataattcttttttagttttcttagttgtcttgaaattttaagatcaggaaaacatttagatgggtagcagcaccaacttgcttttttctgttttctggggtttaaatttaaattgtaaatgactgtctaacacagaagaagccaagaacttttaaattaattcttctgttttgggatatgcaaatggtgtctaaacgtttaactaaatagtttaattacccacttttgaagaattttaaagtagctacagccttgtgatcttcactgggttactttatgttgagaaaattttggcagatgatgtgcaggcctcattcaaatactagttatattgtctttctcagcttgaattaggggaacattagcattgaagttttcattttgaattaggatgtaggaaattatttcctgctaaatgtttgtcatcaaatgaagttttattttaaaaaattaatggagcatgtcaatgcagcagccccagaaaaacagctgaagcacagggttacttttggacaatctgttaagtccttttattgccattttagtatacatgcatgataacctcttggaaaactwaaatatggtaacttagctggtagcaatcagctcacttttactacttagagttgaatttactttagcatatactactttgggtgttggtactagaaatagagcaagcaaatacattggtgatgtgagaaaaacccatactcactattaaaatatatttcagatgattaattttatatctttatcagtaaatgagagttaacattcatttgaaatacttagaacaagtgtattctcctgtgaataaattattgtaaactaattttaaaaaatctagatccttctttcagaatagtgttacattgttcattaccagatgtggcaacaaggagaatacttaaataacaaattggcattatgcttgtggaagatgaattatatctacgtagcctttctctttgtaaaatgctatttttttattttttattttattttatttttttttgagacagagtttcactcttgttgccaaggctggagtgcaatggtgaccttggctcactgccatctctgcctccagggttcaagggattcttctgcctcagccttctgagtagctgggattacaggcctggcgtgccaccacacccagctaaattctgtatttttagtagagayggggtttcaccatgttggccaggmtggtcttgaactcctgacctcaggtgatccacttgcctcrgcctcccaaagtgctgggattacaggygtgagccactgcgtggctgctgttttgttttaatacatctaattttgtgaaaaataggcagtatactttggtgttccacaataggtgattacacttgatttatttttcctaccatatatccatactcttgtgccattagaaatgccttctttaagactgtccaatagccctcactccctcttgttaaaacacatgttcagccaggtgaggtggttcacgcctgtaatcccagcactttgggaggccgaggcaggtggrtcacttgaggtcaggagttcaagacyagcctggccaacatggcaaaacgctattagtctctactaaactttttggtctctactaaaaatacaaaaattagcygggtgtggtggcgagcgcctgtaatcccagctactcgggaggctgaggcaggagaatcgcttgaacccaggaggcagaggttgcagtgagccgagactgtgccactgcactccagtctgagcaacagaatgagactctgtctaaacaaacaaacaaacaaacaaaccccacgtgttcagtaaattaagtttcttattcattaagcaaggtacttttaaatgttgtggggaactccaaaaataaacaagtaggcctttgcacttaagcttattttagtctgttgggtagacacataggttcacagattctgtgttaatcaggacattttttgttatggcagaaactcattttaaactggcttaagcaaaaagggagacttactggcctgcataaatgaaaggttggctttgggcttagttggatccagatgccagtgtaatattagccagaatctgtctttcttcgttttatcttagctctgctttcttctggattggattcatttttaggcattatctcctcaagtggtgacaaagacggccacagcagggccaggcttatatctgagtttagtaagctcaaagaaaagctttctttccaaatagtttcagcagaagtccaggagttaactctgatgggccatatttggatcctctggagtggatgggaatgggggacaagggtagaaatggccagttctattttaattaactatgtgggataaagggagatcagtctccaaaatggaagccgtaggttctgcaaccagaagcaaagatgttgataggcaaaaacagcaaaaggtctacagaagtgaagaagagaaagctgtgataaaaatgttttggttgatctaaaaagatgaattctgataagagctgcttagggaaggctaaagagaggagacagtatttgaattgggccctraaggacaagtagagtttttccaaggcagaatgtgtaaagaaaagattctgtaggtccctcattggagaagtttgacagtgaaaaaagaaaattaaaatggaagctactggaatctaaacgggaatgttaagatttcccccccttcaatatggagaagacttaagcttttttgtggcacaggaccctaagcaagtaaataagttaacaatgcaaaggaggtaatcaccgatgatgaagtggagggtaatcattgatgatgaagtggaggggaaaatacatttatgtttagaaatctaaggttaaggatacacatggaggaagtcgccttagaaaggaaaagaaaaccgtttgttccctgaggataagtgaaggaaggtggtggtggaagttaaaacagaagtttgttgctaaatagtaaaaatggcttgcgctttgttttctaaaactaataagaaaaagtttatcagttatctattgctrtgtaacagaatcattccaaaatgattctgtgggttatcaatttggctttagctcagcttggtgatttcttctgctggtctcaccttcagtcactcatggagttgtggtcatctggagtgtggatggatggtctaagatggtggcttcactcacatgtttggtggttggtgctggctgttagctggcccctctcatcctcagtgagcattcacatagcagtggctgcatttcaagagacaaagaactgaggtagtaaagcctcttaggacctagatttggaactcctattcccacagtgtcacttccatttcattggtaaaagccaagtcataaggcccgcttagctcaagagagtaaagaaatagatccctcctctttatgagaggaacaagaaaatcacatcccaagtagtgggagtatgtgttgaaatgggaggaatttgtgctcctcctattccctactatccagccttttattttgaaaattttcagtcttggcaaccaagttaaaagaatttcaaagtgaatactcatatttgtatcacctagattctactattaacatttttctatacctgtctaatcacatatttatccatctatcctgctatccattagtttaccttttawaaaaaatgcatttcaaagtaaattgtaagagccaggcacagtggatcatgcctgtaatcccagctgaggcaggaggcttgcttgaggccaggagttcaagaccagcctgggtaacataatgagacctcccccatctctaaacgacaagaacaacaaagtaaattgtagacattagtactttcctctaagtgctttgtgcatatgtagcaagagttccatatttacagctttttcttttgatataaagtttacatacagtaaagtgtgtatattttaaatatacattgtgcccatgctttgtagtctaccacagaagggaaaatagttgtatgaaggaattgcaaaataatacwctaagaacattccaaggacattctttgaattcctctttcttcatgacctccttagtaaaaatttttttttttgtttagtattacctcaacacttaggattttcatttgtattatactaatttgaatttattttgggtttttccctacctccttgtctcacgtatatattgagcatatacggtagacaagcattgtgtttgctagaaagaaagaccatagaatgtaaacaggagctctcttgctttctaggtatttaaactggatgtatcacaaaccagattagattaataatacgtaccatttatttaatgcttatgcccaaggccaatgagaggcacttttatgtgtattatttcatttagtttgtgtactaatttagattgatacttttttattttaaaaattaggaaactaagacatacagaaaagttttcatttgcccaaggtcatataccttctttttattttttttgagacggagtctctctctgtcgcccaggctggaatgcagtgacgtgatctcggctcactgcaagctccgcctcccgggttcatgccattctcctgcctcagcctcctgagtagctgggactacaggtgcccgccaccatgcccggctaattttttgtatatttagtagagacggggtttcactgtgttagccaggatggtctcgatctcctgaccttgtgatctgcccacctcggcctcccaaagtgctgagattacaggtgtgagccaccgagcccggccagtcatataccttcttaaactaaggtgatgtgactccagaatccatatttaacccttttatcatattgattagaagcaggaaatgtgctcggtgttacagagtagctaagcaacctttcagttggtcgtattgcttcacagggtaatcttggtctgaattaagtgtttgtcttaaatagaggagtataaatttttataagctaaactatgacaaagtttaaaaattatcttctcatcttttcgtgaagaataaaaatatttaaggattttgaaaaggagaaattttggtattataactattgatttaactgcagagaatcagaatagaaatgtaattaaaactatatggccaattcagctataatttaatctttgagtgaaatattgcctcagaacttctaataagccttaacactttgtcttattattcaaatccatgttacattatacatttttaatatttctggaagattattaaacctttatcagttttgcacatagtattttgataaaataatagtttcctgttttattgactaggtattggatgtttttattgctaattggcttttgagcaatttaacaaatagcaaaagatcaaaaaccattttgacttgctatttctgcatattggtaaaccctgtctgaactgttgaaaatatgtgactagcacttaagtcatttcatgctaagaattctgccagaagtaccactggttaatggcagccattttgactgctaaaatgaaagcgtctaaagttcatttactgtgccagctttccagttgtgtcaggaaatggggttaaagtaatgtgtatctgaacatcttctgtarcccaacagtgtataaggtgttaagtgttccttcacccagattttatctgttttattttgtttattttgtagtatatttttctaagtggcttaaagtccaaagtcatatggggtaggttgcaaacaaaatatatttatgtttagaaatctaattgagtgttrtgtttatttttatgtataggccttgctattttggaagctacaagaaaaaaatagaggaaggaaggtttggtctttttagtggacatggctcagatatctagcaacagcggatttaaagaatgtccatcttcacatccggaaccaacaagagcraaagatgtggacaaagaagaagcattacagatggaagcagaggctttagcaaaactgcaaaaggatagacaagtgactgacaatcagagaggctttgagttgtcaagcagcaccagaaaaaaagcacaggtttataacaagcaggattatgatctcatggtgtttcctgaatcagattcccaaaaaagagcattagatatygatgtagaaaagctcacccaagctgaacttgagaaactattgctggaygacagtttcgagactaaaaaaacacctgtattaccagttactcctattctgagcccttccttttcagcacagctctattttagacctactattcagagaggacagtggccacctggattacctgggccttccacttatgctttaccttctatttatccttctacttacagtaaacaggctgcattccaaaatggcttcaatccaagaatgcccacttttccatctacagaacctatatatttaagtcttccgggacaatctccatatttctcatatcctttgacacctgccayaccctttcatccacaaggaagcttacctatctatcgtccagtagtcagtactgacatggcaaaactatttgacaaaatagctagtacatcagaatttttaaaaaatgggaaagcaaggactgatttggagataacagattcaaaagtcagcaatctacaggtatctccaaagtctgaggatatcagtaaatttgactggttagacttggatcctctaagtaagcctaaggtggataatgtggaggtattagaccatgaggaagagaaaaatgtttcaagtttgctagcaaaggatccttgggatgctgttcttcttgaagagagatcgacagcaaattgtcatcttgaaagaaaggtgaatggaaaatccctttctgtggcaactgttacaagaagccagtctttaaatattcgaacaactcagcttgcaaaagcccagggccatatatctcaggtatagtcttttcttactaacttctcaaacttagtataacacagagttcatatttgtgtacataatttgtgtttttttgtttttgtttttgtttttaagaaggagtctcgctctgtcgcccaggctggagtgcagtggcgtgatttcggctcactgcaagctccgcctcccaggttcacacccttctcctgcctcagcctcccgagtggctgggactacaggcacccgccaccacacccggctaattttgtgtatttttaatagagacggggtttcactgtgttagcaagaatggtctcgatctcctgacctcgtgatccacccgtctcagcctcccaaagtgctgagattacaggcgtgagccactgcgcccagcccataatttgttaagaaaaaaaaatatttttcactttgaattttgtttttctttgctctcaagtgtgctttgattctttgcttgtgtggcaaaggatgaaatgtgattaggccaattgaaaaattgcttgctattaatatttttctaggattgtaaataaaaagcctctaatgaaggaactggctgtcactgagaggcatttaagatattttaaatttgtctgtccatgtctcctcattacatatgctcccttctttctcttccttattcctttttttttttaaatgcaaataagraattttggtttttagccccattatagaaattctcacgcattttgttttgttgtttttaaccatgaatcaatgaataaataaccccagagagaagagcaatttaaaggactctccctttaaacacttttgtcgataaaagtgaagaatgaaatattaccattgcagatttgtgttttgcttttatatctgtgtatcctgggaatgtttaagcctcattctcactttaacgtgaattaatattcagctaattagatcagcacttacctactattttatcattgggagttaactagcatttagatggggaagggagggatggattttgcatgatttggatcggtttatgttgaattgttgactttatttattactattattattttgagatgaagttttgctcttgttgcccagggtggagtgcagtggtgcagtcttggctcactgcaacctccacctcccaggttcaagcgattctcctgcctcagcttcctaagtagctgggattacaggcatgtgccactacactggctggttttgtatttttagtagaaaccgggtttctccatgttagtcaggctggtctcgaactcccgacctcaggtgatcagcccaccttggcctcccagtatgctgggattacaggcgtgagccaccatgcccggccaaattgttgacttaaaaaaaaaacattttggatgtctggaaggaagagaaatcggtgttaagaaggtttagacagcatgatggctcatgtttataatcccagcactttggaagactacggtgggagaatcacttgagcccaggagtttgagaccagcctgggcaacataatgagaacctgtctctaacacaattacaaaaaaattagctgggcgtgatggcatactcctgtggtcccagctacttgggaggctgaggtgggaggatcgtgtgagaccaggaggttgagactgctgtgacccatgattgtaccactgtactccagcctgggcgacagagcaagactctatctcaaaaaaaaaggggcagttgrggggaaggcactggtccccctaattttcccatcctgcagggcccaggtcactgctggattcatattcgggtcaatttctaataggcagatgactccccagctgtgggtctctattttataggtttctcatgagagaaatgaattctgtgtttagtgcctggagtcaggatttgagatgtagtctggatttaagatgtcagctgtttatagttgtttgggaagggcaactgccttgaacctggagacagacattggggctctgataagttagtcttgctatcaaagaaaaggaagccccttgtcttgtagggagctgcgcttaggctcaagccttgcactggtagaaggcagagccccacaatgaatgcattgtagctacaatagattgtcttgaagttaatacagatgtttataaattaccttgattaatttaattatatcttaaattctgaacttcccattattgaaaagtcatttacctactgagagaaatagattatcccagctaagctgatattaccattccagatgcaatgtagtcatcatcttaagcaagttgaggtttctgggtaggtgggttatttactgtccaaagctccaagactgggattcggaacccaagaacttacatgctttttatctatgttgtacatactcaaaccgaactctttatttattattatttttaccaatatgttgccaaagccaaaggactcttctgcattttttttttaatcactgagacagaaagctcacaagaatcctatgaggccagagtatgacccatccctattttacagttgaggaaactgagatgtaaagaagttaaaaggaattactgttaatattttggtgtaataatggtattgcaattaattaaatgaatcttatatttagagatgtatactgtagaatttaaaatgtagtaaaatcaagtgaggtattggggtttggagggcttatagatgaaacaagaytggctatatgttgataattgttgaagccgatgatggatacctgggtgtttattctattatttactttgtgtatrtttgaaaattttcatgataacaagttggaggtcaaggagagggctgcagaactctttgcaagcagcaaagttctgacattcaaacccatctgactctaaaagccctcccttttttttttytttttttttttcacttttttgagacagtttctctcttgttgcccaggctggagtgcaattgcgtgatctcagctcaccgcaacctctgcctgctgggttcaagcgattctattgcctcagcctcccgagtagctgggattacagtcatgcaccaccacgaccrgctaattttgtatttttagtagagacgcggtttctccatgttggtcagattggtctcaaactcccgacctcaggtgatctgcctgcctcagccttccaacgtgctgggattacaggcgtgagccaccaaggtctgccagccctccctttttcaaactccagtgatacaacatgctattttggaaggagtaagttccctgtcataggagatattcaaatatggttcaaatggcttcccaaatttagttatatgtcacagtatcctagagagtttaggcctactcagtcctgatttggaggaaggggtgtcaaaggacagtatgraatttcagggggaagataaccagttttttcaaaactttcccccttggacctccatttgggacctcttgactaggttattttaaagtttattcatactcaggagcctataaagttgggaaaatgacaagacaaatagcaaatgtgaaaatagagtaccctgggaacagtttcttttcagctcaaaacccaaagcacaggttgttaatgctttcattgcgaaactcaacttcctgcccctgcttgacctttttagtttagattggtcactcctagttcaacacatgtgttctccaccctttcctttggtggggcaggggtgtgacacccatgtaagtctccctacatttattttttcttatgtatttaaaatatttgtcacagtaccatcttgatattttccttatttggggtgctttcagaaagtatcttggaggaataatgaggatgggtggtttcctaaagataggaagaagtttgcctagcaagatctgggtaatcaagtcacataggtgttacagagagctgctagttgctcaaactctaggaattaattaactaggctgccaaacaggattagttttagcagaaacaagttcctagatcttagttaaaaaatataggggaaggattaaagtagtaagcaaatggattatgagagatatgagtcagaaactgggtaagcaataatatgacttgatcaggggatcaatcagagagtggagctagattactacagtgtagcatatcaacagctttactgatagcatgctatctgaactgacatggcttaggctacttgccagtcttaaggcagtctaactgcagcatggctgaggaagtgttcatcattccattatactctaatcaaaccccatctaataattttgtttgagtatatcctaagaggggccaccagtaaggaaactgaagtttgtcttttttttttttttttttaagacagggtctcacactgttttacctagggtggagtgcagcagtgcgatcacggctcactgtagcctctacctcccatactcaagtgattcttctaatgcagcctcctgagtggctgggactataggtacacgccaccacacccagctaatttttttgggttttgtgaagatgaggtctccctgtggtgtaagccattgtgcccagcctagagtatgtcttgaaaagagaagactatagttttcaggatctagaacgtatgccatttgaggaactgttggaggcattttgtctgaagaagagaatattaattggagttaaatcactgaatctgagtttctttatctatgaaataaagttggctagactagatcctttcataaataatagttaaaatttgggaagttgccatgtggaagaggaagtggacttttttttttttttttaaggttttgtattttggacatacattttcaaaccaattcaggaagtagaatacctgaaagtcatggtgctcttataaaacaggatgaaatgttgatatactaattttttcagtacgttaaatatattaagtatactactttgtgttacattagatgacaatctgtgctagattataatagaaacaactggtagaatggtgggtttggtggctcatgcctgtaaacccagtgctttgggaggccgaggtgggaggattgcttgaggccaagaattcgagaccaatctggggaatgtagggagacccgtgtctatagaaaaaaaaaatagctgtgtgtggtgatgcacgctgggactacagctattctgtagtcccagctactcaagaagctgcagtaggaggatctcaagcccaggagtttgaggctgcaatgagctatgatgataaggcccttgtactccagccaaggctacagaatgagaccctgtgtctaaaaaacaaaggaataactgatagtaagggctgaaagttaaaatacattgcatagaaaaacttaaaattaaacaagtcctatttgtttgtttgtttttgtttgtttttttgaaacagggtctcgctctgtcacccaggctctggartgcagtggcgtgatctcggcacactgcaacctccacctcccaggttcaagtgattctcctggctcagcttcccgagtagctgggactacaggtgcatgccaccatgccctgctaatttttgtatttttagtagagttggggttacaccatgttgactaggctggtctcgagctcctgacctcaagtgatccacccrcctcagtccccccaagtgctgggattataggcgtggccaccgtgcctggccaaacaagtcctatttgtttatatatttttttctgtgaattgagaattcagtttagtagcttaattttaaaatctgttgtcctaaaaagtagaacaagaaccaatggggaagaaagtcagggagacaggtttcatggttaaatatctataaaggaacttagaaagagacatttcatgatggttgctctcaggttgtgttaagagaaaaactttagacatatttaacatagtttaattcagcaaagaagagatcacaaatcaggcagcccctgaagcagaatgggttcagggagactccagtgcagccatgtggtggaagatttatggtcagaaaaggaaagtgatgtacagaaaatggaaacgaggtacagaagcagctgaattggttatggcttgatgtttgccttatttgaacaggttttgaacagttggccacccttgattggccgaaacttggtgattggcacaagagtaggttacagtttgttgtacacatccagttaggttacagttcactatgcatggagaaattgttaggctgaacttaaaatgtgttaggaggcaggtttaggctaaatttaacagttgtaaacacaattatttgagacattgacttagaggcttggcatgcacctgttataaatgctatagataggattttgtttttgtttttgttttttttttttagatggagtctcactctgtcgcccaggctggagtgcagtgatgcaatcttggctcactgcaacctccacgtctcgggttcaagcaattctcctctctcagcctccctcctgagtagctgggattacaggcacctgccaccacacccggcaaatttttctatttttagtagagatggggtttcaccattattggtcaggctggtcttgaactcgtgacctcaggtgatccacccacctcagcctcccaaagtgctgggatgacagatgtgagccactgcgcccggcccagaatggatttttgtatgaaaaagttctaagccttcttgttagtgctaagatttcattttgtttgtgtacaggaagataaagtttggttttatgtagaccaaaatagggagataaactgaacactggtaataggctgactttggaaatccatggcacaattcattggcacggagcttttaatttttcacacaccattcatctctacttacaaacttttccctgatattttttattggaaaataatattgcaatgcctattctttataattacttcacatgcttaagtgttcatttcctgtaagaattttgtgctttgtggtaaaaactcaacacagagggtatttttcttctcactcagcaagcttacttcctgtttccatctagtgtcctttgttttattaataataacctaaatacattagttccaattttttgtgaccaaaaccagtaaaagacataatacttaaaactgtcttctggaaatttaagtttaaatcaggcttttagttaatagctgtgaatttaactactttgagcagatttcaaagaattttataatagatcaaattattgtcatagaggtggctttgcaaagttctttggttgtaaactctttctaaaagttaattgtattaacattttaaacatatccccattggcaaaatgtctattattaattttaaagaagagcaaaagttaaacaaaatgtgattttcatagtctgactgagtatatttgaacagtaaatataagtttctttgggaaaaagtccaattaaggatgtaaccaactttcttctgaaaagtaatatgtatttaatgtttaaagtgcatttattgaaaacttggtgttgtgttccatataatttctgggtaatgtggcatgaaccttgaacttgtataggtataaatcttccccatattcttgtaactactttacagagtattaatgataaatttttgtgaattattttaaaccttcaccactttccttaaacctccaaactcacctctgccaactctctaccattttttttcttttaaattgaggtcaaggccatccatgtgtgaactgctcacctcacatttccctcatctttctggtttgaaaggaagagatgttccttcccttttccaaaacttaactgttttttttgttcctgtttgttcctgtcttccccaaagttattactgtttgtttgtttgttttgttttggtttggttttgttaaggcagggtcttgctctgtcatccaggctagagttgtaatggtgcaacctcggctaactgcaacctctgtctcctgggttcgagccatcctcctgcctcaacctcctgagtagctgggactacaggggcatgccatcatacctagctaagttttgtatattgtgtagagatggggtttcactatgttgcctaggctggtctccatctcctggactagagctatccacctgcctcccaaagtgctaggattacagatatgagctaccacacctgtccttaaagttattactctttaaaaaggaatttgtactcactgcctttccagtctcttgctctccttctgttattcccattatgttatagaattgccaatccctcgaccatattcaccatttagcccttttgcttattttttaaaaattgactacatccttttcttgaaacttctgttgccctgggtaaatctacttcctatttttcttcctgtgatttttgactcctttttctttgtctagcctttaaacataggcattcctccaaaggttttgttcttggttgtttttaataatgctttacttgttttcccttggccagtgctttattcttgaggctccaatttacttaaattgaaagctactgatctagacccttgtagtaatgtgactccttggctgtctrtgctcgagatgctgtgatggttaattttatgtttcagcttgactaggccatgaggtgtccagatatctgatcagacattattctgggtatttctatgagcgtgtttttgggtcagattaatgtttgaattggtcagctggataaagcaaattccctgcttaatgtgagtgagcctcatccaattagttgaaggcctgcagaatgaccctcccaaaagtaagggggaaactcctcctgcttgactgctttgaagctggaacatcaatttttttcctacctttggactaaaacagaagcattggcccttcctgcgttctgcaactgcaccattgctctcctttgtctccagcttrccagctgcagatctggagacttgtcagctcataattgcataagccattccatatatacgaaaataaagagatgtcccagttctgtgcctcacagatacaggcccttatgtctcctttagcttcccaaagagactgtttcctcttaatggagcttgacccaaagactactgactgagaatttgctgtctcagtgatcctgatggatgctgacagcagttaacagagagagtgagttccctgtaaaaaattacagaaattggatgatcactaaatctttgtctctagctctggaatagaatatttctggagtagaacatttctagacgatgacctaaacatctacatggattttcaaacacaacatatttactagagaactttgtatcttcccctgcaaacttctttctttgttccaggtattggctaatgcattggcagtgttttcttattgattatcatatatctctttcatttgttaaaaaatgtgtgtggttatacagtgtgaggattgcacatactaatcatttgtggacttcaccattaaagaacttgggctagaaaggggagacaagatgtgaatgtgtataaatgcagtacaaaatagaaagtcttgagtgccacagaagaaaagtctgtgcaagatccatggagaaaagagatgatttgatgctttggtttgtttgtgtggagtttggaagtggggtgggagtatgggtgaagggaataggtgtaaaatatatgtattttttattccagaaagagcagagggaaaaacccaaaactgttaatgtttgaggtgaaatattggcagcctagctattttttaccctttacagactttaacatttgagttaactttccagattctattattaccttgatgtgtgactagataattattatattcagtttttgttaattcaaactcgtaacttgaataaaaggaaagacctaattcatgagagacacagcaaaaaatacaactattattattttttttaaatcctaaaatgccacctaaggagattcagaatctgtttttaaaataagtaaaacatgaagaacagttcttcagggaaagatgattcttgggtcaagcaaagctttaggttttcccagcactgctcccacaaaggtcacaacgttgtttttcacattgtgtttttaaggatttttaaggatattcttttgagagacagattagcatggtgattaagcatgtgacattgaagccagactgcctgggttgaaattcacactctgcctatattagctgtatgaccttgtgagttaattaactcatctgtgcctcattttttccataaaatgggagtaataatagttcccacctattagagcttttttgataaataagtatataaatgaatgcctgtagatatataattatatatatatatatttattattattattatttttttttgagacggagttttgctcttattgcccaggctggagtacaatggcacgatctcggctcactgcaacctccgcctcccgggttcaagtgattctcctgcctcagcctcccgagtagctgggattacaggcatgcaccaccacgcccggctaattttgtatttttagtagagatggggtttctccagttggtcaggctggtcttgaactcccgacctcaggtgatttgcctgcctcggcgtcccaaagtgctgggattacaggcatgagccaccgtgcccagccaaaaattaatagatttttgacacatgtggtgaaggaagtttaagaggaaggtgaagggaaaagtccagaggcaggatagcttgatttgtgttttataggaacaggatatgattcaagctaactggaacatagaaatctttagggagattctgggaaataagattggattagattktggcagatttggagtgtgaaaccagaggatttgctaggaaatataaaatcccattctttagagtaatatagtctatttgtcatagtggttgcttctgtaatacaaattgattgatatgtgattggtaactatgagactgargtcaatacaatggggaagtagcattagttcagacgtaatctttcccggcatattaactttttgaaataatcagaaacaaacttctcacaacctaarggaaagctttagcactatatgaagatattaggaaaacactgagaatcctgcagaagtgtcctcttattaatgaaaatgagtggcttcaagaacagtttcacattccacagtattaatctgtcagctataacgatgtttgcagaccaagaggctgcaaaaacatttctctttgaatttttttttttttttttttttttgagacagagtctcactttgttgcccaggctggagtgcagtggcacgatctcagctcactgcaacctctgcctcccaggttcaagcaattttcccgcctcagcctcctgagtagcttgaattacaagcacttgccaccacgcctggctaatttttgtatttttagtagagacaaggtttcaccatgttggccaggctggtcttgaactcctgacctcaggtgatccgcctgccttggcctcccacagtggtactgtacttttaacttcattgcaattggtgttgactagaagcatatgtcctgaagaattcatatctcaaatgaggaaacaagagccccagggttttaggcttcaaaggatgaaatgctaggtgcaaatgggagcagacatttaactgtgctagtatttttataaggtcctattatcgttttagttagggctttgattacagagttatattgatataaaaaattatttttatttttagagatggggcttcactgtgttgcttgggctggcctcgaacttctgggctcaagtgaccctcttaatttagcctcctgggtacctgggactacaagtgtgcaatgccacacctggctacattgatattcagtagtctaccttaactctcttttccccaggagacttgttacttttaattgtggttttgtagcactcgaagtatttatttttttctccaaatgtgtatatcacattctagcagaaagggctctgacatgttttaaaggaaggaaactcataaaggaattgttgacctaaattttcagtttaattttctcacacagaatcatcttgtgtgctgaggcaggcagattgcttgagcccaggagattgagatcatcctgggcaacatggtaaaaccccgactctacaaaaaatacaaaaattagccaggtggggtggcccatgcctgtagtcccagctacttgggaggctgaggtggatcacctgacctcaggaggtcaaagctgcagtgagccattgttgagtgactgtgctctaacctaggtgacagaatgagtccttgtctcaaaaaacaaagaaaaaaaagtctttttgtgtgccatagtcattgaaatctgttatagctcttgaaatatacgcactttgttctcactgaattttgaattgagaatgttccaattctaattttaaagggaatttatatttgaaatttgcaccaaatcaagttatttttatgtagtgtcaaaacactctcaatggactctgctgtttggctatgcttgggtggtgaattgatctccctgaaagctgtaaacagtttttgaccagacgtaaacttagctttttagggattgtgaggatgttagtataagtttattaacctagaaaatgcccattctcttacataaaaaaccatctttcttgggatttgggtcctagttgaatatatagaatttctggctgattagaagagtcccaaatgggcttgatctcttcatattcttaaaacagagagtcctttaatttcatttagttgtaaaatttctaaagtgtctattttaggaatattttgaatggaaaggtctttagcattccattcttactgaccggtatagcctgtttctactattgagcaagtaaaaccaaggaacgaaaataaggcttagttgacattacttttacaaagatagaaatatataatttaaaaatttgttattgatatgatttattttacctccattgctttgtacatattttcataaaaatgtgtttgtgctgtgctgctatgtagcattttgtggatcttccacttttaaaataaaaacacttttttaattacagaaagacccaaatgggaccagtagtttgccaactggaagttctcttcttcaagaagttgaagtacagaatgaggagatggcagctttttgtcgatccattacaaagtaaggaatttttctttataaatgttcatttgaaaaattcacttgaaaaccagtttagtgctaataattctaaaattttaaaaattttaattattttcttcttgtggctaacatttcaagtcaaagagttaattggcacgttatcacaaaccacagttgaacttgtatcttcacctgttagatttcttaatatttggaagaaaaaattgaggtcagacagtagacttctgatactgtaataaccagtgaaaaatatgacttacctgtaagcttcagtacacttaaaaaatacctacttttgttttagagagacttaattttgctgtaaactttctagcattcaaaatactgttcaacatatttaagagatgatattataataggcaagtttagaagagcaaatatattttctgaagtttagaaaaacacatttatagaatgttctctcaatcttaaatgtgtctaacattcattataggtgaggaaactgagactcagagaagtaacctaacaaactttacttggctagtcagtaatatcagtagtagaaccaactctcttttgcttctggttaagcatgttttcttcccattatatcactatattagttgtgacttctgttacgagtgctagaaacccatcttgaacttaaaaagggtcatgtattggttcacaacccaaatagcagatagaggaaggatgggatagagttcattaacagcaagattcaggaattcattactataaatcatccccccttccttcaattctccttgtccactccatttcctttccttcaccttcctcacttttcttcctctgcctttcctccatgcaatttaatggtctcagtagcagagaagaaaaaggagtccccttagctagccagataggaaacacccataggaggaaagagtggaacaacagtccttgtggccaagaggatgagagatctgttatctaaaaaagggaagtagatcaccactgggagatttttttctgaatccagcattgttttcagtgtggtctgctttaagcatagcaggatttggggttcccagaacatttttgagtatgtacattattttaatgttaaagaacttaatatttaatgagattttctggaccattggtgatattttattaaaactctgtcttcctttatgttaccttttaaccagcatttcttttcttcagaataccttaggaaaaaaatattatcagtagagtcactttttcttggcaaaggttactctccccagacaggccttgtattttcctgttaggccatgttaagtaactactacatttaagctttgcaagttgagaagttaggctctctgagacctaccttttttctcccatttgaatcttagagctatttatacaaactctgccactaattgaaaatgattgtttttgtttacacacacacacacacgcacacacttaaatgtgatacgaaactgcaaatggactaaagagagaatgagttctctttgtaattttattttcattagtagactatgactgcaacaaatactagagcagtaagaagtactggtgtttttgaaggcatgttctaggaacttcccctgtggtgaccatggagattgagatgaggagatgtactttgaaattagtggctctgttttttccattgtgctcattttgcagtggatttttaaaacaagtatgtaggcttttaattagagagccagttctttgctttttgagatctcctaaaattattcatttattcatttaaattcagctgtgaaattagtgtcaggctgtcagaatgatatttgtttatagttaagataaaatacaaaacagacttggaatttattaccagttctaggtattggtttttgttgttgtttctcatctgtgaaattaaagagttggactagtgatttcaaagatctctttcagtttaagattctgtaatacattgattcaggactacttttcattattactgagttttttgtcctatttctttccttttacacctatcataattgacaaagcttgctatatctactagttacaggtgctgaaaaggttctttttttttttttttgaaatggagttttcactcttgttgcccagggtggaatgcagtggtgcgatctcagttcactgcaacctttgccttccaggttcaagcgattctcctgcctcagcctccttagtagctaggactgtaggcatgtgccaccatgctcagctaattttttttgtatttttagtagaaacgaggtttcactacattggccaagctggtcttgaactcctgacctcaggtgatctgcccacctcggcctcccaaagtgctggcattacaggtgtgagccaccacacccggtcgagaaagttcatctaatagtgttaaataccagtagaagttattgccactttatttgtggtcctttaggataagatgagaaaccacattctacacctgtctttctgaatagctttatggtcatatagtattcatatattcatatatatactatttatatcctatactagtatcttgaccccaaaaacttcctgtatgttttcaaggacttcaactctgcatttggttaattttattctaaacagtgctgactgtactttcctatagaataatattaatttatttgaaatttttcaaaaccctcatttttatctcttttcttctttttatgttctgattttgcatgatttggttatctgtgcagaattttagtctgattgagcacacaaaagtagaaaaataaaccataaaggattttcatttctgcatagagatactgaatttcctgaactgtagagccacactaaatagacaaagccttttatttgggtgatagggaagtagaaattttagagaaaataaaaaattagagttaaatactctttatagatagttacttaagaacatcaaactgtaatgtgtggcttagagtatccataaaaataccttatctggtctatattgaaagtgaataatttactcagtcagcagttattcatttaataatttaatttgattttgtatgtttaaatgcttaaagatttcgctacaaaaaaaccccacaaaaaaacctcaattgtaaggaatcttaaatcttaggtgttttatggtttttggcaatttttataaagcaaacaaaccatggattagaagaaatcaattttacagaaaaaggtaattagtgtattttctggatctggtatcttccatggtaccaagtaaatacaaaaaagactcattataaaaacatttcttaaattgtgataaaatatacgtaacaaaaattaccattttaactgtttataagtgtacggttcagtgacataattacattcacattgttgtgtaaaagaaaggacttattttaagaaagggaaatgcaggtttcctcctctcaaaccaagctaagttttatcactggaatttttgtctaataaattcttgtcttagctatcaagaatttctgcttttacttttgtcatccttaacggtttctgaaaattgaaagcttgcttagatgtagaaaaaattctctaacattttatacattaatttcgtgatttgatgtgagcctctgtcttagtgtttgtattactataaaggaatgcttgagactgagtaatttataaagaaaaggtgtattatatttttaatattgttgcttaggatttcagtgcaaaaaccagatttattccttcactaactcagttatttgacaagaaggttaaagcacttactgtgtactaggcactgttctaaacgctttataaactaaattcacataattctcacaacaaccctatcaggtaagtagtagtattacccccagtttatagaagaaaaaacagaagcaacaaggaaatttaataacttgaataagttcacacagctaataagtagtataatcaggattcaatctaaggtaacctggctctagaggctatgcactaatggttacatgtgctacctctccagaacctttttctgtcatctcaagctgttttattctacttatgtgacctgattattttaatctctacagaagcaagtatacaatacttctagcattcattccattcatagccctatgaaaagcaggaaggaggactggtacctgtcttctaaaaagtcagtttaaaagagctcacaagtgtaaagaagttatcaaatctttgtcttacgataacagcagtgctggctggagatgagccatacaccacattcatgtatttaattttaaactgtgttgctcctatgaataccttcacaggcagttctttcaattccctaagttttagaaatcactttgagggaagaaaggccttgtagcactgtaaaaaaccattgtctatattttgttcattatctagcagccaaaaacaatgtttgtacgaaaaaggtccttagaagaaaaatattttttaagacaaccaacttgttatccttttggccattatagttttaggactacattgcctatagaataatttaaaaggtaccattttgtgtaattgtactgtgtggcaaaagatttttaagcagaggacctcatttaaaatgccatttatccaagcatgtgcttgggtagtgttgataatgttaccaaagatatcctggcagtagttcatctcttccttttccttgggtttcttttatttaaaaggaaaawgctggtatttggagtttcaacaggagctcattcattgcagtttcatgagctgcttgagttggacaaagacacagaactgagtggctgtaaacatgtaaagccttgttcagagccctcaaatgaagtttttttaaaaaagaatttaatttcttctttcttgtgaacagattgaagaccaaatttccatataccaatcaccgcacaaacccaggctatttgttaagtccagtcacagcrcaaagaaacatatgcggagaaaatgctagtgtgaaggtctccattgacattgaaggatttcagctaccagttacttttacgtgtgatggtaggtttatggttcctcaagcctctcgttttgctctgttagggggaaatgtttaaaatatcaatattatcattcttttaataaaccaattttgttatgtgtctttttggcattcatatggatagttttctcgttagaactagtggggaatcaggttacctttataaatagataattatctgaaaagtgctaagtaacttttgttaatcagtggctcttggccaaggctgaaaagcattagatagaaaagctaattataatttaattctttatttttctccttcattttatgacaggaagcatgcttgcttataaagagctgtcagtgaaattgaaattccagatatcttgctaagttcttctgtggagaagataattctcttttattttaatcctttcttccaaacttggtatgggtgtcctctctagagatgtattcccaaagtctgtaggaaattttttttatagttttaaaaactaattttatttccttgcagagtttattgcatttcataatatatattatcttaacgggattccaaccaaggaatgagatcctgtatttctacagtactttggcctaagaattatgctgtttttattctttaatggttatgactaggaatgtgtctaatattcagatacattctttctagctttgtacttttgaaggccctttgaaaaaatataaatctgaaacagaaaaccattagctactgtaacaattattcttttagttgttaaaggaaaagttttgtgtttttttgttgttgttgttgttttttgagagagagtctcactctgccacccaggcaggagtgcagtggcatgatcttggctcactgcagtgagggtgacagagttagaccccatctcaaaaatacagcctacctgctgtatttttatttttcattggaaaatataccaggcaaatgtcaaacatttaaaatggtgaatctttttcttataattcattttaaatcattgtttgctagatactgctaaatatcatctgtgggggattgtttccaggacccccttcagataccaaaatcccaggatgctcaaatccctgatataaaagacatagtattatcatacaactgatgcacatcctcctgtataccttatttatttttagtttaatttttaaatttttaacttgtatgggtacatagtaggtatatatatatttatggggtacatgtgattttttttaaagtatcaaagggaaagggtaacgtgatgttttgatacaggcatacaatgtgtaatactcctgtatattttaaatcatctctagattagttataatacctaatacaatgtaaatgctatgtaaatatatgctgtactgtattgtttaaggaataatgacaagaaaaaaagtgtgtacatattcagtacagatgcagtttttttcttttcaagtatttttgttccaagattggtgaatccacagatgcagaaccaacatatatagagggccaactgtattaggttaaataaaacatattattaaaattagcttcacctctttccatttacttttttcaatgtggcaactagaaaatttaaaattatatatgtggcctacatttgtggactacattatatttctattgtatactgctgtcttaaattataagtaatacagtcttgaataaatataaatgagcaaagtgaaaataatgactaactcttttacagtgagttctactgtagaaatcattataatgcaagccctttgctgggtacatgatgacttgaatcaagtagatgttggcagctatgttctaaaagtttgtggtcaagaggaagtgctgcagaagtaagtttatttaactactgagcaacatccttggaaatttcatttttaatggtttaatctagaaaaatttcaagttaaatttataatgcagaaatacattggatcctattgaattgatttattgaatcaataaacttttattgaaatatataatgtctaagatgtcatgtctaagacagtggtggggtttcagagataagtgagacattgtattcccttaaggagcttgtagtctttacaggaagagtttcaggcagttggttaataagtgatataatgggtctttcttactgtaaagagtcaatagtcacatcattatagactatattcctcttgcaacatgcactgttactttatgcacagtagtcagctgtgatttccttttagttgcctgaaataatcattatatgaatctttttcttacccaggtatttattatatcttttttttttttttttgagacggagtttcactcgttacccargctggagtgcagtggcacagtcttggctcaccacaacctccacctcccgggttcaagcgattctcctgcctcagcctcctgagtagctgggattacaggcatgcaccaccacgcctggctaattttgtatttttacacaatacagcctgttggtcaggctggtctcgaactctcgacctcaggtgatccacccgcctcggcctcccaaagtgctgggattacaggtgtcagccactgtgcccagccttgtaattcattatatctagcatttagtccagttgttttacagattttattctcctaggctgctagaaatgccctgtcccgatttttcttatttccttcttcatctttgtcttcatcttctttcttttttacattgactcttctcgtacagaataatttctctgtttaaatgctcagacttgattttaaaactgtctctgtttcaccattctcttcaatttctgatgcaggtgcaatttaaattttaccctcacctttataatttctaatttgaatagaatagtgaataattaatatatcttaacagtaatcattgccttggaagtcatgagcatattcaaaactgtcgaaaatgggacacagaaattagactacaactcttgaccttcagtgcaatgtgtcaaaatctggcccgaacagtaagtgtgtacctcataactgaattccatttgtttgaatctgaataattctgctaatttgccaattttcaacttgtrcatttttcatgatttcatagttagaatggggtgatgaactcatcctcaacaggaatcttcttagcaaatgaggggagatgttcaatcatggaggtttaggtaacatagtccttagaggtagaggcatatttgaaaatcaaagtggagaaattaaaatttggttggtaatagctttatacaagagtgaaaacatcagggtgagtcagggaaaaatggggaagaaggaaaaattttgaatactaaatatgggttggggatgaaaagaaaatccacactgacctttgtaccaaactgagaaaaataaattattcatcacaaaatgaaaactaattccctgttttaaaagttcactactttcagtaggtggatgctgtttaaaaaaaaaagtgctttcaatgctttcttttgaggttaaagcaaaatagaatgcagcaaatttagccattttgttttactgcgtgaacccttgatgaacttaaaatcgaatttttaatctctaaagagaattattctttatttgttagaattttggatggaaaaatatcagtgatgtctgctttctttttttcttggttttcttgagttttgcttttatgttaggtagaattcatttcaattgggtaaagactatttcataaaatttggtacattttagcagtcattggtaacttttcttcttagtttcttaaggaatgatgttctttttttttttcttttggagacagagtttccctctgtcatccaggctggagtgcaatgatgtgatcttagctcactgcaacctctgccacccaccctsaagcgattctcatgcctcagcctctggaatagctggaactgcgggcatgcaccaacccacccagctaatttttttttttttgtatttttagtagagacgggtttttggtgtgttggccaggctggtctcgaactcctggcctcaaatgattcacctaccttggtctcccaaagtgctgggattacaggcgtgagccaccgcgccctktcaggaatgatgttcttgactacatttgcgtaatgtagacttagggtagaagagcgagtaccttgttcatgatggggagtgggaggaaaattgattatcattagaaaaaataatgcagaaatttaaatgacctccatctgttttctaccccatatgcatttggctatcagccatctttagtgtttttagctctctattctctatatatagaacagaagtagtttttgttccaaaagctatttatatatctgaaagtaggcttgaaagcatttatgttttccatttaacaaacaagttttttttcaggatgttgactcactttttttctgagtcagttacaaataatatttaattctgatagaattttattttcagttctcagaaaaacactttagttgcaagattttatcatacacttaactatatttaatttgacaatagaaagaccaaagagtggatgtgatttttttgtgtatatgtgtttgtttaggcagaagatgatgaaacacccgtggatttaaacaaacacctgtatcaaatagaaaaaccttgcaaagaagccatgacgaggtatatcatctaaagcattaattgcaggttttcagactttgtttttggatgcaaatacacttattttggtgatgaaaacaatcattttgtgtgtagcatccttcagccacaataactgttgtttctttcagacaccctgttgaagaactcttagattcttatcacaaccaagtagaactggctcttcaaattgaagtaagtcttaattcacattttggcataatgacttaaagattcttgctgcttctttctcttaaatggtagtgttggcattggattaaatattttaggacttttaagactatattcttctttttaatttataaagaaaataggtttaattgacttacagttcaacatgactggggaggcctcaggaaacttaaatcatggaagaaggcacctcttcacagggcagcaagagagaatgagtgtcaagtgaacgggacccattataaaatcgtcagatctcatgaaaactcactcactatcatgagaacagcatgggggaaaccacccccatgattcagtttattgccatctggtcccacccttgacacgtggggattattacatttcaaggtgagatttgggggggacatagagccaaaccacatcattgtgcccctggcccctcctaaatgtcatgtcctcacatttcaaaacacaatcatgcccttcaaatagtctcccaaggtcttaactcattccagcattaacccaaaagttcaagtccaaagtctcatctgagacaaggcaaatcccttccacctatgagcctgtaaaatcaaaagcaagttagttacttcctggatacaatggaggtacaggcgtggggtaaatacagccgttccaaatgggagagattggccaaaacaaaggggctacaggccccatgcaagtccaaaatccaatagggcagtcattaaagcttaaagactttttttttttttttttttttttttttttgaggctgagtctccatgtgttgctcaggctggagtgcagtggcacgatctcggctctctgcaacctctgcctcctggttcaaatgattctcctgcctcagcctcctgagtagctgggattagaggcatgcatcaccatgtctggttaatttttatattttttagtagagatggggtttcaccatgttggccaggctggtctcgaattcctgacctcaagtgatcctcccaccttggccatctaaagtgctagggttacaggcatgagacaccgtgcccagccaagactatattcttgacattaatgtttcatgtcttgttttcggacctaacttacccccaaaattttcagtaatgcttaaattaacatgtttattctcacttcagctctgttgccaagaagaaccttcagttcatctctaaaagcatttattggatgcttactatatgctgaatgctagagttatgaaaatgaatgacctagtccccacctatcaggaacttaaaaactagtggtgagggatttaaacaaaacttcaatatagtatagtaaaatgtattatagaggtatgccttgcagttatggaaatcaaggaagagcaccttacctaagttgagggttcaaagaaggcctcttagaagggatgttccctgaaccaagtcttacacagttagcaagaaaaaattgggaagggtatataaacaaaagcagataggtgtgatatttacatggaagtataagcaattctgtgatagagtacaaagtataaaatgaagattggcagatgacattggagatagctatgtgattattatccttataatccatgttaaggaattttactttatcttctaggtcaggagaccatatccagtctactttctaatttgtaaattaaaaaaaaaaattaacaaaaccacacccctggattttttgttgttgttgttttttgttttttgagacagagtcttaccttgtcacccaggctggaattcagtgatgtgatcttggttcactgtaatctctgcctcctgggttcaggtgattctcccacctcagcctccctagtagctgggattacaggtgtgtgccaccacgcctggctaatttttgtatttttggtagagacagggtttcacyatgttggtcaggctggtttcgaactcctgacctcaagtgatccactcgccttggcctcccatagtgctggaattgggcgtgagccactgcgcctggccccatacccttttttttttgttttttttttttaacatattctttcttgtcatttacatttgtgctccaacactagagttgagtagttggaacagagattgtgtatcctgaaaacctaagctgttactgtttggccctgtacagaaaaagttggccgactcctgctctagccacttaaggtgtttttagcctagggtgggttgggtgaattgtttagtcctgtgatctgaaatcactctggctgtattgtggaagttagatttcaggttgggattggtttcagagcgaatatttagaaaggtttttatagcagtccaggtgaaagataaagagcatggagaagttaaaaaggagagaactgattaacaatatttaggagataaaattgaaaagattttaataggtgatgagatgtgagtgaaggggaaagagtatgagtgtaggatggcttccatatttttatctacaagtacattcttatcaacatataaatatatttattcaaaaatattcactgaatatctctggtaagctggagtttactagaatctggagtttcgtatggagtgtccaggctagagataataaacttggaaatcatcagaatataaattgtattttgcagccataggcaggatgaggtcaccaggaaaatcattgtagatgaagagttgcccatcttaaaaaaaaaaaaatccccaccccgccccctgccgcaggagccacaccatttctctattctccttgccacaaaacttctgaaagttaagtggttttacagcttccaattcctttcttcccattctcttatatgcccactccaatcagtttagtacttccctgaaactgtacttattaaggtcatcaaggacttccatgatcctgaattcagtagtcagttcctaatctgttgatggatggatcgatggatggatggatgacagggtgtcactctgtcacccaagctggagtgcagtggtgtgatcacagatcactgcagctgcaaccccytgcagatttctctgtgttgtctgggctggtcttgaactcctgggctcaaacaatcatcttgcttcggcctcccaaagtgttaagattacaggtgtgagccactgtgcccaccaagtctttatttttctcaacctgtctgtattttttgatacagttgatcatgtctttctttttgaaatacttagttggcatctgggataccaccttctgctttccttatttccattagctgctctgtctcactcttacttgtggcttcttccttatcttcctgactaccaaacattagcatatccccagggctcagttctaggacctcttctctctgtattcacatcctaggtgatcttggtatatccctatactgattgactctgaaatttatatgtctaaccttaaccttttccacatctccagactcaaatatctattacttgacatctttatgtgaatatctaattaattgayatctcaaatttaagatgtacaaaactgaattttttatagtacccatcatatctattcatccatcgacctttcctttctctttttaagagtttattttttgagagcaatgttaggttcagagcaaactgagaggaaggtacagagatacctcatatacccccttccctacacatgcataacttgacctcattatttccctttttaataaatggcaactttgtcttccatttgctcagaccaaaaccctggagtcatccttgatgtctcaagaaaaagatcttatacatttcacattcartctaattctggtcagctccaccttgaaaatacatttagaatgtgagcactttcatcattaccaaagctatactctagtcaactgcagtagtttcttactaatttcccagtgtctacccctgccctctacagtatgtcttccacaggcaaccaaaatgatcttttgaaaataagtcactaaatgtaatgtgatatcctggattatattctggaagataaaaagctcattagtggaaaagttggtgaaatctgaataaagtttgaaatttacttaatagcaatataccagtgttaatgtctagcttagacaaatgtaacgtggtttatgtaagatttacttagtctagttttccaacattatatgggaactttgtatttttttataactgtctataaatttaaaattattaaaaggtaaagattttaaaaatgaaaataggaaaattagccgggtatggtggcgtgtacctgtaatctcagctactcggggctgaggtaggagaattggttgaaaccgggaggcagaggttgcagtgagctgagatcacactgctgcagtccagtctgggtgaatgagacctgtcttaaaaaaaaaaaaaaaaaaggaaaagaaaagaagagcagaaagcaaaataagagaaaatcaaaggcagaaggtggggctttgaaaagataacgtttgtaaatcctttaaaaagtgttagatcatgtcactccttcactgagaatcctgtttactctcttacttagtaaaattcaaagccctaattgtagcttcaaggttccgcacagtatggactcactacctctctgatctggcttcttatcacttccctttgttttttttctggttgattatctgccagttatgttccccactgggracccctgtgcatgttgttcccctctaaatgcttttccctgtgacatttgcatggctcacccttacacttttttaaggtcagtgcccaaatatcaccagagatttctttactcaccatcttatctaaaatagtaactctatattatacttatccccctcctttatttttatagctttattgaggtataatttatatatcataaaatgtacccattatatgcacacaattcagtgattcttagccaatgcatagagttgtataattatcaccacaatccagttttagaacattctcatcactcccaaaaaagtttccttgtactgatttgcagtcaatcctcactcccagcctcagccccagacaactactaatctggttcctatttctatagctttgccttttctggacatttcatgtacatggaatcatgtactatgtagttttttacatctggtttctttcacacaccatactgtttttgaggttcatccatgttgtagtaggcatctatagttcacttttttcttgctgaaaaatattccaggctaccccacattttgtttatttgccaaatgattagcatttggacttaaactttataatttttggttatcatgaataatgctgttataaacatttatgtatgagcccatggatatatgttttaatttcttttggatggattttagggggagatcaagaagttgctgaagttttttttattgttgtttattttatcttttttaaagaaatggaggtctcactgtcttacccaggctggcttcaaactcctgggctcaagagatcctcccacctcagcttctcaggtagctaggattacagccacacaccactgtgcccagctaggaagttgcagaggttttgattactcctggcctttagttttctgaagataggatgttaattcagtttgctaaaatgaagtcaggatggcagtaggggttttgaggcaaggaataatggtttggtttaatatcctatagggaatgggaaggagagctgaccaagggcagattaaaggaattttaggtgccgtggaagtttgtgctgaaattgaggactgttgaatctataagattttcctaaaagtgctcagctgcctggtagaagaagcagagaagagtttagtcagaatgagggagtgaggacagaagagagtttggtcagaatcagagtgtgaggactggaagcaaaggggttgtaaccagatatgatattgtggttaaggtttcaataggataccatttgggggttgaatatattgtgaattttccacatggacgtttatgtaacggaggcttgtattacaggatgtagggtagaaagttagataaatatccaatgcaaaaatatggcatgccgttggggaaatgaccatgtcggtagtaagatgtatcagcgtgggccagccaggagacggaaattgtactagttacttgaaaagggaaatttagacagggcatggtggctcatgcctgtaatcctagcactttaggaggtggaggtgggcagatcacctgaggtcaggggttggagaccagcccaatatggcgaaagccggtctctactaaaattacaaaaattagccgggcatggtggcacatgcttgtaatcccaccttctcgggaggctgaggcagsagaatcatttgaacccaggaggcgaaggttgcagtgagctgagatcatgccactgcactccagcctgggtgacagagtgagattccacctcaaaaaaaaaaaagggaaatttaaagaatcattaggccgggcgtggtggctcatgcctgtaatcccagcacttggggaggccgaggcaggtggatcacctgaggtcaggagttcgagaccagcctggccaacgtggtgaaacctcgtctctactttaaaaaaaatacaaaaattagctgggcgtggtggcaggcacctgtaatcccagctacttaggaggctgcggcaggagaaacgcttgaacctgggaggcggaggttgcagtgagccaagatcgcgccatcgcactccagcctgggggacaaaagcgagatttcgtctcaaaaaaaaaaaatcattaattagtaaaagatgattaattgctttaaggggtgaaagaggactctaaggcaggaattggcatactatggctcacacaccaaatctggcctgctctctgtttttgtaaataaagttttattggacctatagtgacagtcatttggtcatttgtttatgtattgtttgtgtctgtgttcacgttttaatggcagagctgaattggtgccagagactgtatggcccacaaagcctaaaatatttactaactggccttttaaaggaaaagtttgccaaccctactctaaggggtccagcgataggaggygcataaaagcagctgtcacctctaggctgaggaaaaaaggacagtaaaacactctgaggactgtgataaagtctctccccgaaccttagactgaaatttagtctctttgaagagagtatggctctcacaggaatacatagttgcctatggcaaagaaacctgctagataaatttagccaaaggtgtcaggtaggagaacatagcatgagggtgcagctagaggtagtctttgaggactactcagctctcacactgaattaaaaaaaaaaaaaaaggaagctggctgtttttcgtcttccggggcatttggcatatcctcataggctttcctagcctgtcctgaacccctggtaatagaattgtttacctttgtaccaagaaggttgggaaagcaccaaaatctgcatgtggtgtgtacccaggtagactttgaggggttcgtgctgtgagacctaaagcccttatgagattgtccaaaacaaaaaacatgtcagcagggcctatggtgattccatgtgtgctaaatgtgttagtgacaggatcaagcatgctttccttatcaaggagcagaaaatcattgtgaaagtgttgaaagcacaagcagggagtcagaaagctaaataaaagatgaagcttttttgagtaataaaaattaaaagactttttaaaaaaattagaaggcaggaacccagatgggaagtgtcttcctaatgctcttggccttggagggtcctttctgtgtgttcaattgacaaaatctaaaaatgcgctagcttggcaaagagaaatgtttatagggtctagctctagtatcagaaaggaaagcagaggaagggtggatttggaactgatagacaataaattgataattggcacttaaagagtagtgtaggccaggcgcagtggctcacgcctgtcatcccagcactttgggaggctgaggcgggcggatcatctgaggtcaggagtttgagaccagcctgaccaacatggtgaaaccccatctctactaaaaatacaaaaattagccaggcatggtggcagacacctgtaatcccagctactcgggaggctgaggcaggagaatcacttgaacccaggaggttgcagtgagccaagatcccaccactgcactccagcctgggcagcagaatgagagtccgtctcaaaaaaaaaaaaaaaaaaggcaaagtaatatgaagtaatataggagaatggcatgaccttcaaaactggaaagatttttgcatgaatgtgaagtaaaaggaagcaggaagtataagtcaaataagcaaaaatgaggagctagaaaacaggctccgaggactacagggtaattgggtatttgagaaaattaggtggtttcatttaagcttgaaggtgaaggtttatagtagccaagcctcaagggtggaaaaatttaaatttttaaggggtggtatagtactgagtttcagcccattctaacagtacttggcataaaagtttggcataaatgttttatgaattaatacattatataagaatgtttcttaatatgtacttctccggtaaatgttgcccagtgttattaatatgtgaccgacctctgaagaacttggtttttgataccatatttttgcaggaggaagagaagggttattttcaatgtggaaattatttccaaatgagaataagaaaaaaatagctctagttttagtgatttgctactaatttatgcttctacttctgattctaatgtaaaattaatagcaatttgcatatgaataattgtgtcagacgaagtgaaaattaacccggccttgccttttcctactttgaaataaactatacaattgaaaagctatgttttttctttgtcatcacaaaagagtagaggatatctgttagggatatctaagatatctagtttctgacttcgtctctggaattggtcctttaaatttcacctacctatttttattttattttttatttttaaagaaccaacaccgagcagtagatcaagtaattaaagctgtaagaaaaatctgtartgctttagatggtgtcgagactcttgccattacagaatcagtaaagaagctaaagagagcagttaatcttccaaggagtaaaactgctgatgtgagtatttttggtaactaggattttattacatgcaaatatgtacttaaacaggagatttttgccttatcctagacaaaatattgtcattttaactttggcttttacttttgggttgaatcacttacttggttaggtggggattccttggtaagaagttgggctgccttggaagagctttatgagagttgacattcaacaggtggatgtcaaactgtgaaccctttgtgtatagaggaggacctctggcataaatgagttggtttggggtttaaggatagatattgagcttagaagacctggaggacagtaactatcacttctcccttggggtggaagcatcctgattatcagtgagggaagttctaatcactgataatcagtgggggaagtggctaatacttcctgtagaaaagaccaagggcctcagctgtaatgcctcagaagcagccaagttaggggccttccctttagattatactgttgcttttaataaaagctgtccgtcatgacatttccaggggatttaattaacttgcttcatagagacatttatatctttaattgcaaggataaaagaaggggtgcatctcaaaggccatgataaatataaaggatagaaaagttacgttgatggtgtgcccctcgatatctagaagatarcatagtccatgcattctcagaaagatcctatccatgtggtatgtagagatgtgggtttctttttttctacttttttatgtgcttctttttagaaacttatacacacacacacacacacacacacacacacacatatatgaaattacttgaaggtgatcaactaccatggacctaattttgtctgaggcttctatttattttacccatttgatggataaaggagcagacaatagatgggagaggagtcagtttagataattataagcacttttttgagtcaccaaccaagtggtaataaatacagttctagatttttttctttaaggatattcttatgttgttttagagcaactaatggaaaaatactgtacttgtcacttctagatttcaaattagtattaaccaagcagattttgttgtgtttctgtgatatttcacagtagtttttagttattctgattttcttaatactaaaaataatcttggtttgtggttttccctttctttttgcattatttatttatcgttttattaattctgtagatacttgggaggtttcccctggaaagagtttcttggacatagtatttgacattttatattatgtcataggcagttttctgactattgtgtgtgtgtgtgcatgtgtaggtgacttctttgtttggaggagaagacactagcaggagttcaactaggggtatgtgtttaaatctttaaattttagcaataatcatcgccttttcagagaatctattaactttttttttctttaatctaggctcacttaatcctgaaaatcctgttcaagtaagcataaaccaattaactgcagcaatttatgatcttctcagactccatgcaaattctggtaggagtcctacagactgtgcccaaagtagcaagagtgtcaaggaagcatggactacarcagagcagctccagtttactatttttgctgctcatggaatttcaagtaattgggtatcaaagtaagtaactgtttaagcagccaggcatggtggcttgcacctgtaatcccaaggctttgtgaggccacagtgggaggattgcttgaccccaggagttggagaccagccttggcaatgagacctcatctctactaaaaagaattttaaaaaaattagccagtcaggcacggtggctcatgcctgtaatcccagcactttgggaggctgaagcgggtggatcacctgaggtcaggagttcgagaccagcctgacaaacatggagagaacctgtctctactaaaaatacaaaattagctgggtgtggtggcacatgcctgtaatcccagctatttgggaggctgaggcaggagaatcacttggacccaggaggtggaggttgcggtgagccaagattgcaccattgcactccagccttgtcaacaagagctaaactccattaaaaaaaaaaaaaatagccagtggtggtgtgcacctgtagtcccagctactcagaaggctgaggcaggagtattgctcgagccaggaaatgaagactgcagtgagctatatcatgccactgcactccagcctgggtgacagagcaagactctgtctcaaaaaaataaaaagaaaatatgtgcagctttatctagcaactattctgatcttgtaaaatgtcagcaaccagttatcttggtgtttaaatgactaaccagcagatacctttgttattttcttaaaaattacagaggtatttgaagcacttccagtaaaaaaaatgtaactctttacatgccaaaagcaggaaaatatagcaggaaaacagagcaaatatagcaggaaaacagagcaaatgtcagttaattaggcaatttaagactggtgttcgttcattattattatttttttttttgagatggagtcttgcattgttgcccatggtagagtgcagtggtgtgatctcggctcactgcaacctctgattccagggttcaagcaattcttgtgcctcagcctccccagtagctaggattacaggtgcgcaccaccatgcctagctaatttttgtatttttagtagagacgagatttcaccttgttggccaggctggtctcaaactcctgacctcaagtgatctgcccacctcggtctcccaaagttctgggattacaggcatgagtcaccacacccagccgccagttttactttatttgaaaatcaatgtatgaactgaaaagtcagaaatatttttagtgaaatagttttatagtagcttaatgctataaaaaagtctactgaagaaatatcaaacctaagttttgcttaaattgggctttagattaaaatataataatttagtgacttaaaagtgatgttttaatttattcaataaatatttattgagcaccatctgtgggcagtattcttagtaccggggattcagtagtacaaggcggcaaaaaacctgtactcttctggaacttggatttaaatggatattgatggtatctgaaggtatttcattacagggataataatcttcacattctccataggcacacacacacacacacacgtttgtacatagacacacacaaatatacatagggacactaatgaggtgaacaaatacccagtagaagacaatacagaaaacggtgataaaaatagaaagtaagtgaataaaatgctgacataaataggagtaaatggaataaagttgagaaaaataaccaaatagtttgcttaggggtattgtgtgaaccaacgaaatttgatttgaattaaatttagaatgataaataaattgtatatatgaacagagtggttaacatgtaaggctagcagtaagttagattaagtagaatacaattttattgaatctaagactcctgctttacaagattacctgactgtatccaaccagctgtgtacttggcaattagtggctgagtcactgcaatctaatgagagaattcaatagcatctgtccccataaatggaagactcccaatagactaggaagattggcttgatgcaagtcaggcacatgcttagctgactctatttcagtagcttagcaaaggaaaatgcacctagggaaggtaatgtttgtactctttctacctagaaatgaataaatacattattcagtgttgttcaactaaaatctgaagctaataactaactgagcacaaaattaaagtaaattggccgggcgcggtggctcacgcctgtaatcccagcactttgggaggccgaggcgggtggatcatgaggtcaggagatcaagaccatcctggctaacaaggtgaaaccccgtctctactaaaaatacaaaaaattagccgggcgcggtggcgggcgcctgtagtcccagctactcgggaggctgaggcaggagaatggcgtgaacccgggaagcagagcttgcagtgagccgagattgcgccactgcagtccgcagtccgtcctgggcgacagagcgagactccgtctcaaaaaaaaaaaaaaaaaaaaaaaattaaagttaattattcagctggtgttattatgaccatgctttaaactgggacctaggaacttacattcccctttttatcccctttaccaaacctcttttctattttcatagaatttgcagtggttaaatttcagatggacttctaaaaactcaaatgaaaggtgaccagattatttcagatattagtctctttggaggaagaactgctaatgtatttgtattagttaactaatttgtattatcatgatagaaatcaagttaaactttcttttctcagttatgaaaaatactacttgatatgttcactgtctcacaatggaaaggatctttttaaacctattcaatcaaagaaggttggcacttacaagaatttcttctatcttattaaatgggatgaactgtaagtgaaatttctggctttttattctttcagtgtgtcctgttgtttactttttccaatgtatgcatcctagctttaatttttattgcaattttcattgaaattcattaacttctgacttatgtcttaagatctctcttctagatatgattttatagaacagactgaaattctcattaaaaaatattaaataccgacckggcgcagtggctyacacctgtaatcccagcactttgggaggccaaggcgggcggatcatgaggtcaggagatcgagaccatcctggttaacacggtgaaaccccgtctctactaaaaatacaaaaaattagccgggcgtggtggcgggcgcctgtggtcccagctactcgggaggctgaggcaggagaatgtcatgaatccgggaggcagagctttcagtgagctgagattgagccaccgcactccagcctaggcaacagagcaagactccatctcaaaaaaaaaaaaaaaaaaatgaaatacccttttaagcctttatattatgaaattacaaaaacataccattctttttagactttgtcaagttaaagatataaatttatagttatagaaaggaatgaaagttatagaaagacggtattttatagcattgcttgcttcagtatttattctgtaacactatataacaattctggctcttagattaatcaacacttaacgaaaaaagttatctttttacttttttgaggcggagttttgcccttgttgcccaggctagagtgcagtggcatgatctcagctcactgcaagctccacctctcgagttcaagcaattctcctgtctcagcctcctgagtaactgggattacaggcatgcgccaccacgcctggctaattttttgtatgtttagtagagttggggtttcaccatgttggccaggctggtcttgaactcctgacctcaggtgatccgcccacctcggcctcccaaagtgctgggattacaggcgtgagccaccgcgtctagccgaaaaaaacattatcttaaatccatgtacaagatgatattttgtactattcatattttttaaatagtgttttttcttttttcttttttttttttttttgagatggagtctcactctgtcacccaggctggagtgcagtggtgcaatcttggcccactgtaacctcagcttcccgggttcaagtgattctcctgcctcagcctcctgagtagctgagattacaggtgtgtgccaccatgcctggctaatttttttgtatttttagtagaaaaggggttttgccatgttggccaggctagtcttgaattcctgacctcaggtgatccgcccaycttggcctcccaaagtgctgggattacaggtgtgagccactgtgcccggcctaaaatagtgtttttaaactaagggaactctcattatttaggcagatagacagttgcagaactttttactattcgttccacatttattaaatgttttcctattgtcttattttcttttatattataaaataatacatgtctgtgaaagcaatcaagtaacacaaaaatgcatataagtagaaagtgtcactattttcaacatttgctatcagagtgcctactgttgacttcaagtgttctttcagacttaaaaaaataatgcattggtaaacatatgtctgttggtgtatatacttttctttttttcatgggagggaagagagggaggaaaggaaggaggaaggaaggctgtttgtgtatatacttattatatatgtttgtgtgaattcttacatcccaaaacagaaattctcataaacattcatctagtttttccaaaaggaaataaaaatgactaatattattttgcctggaaattgacactagaaatctcaaaggcatttgtaagtctttaaagaaagaaatgttatattttgaaattttatactgttaataaaatttatttaaaattgttaataggacaagttagccagacttctatttagctaaaggttactcagtattaaagattatttgaggctggcgtggtggctcacgcctgtaatcctagcactttgggaggctgagtggatcacctgaggtcaggggtttgagaccagcctggccaacatggtgaaaccccgtctctactaaaaatacgaaaattagctgggcgtggtggtgggtgcctataatcccagctacttgagagtcggaggcaggagaatcacttgaacccaggaggcggaggttgcagtgagccaagatcgtgccattgcactccagcctaggcaacagagcaaaaacgccttctcaataaaataaaataaaaataccaaaataaagattatttgaaaggttaaatacaatacctaaaattgtcagtctcattaaagtgttaaatttcaaaatcattcaatctaatttgttctattaatacatttttccccccatagaatcatttttcctatccagatatcacaattgccattagaatcagttcttcaccttactctttttggaattttaaatcagagcagtggaagttcccctgattctaataagcagagaaagggaccagaagctttgggcaaagtttctttacctctttttgactttaaacggtaagtattaccgaattgtaatggtgagtcactgtggacacatctgcacatcagaattggctagatgacaaggaggtgaggggaggaacatagatgagtgaatgagcctcttcagtttttctaatgtgataaaaggaggtcagttcagagacacagattagaggaaatcaaagttagtctgctatattctaaacatatctgaataggtatgcacagctttgtttgccactcactgttccatggagaaaagcagcagccaatgactgtcgtttatataaagtactacattgttgacataataccacagtcttgtaagttcccttgatgttaaccaaagaacttcgtttttccttttcccatttctttcctactcttctccagttttagagaatctataggtgcacattattcccttccttaattctctttactaatctatcccttactgccaaatgcccctagtctttaattgccatacatcccacaagtatgcaaaaccctattagggattctttcccttatccttaggggtaaaggaacttcttttgagcttggtgtctgttaatagccactgggatagtataatctatatggcctttcagctgaatattttaattatgttttaaggaataatgtttcatgagatgatcaagagttttccaaaggaaaaataattgggtaagttcgggatatgttacattcagcacatgggtgcattctggagaatagatgatgcacattggcatattaaagcatctctaggcagggctctgtggctcatgcttgtaaccccagcaatttggtagtccaaggtaggcagatcacttgaggtcagcagtttgagaacagcctggccaacatggtgaaatcccacctctgccaaaaatataaacattagctagctgggcatagaggcacacccctgtaatcccacctactctgtaggctgaggcatgagaatcacttgaacctggaggcagaggtttcagtgagcccctccccaccccccgccaaaaaaaaaaaaaagcatctctaaagttctaaaagaaaaattaaaaaaaaaaaaggagaaaaaagcatccctaaagctttgtagtcaagaagcctatttaactgggtcttatggcaatatatttactataataacaaacacttatgtagcacttactatgtgctaggtattcatctgagtgctacataggtatccttatatttctcacaactgctctatgaaataagtggtgattttatccctttttacggagtggggggaatcaaagtacagagattaagtgactttccccagggcacttagctagtatgtggtagaattgggatttgaaccaggcagtttggctacagggtctacattctgaactattaccctatattaacatactgaaacttagttgataccatgacacttttttgttgttctagaatatatcttttgaaaccttgtgtcccttgggacagtttgggaaatgctttaataatagatctatttaacttaaaacaaataccgagaatgaaaatttctgctaatctaatactttttcttcttaaatggcaaatacaccatttgatttgccagtaatcatctgttgacaataataggatgttcaaaacactgacttgacaaatttgttcttgaaatattcttttcccatgtgcttaaaaataacatttattggctgggcacagtggctcacacctgtaatcccatcattttgggaggctgaggtgggtggatcacttgaggtcaggagttcgagaccagtctggccaacatggtgaaaccccatctctactaaaaatacaaaaattagccaggtgtggtggcgcacatctgtaatcccagctacttgggatgctgaggcaagagaattgcttgaggctgggaggcagaggttgctgtgagtcaagactgcgccactggactccagcctgggtgacagagcgagactctgtctccaaaagaaaaaaaaaacacatatttattttaaaaatatttttctttattttagtcgcttcccccctatttgaggaggcagtataagattttttgttctctacattttggtggattcagattttaatacctgacataattttgaactaccaaaggctaaagaaaggcagttgaagggattactgttaatggtgtgtattaggaaccttttgctaaatataatacattactactctaaaacagaatatgcttatatactgtgaagaattgtattcaccactgtctttgataaattagtgtcagagagcagttatatgaaagttaaatacaatttcatcattatcattaatttttataaataaattctgaaaaccttcttgctcttgaaagcaccaggagtctttgcataattagagaactatcacattttgccacttttattgtctagtaataaatggttttgttagataaatgatataatattctttcataattcaagagactatcaagtgaagggcagttgacttctgctagacatttaaatagtttgcatccaacactctgctgttaaaatagtgaatagattgtattaagcttgagactgccaagtagtgcaggcgatcttggtaatgttaggacttcacgttcaaggaatactcagaaattaagagggaagatgattaagagagatgattattrttattacactttgtttctctacattagtacatgtagagaaacagtatataatatagttgagttaaccactgtgttataatgattagtaatcctagtcttgaaattctttatgaaataatttctgttgaagatgcaatcttatatgacctaatggtcactattattgaagccaaatgactcaaaggcatttcattcagccttaataacaaatgagttcttttttaaaaaactttttttttgtagagatggagtctcactgttgcccaggctggtctcaaactcctggcctcaagtgatccatcttcccgccatccgatcccatccggtagctcagattataggcgtgagctaccatgtccagcacaaatgagttcttaactaatttttctgaaaactggcatataaacagaattaagcagttaacctgtctttcctttacagttatttctgagggttactaaataattgaggtggcaaagttttttttgtttttgtttttgttttttgagacagagtctcactctgtcactcaggttggagtgcaatggcatgatcttggctcactgcaacctctgcctcctaggttcaagtgattctcatgcctcagcctccagagtagctgagattacaggtgtgtgctaccatgcctggctaatttttgtgttttgggtagagacagggttttgcaatgttggccaggttggtctcgaactcctggcctcgagtgatccacctgccttagcctcccaagtgctgggattacaggtgtgagccaccatgcctagcagtaattgatatgacaaagttttttttatagaaaatctttagctagcccgttatggtggctcatgcctgtaatcccagcactttgggaagccaaggcgggagtttgagacaactctggccaatatggcgaaaccctgtctctactaaaaatacaaaaaagttatagccaggtatggtggctcgtgcctatagtcccagctacttgggaggctgagacgggagaattgcttgaacccgggaggtggagttttgcagtgaggcgaaattgcaccactacactccagcctgggcgacagaacgagactccatctcaaaaaaaaacagtgaaaatctttagataatagatgcagaaggaatgatagaattagaatattataattttgcaacccatgctgaaataatagatttcggccagggtttctcaatcttggcagtattgacatttcagaccaaataattttttgttgtggaagactgttctgtgcattgtaggatgtttagcggcatccctagattctacccattagatgccagttgtccccctcagtttacaaccaaaattatttccaaattaccaaatgtctgctggaaggaaaatcactcccagttgagaaccattgatgtaagcagtgatcatcagtgccgccttttttgttttttgttttaaaaccttaaaatctgtgaaaatgccttcctaaaaccattaaatagtttttctgcaacttcataattgatggcttaaactgatggcactagaactaaactgatcaatagtaacatcacagagagataacccaaagagtgtgtaccttttaatttgatagaattagaagtagtatacaataccaactgcaaaatagtaagtattcttgccaaagaactaaatctgaatcaaatcaggcctctaggtctaacttcttctctatggaaaatacaggaggacatgtgaaatgacaccagaggagtataaccagcaaaattcaggatatggaaaattctacagaacaaaaggcctggtatcatcaacaaataaatagaaaaaaagagaaggagaccaaacaagagttaacaaactttttctgtaragggtgccagataaaagtagtttaggctttgcagaccatatagactctgtcacaaatgcaaaagcagtcgtagacagtacattaacaaatgagcatggctatgtstggtaaaagtttatttacaaagccaggtgtgaaggccagtttgtttacatgtggctataaataaactctgtaaaggcaggttggagtttgctgaccctgaattaraagatgcttaaaaagacatccaaatgtattgtgccactgcacttcagcctgggcgacagaacaagactccgtctcaaaaaaaaaaaaaaaagacatccaaatgcaagtgttaggccttgcttggatcttgttttaagcaaaccaactgtttttaaaaaacatcatttatgggacaatcagagaaatttgaatagtgactagatattttatggtcttaagtaattattgttaattattttaggagggataatggtattgtacttattacaggaaactttattttttagagatatataacagtatttgtagatgaaataatatgatcaggatttgccttaagtctagttggaagtaagggtggttcttagacataacagactatagcccggtgtggtggctcacacctgtaattccagcagctcaggagttcaaggcttcagtgagctatgatcacaccgcgcattccaaccagggcgacagagtgaggcccatccccatatatatatatatatgatggattataaggtatcaaagattcaaagcctgtttgtcaagagaaaattttaaaactggagtctagttttggtaaagatatttgctgtttgaataaaatgaacaaagatttgacaaactatagttttctgcttttgtatatcttacgttgttttcagaaatttcttctgtgtaaagatatgtcaatatctttgaaagaatgttttgattgagtaggccataaattagtagtctagggcaagggtcagcatacttgagcccattgcttctttttataaatacaaatacagtttgttagagcatagcatgcatatacatttatatgttgttcatggcaaatttgaactacaacaggaaaatttagtcttgcagcagagactttatggtccacaaagcctaaaatatttactctctggctctttatagaaaaagttggcagacccctagtctaggaaacagataaaacttctcatatctggccaggtgcggtggctcatgcctgtaatcccggcactttgggaggctgagacaggcagatcatatgagcctcaggagttcaagacgagcttgggcaacatggcgaaaccccttctctacaaaaaaaaaaaaaaaaaacaagaattagctgagcatggtgccacgtgcctatagtcctagctacttgggaggctgcaatggaacaatcatctgagcccagggaggtcaaggctgcacttagccatagttgtgctactacactccagtctgggtgacagcaagaccctgtctcaaaacaaaacaaaacaaaaaaacgtgttttgttttctttggcttgtatttttgatctaatgattaaagtcaggaagcagttctgtaatccaaaccaccaccttgagatatatttctttgtagaaaatcttcaaagactattcttaaccttcctatttctagaagttgttttctgagtccttaccttttttgtgttctgtcctcaacaccattttccccaagataatgtcctttaattctccctctctttgttcccaccctacatttcaatacatttaccctacacctgaaaagtttcagtacratgtggagagtgaatccttctgatatgttcttaaagatatcctttttatttagttgatctcatactaacttttcaaattcattacatgtgttgtaaattttgaattgatttttaaaatgaaaatcacattattatttttacatccgtgaaggtttttaacatgtggaactaaacttctatatctttggacttcatcacatacaaattctgttcctggaacagttaccaaaaaaggatatgtcatggaaagaatagtgctacaggtaatggtacttcttgacatgtagagaggtgtacatttaaatttcttcataaaatgtgtgtgtgtataccatgatttgggttgttaaagaaacctaactgatcttgttttagtctcaggatctatcttctattttaatatcaatatttctgagaagcagtaaaacatgcactgtacttatcccaagaaatatgtatgtgctgttgagaattaccaacaatggtaatcaattgcaacaagaagcattaatttaatattcaatgtaaatatgccccgattgctaagaaaaatctgttttcttaaagacaaagaggttaatgtggcaaatacgtagactgtaatttgatcaatttctgttaaattttaaaggttgattttccttctcctgcatttgatattatttatacaactcctcaagttgacagaagcattatacagcaacataacttagaaacactagagaatgatataaaagggaaacttcttgatattcttcataaagactcatcacttgggtatgttctgtttattctgttttgggctaagtatctcctgtaatgtaaaagtcaagttaggacttacattaaataacctgattctgttcatgatttatcagctttcttggtgtggaaagttttctatttaacttactttttttccttttttttttttttaataatctacaaaacttttgtctcgagggccagctagtatttaagttatttttaaaattatataaaaagactacataactgcataaaattttagaaatttgtcaagtcaaacctttttacttaaaaggcaaacaatagactggaaactatatttacaatacatatcaagagatttttttaaccgtaaggaactttttcttattaataagattaagaccaagaactcagtagtcaaggagactaagtaggaacaagcaatttttttagaaaaatacaatacttttaaacaatctgaaaagatgttcaatttctcagtaatcagggaaatataaattaattcaagataccatctaacacatcagagtggcaaaaattaaaataccttgtgaaaagtgttgataaggatacataaaatgggaattatactatttgcagaagtataaaaagctatgtctcctttggagagcaatttggcaaaatctacaaggttataatgtgtatattctgtcccagcagtgccatttgcagttatataaaactcttttatatttgcttatggagtcaagaatattcattgcagtacttatttggattattgaaaaactgttcggagactgggcgtggtggctcatgcctgtactcttgacactttggaaggctgaggtgggaggattgcttgagcccaggagttggagaccaacactgacaatatagtgagaccctgtctctacaaaaaaattaaaagtagccaggcacagtgttgtgcatctgtagtcctagcgactcaggaggctgaggtgggagaattgcttgagcccaggaggtcaaggctgcagtgatctatgatctcatcactgcactgcagcctgggcaacagagcaataccctgtctcaaaaaagaaaagaaaagaaaagaaaagaaaaattgattggaaatgtccatcaatagggattaaattaaggtacatttatctggtagagaaccatgtaactattaaaaatgagattgtaggctgaacgtggtggctcacacctgtaatctcagcactttgggaggctgagatggtggcacatgcctgtaatcccagctacttgggaggctgaggcaggagaatcgcttgaacctgggaggcggaggttgcagtgagccaagatcgtgccactgcattccagcctgggtgacagagcgagactccatctcaaacaaaaataaaataaataaaaatgagattatagctgtatgtactaatttttaaaataggttagctgaagaaaaccaggagtagaatagtgtatatagtgtattaccacgaaaataaaggaaaaaagaggatctacatatatccgtgtgtgtgcctctgtatgaataaactctctagaagagcatacaagcttaggtggttgcctcttagaaggggaattagaaggagagagatttcactgtataccttttgcagtgtttgaattttttcattactccacatgaaatgaataaatttcagtgcatgtatatgtatatatatatttatatatatatggatggatagtaaaatggtgaaatatttcattcacgtaaacatttgtgattaagcttaaaacaattaggatcttcaaaacaagtccttttcatttgaactgtataaatatgttccaaaattttatagtagtattttttttttcatagcatttgattttatttgtacgaaatggatgaaatccttgctatctcttagggtgggatctgctttttcaactctgatttctagtgcctggcatctagttagagctcaataaatttttattatactgaattatccttcattttcctaactaagcatcttttatcaagacataatcattcctttcagttcccggattagcattaattactggcatttgccatacrttgcatttttctattccaaattagtattaatgattttatgaagaagtagctgtcccaaataaataaatttcttctttgtatttttaatcattgagattatatcattatgttatcactgagaagtaatttaattctattatatatgcagactttctaaagaagataaagcttttttatgggagaaacgttattattgcttcaaacacccaaattgtcttcctaaaatattagcaagcgccccaaactggaaatgggttaatcttgccaaaacttactcattgcttcaccagtggcctgcattgtacccactaattgcattggaacttcttgattcaaagtaagtcaaatacatttatttgctcttgttttattgtcagtttttccagtaaggtatgttgccagaagtatttcctttccttttaacatgaaagcaattcaatataatccaaatgtgtaaatgtatatttatacaaacatatcttctgcattgaagttgtcaataaagcattgcatgtcctttaaaactagcctaaaggaagggttaggttgtaaattttgaataatttatatttttatgatgtgggccagaattaattttcataaacttaagattcctaaataatccctaaattgaatctgtatagcacaataagattgtcttcttacaaaaagaagaaatacattgcttttgaataaaagagatatcttagtgttctttgtcaggaccagattgagattgtgttttcaaaaaatacagcttcactggaaagaaatcactgtccaatcttggttttatggtaatcttctagatttgctgatcaggaagtaagatccctagctgtgacctggattgaggccattagtgatgatgagctaacagatcttcttccacagtttgtacaagtgagttttttactagattacctccctttatactttcactctagttttttatgggaacttgctaagggatccccattctgtttagattaaaagtcgttttttagtgtgggaacattgaggggcattgcatttggatttagtgtgaattttttccccactattgtcatctgccccatttgaatattgtatataggcacctgtatttttagttttcagactttttagaacaaaccagacttgagcttttccttgatttttctttactggtgagttcaacatagctaatgaatgttactctatacttttgtgtttgatttaaattagtttggcataggttaattcatctatttaatttttataagtatcatctttcatcagtaagagtaatacttgctttatatagtttctcttttgatagttttattggaacaatttagtatgggttagaccactaataattcttattttcttttactgtaggctttgaaatatgaaatttacttgaatagttcattagtgcaattccttttgtccagggcattgggaaatatccagatagcacacaatttatattggtaagatttaaattttattgattaccgtatttccattcctagaatttatagaaatggcataccctgtaagtctaaatggtatgccacactacttattgtggatacaagatattttattgaaggtattattttaaaggagctaaatttaccctctaatgcaaaaatttgaaaaccctcattgcaaaaatttggtgtcttatagctctgtaataatgaatgggtttcgacttgcttatatagcttaaaatacatttctggttatcaaaaattgaggccaagcgtggtggctcatgcttgtaatcccagcactttgggaggctgaagctagtggatcgcttgatctcaggagtttaagaccagcctaacaatcatggtgaaacctcatctctaccaaaaatataaaaaattagccgaacatggtggcatgtgcctgtggtcccagctagttgggatgctgaggtgggaggattgctcgagcctgggaggtggaggttgcagtgaggcaaggtcatgccactggactccagcctgggcaacagagccagacctggtctcaaaaaaaaaaaaagaaaaaaaaattgaacttgttatttttcagagaggttcacctagttcttagaagtgactaacatggccgggcatggtggctcacgcctgtaatcccagcactttgggaggccgaagtgggcggatcacaaggtcaggagatcgagaccatcctggctaacacagtgaaaccccatctctactaaaaatacaaaaaattagccgggtgtggtggcgggcgcctatagtcccagctattcgggaggctgaggcaggagaatggcgtgaacccgggaggcagagcttgcagtgagccgagatggcgccactgcactccagcctgggtgacgagtgaggctccgtctcaaaaaaaaaaaaaaaaaaaaaaaaaccaagacgtgactaacataaatattttgctgtattaggcttctcaaagatgccctgcatgatgtacagtttagtacccgatacgaacatgttttgggtgctctcctgtcagtaggaggaaaacgacttagagaagaacttctaaaacagacgaaacttgtacagcttttaggaggagtagcagaaaaagtaaggcaggctagtggatcagccagacaggtatgtacccataaaaggtaatataaatgtgttaatgttaaaggaaggatctttatggtgctgactaattaagttgctattctttattggtagactcccagtagaactctaactatacccatgctatttggggcagataaattcaaagattgtttaaaatatataggaacatatttcacaacctattaaaatcagtgattttcccatgcttatttatttccatgcttatttattcctttctgatgaaaattgttttcttgaattcctttacctccactatcaaagtccacagtattttcatcacaccaaaaagaaagcatgtccccattttcccctcccagccactaaactgttttctgtcaatatggataygtctatacttctatatggatattctggacacttcatggacttttctgtctagtttctttcacttagcataaagttttcagagttcatctgtgttctagcatgtgtactacatgccatttttggttgaataatattccattgtgtggatataccacatttggtttaaacattcatcagttggtggacatttgggttgtttccactttttgactattaataataatactgctggccaggcgtggtggctcatgcctgtaatcccagcactttgggaggcccaggcgggcagatcacgaggtcaggagatcgagaccatcctggttaacatggtgaaaccccgtctctactaaaaatacaaaaaattagccaggcatggtggcgggcgcctgcagtcccagctgctcgggaggctgaggcaggagaatggcgtgaacccgggaggcggagcttgcagtgaaccgagatcgagccactatactccagcctgggcgacagagcaagactctgtctcaaaaaaaaaaaaagaatactgctatgaatattcatgtataaatttgtgtttaaacaactgtttccacttaggaatggcagagctaggtcatatggtagttctgtgcttaactttttggggaatcatagaattattgtctgtagcagctatatcactttacattcccaccagcaatatagaagggttccagtttcaccacatcctcaccaacattgttttttttcctgttttttgattatggccattctagtgggtgtgaagcagtatctcgttgtggttttgagttgaatttccctagtgactaatgatattgagcacattctcatatgtttattggccatttgtattctttggagaaatatctattcaaagtcctttgtccattttaaattggaatgtcttttttgttgttgagttgtaagagttatttatatattttggatactagacctttatcacatacactatttgcaaatatttttttcattctgcagttgtctttttaattccttaatagtgtcctttaatatattaatacaaaaatgtttaagtttgatgaagtccagtttatctgtttttttcttttgtggctcatgcttttagtgtcatatctaagaatccatcattaaatctaatgccataaagatgtacacctgtgttttcttctaagcttttctagttttagctcttatgtttaggtctttgatccgttgtggtatgaagtagaggcccaactttattcttttgaatgaggttatccagttgtcttagcaccatttgttaaagagaccccctccttcctcttgaatggttttggcgtacttgtcaaaaatcagttgaccctgtgcttgcttcggtaacacatatactaaaattggaatgatacagagaagattagcatgccccctacactacgatgacatgcaaattcgtgaagtgttctgttaaaaatttttaaataaaaaagttgaccacatatatgggtttttttctagactctcaattctatatcatatatgtctatccatatgctatatttgtttttttttttttttcctttttttccttgagatgaggtctctctgttgcccaggctggagtgcagtggtgtgatcacaattcaccacagcctcagcctcctgggctcaagtgatcttctcgcttcagcctcccaagtagctgggaccacaggtgtttgccaccatgcctgtctttttttttttttttttttttcttgtagggacagggttttgccatgtttcccaggctggtcttgaactcctgggctcaagcagtcctcccattttggcctcccaaagtcctaggattatagatatgagccatccacccagcctatactttttttaattaccatagttttatagtaagttttgaaattggacaatgtaagtcctcctactttgttctttttcattattatttttggctattcaggggacacttgcaatttcatatgaattttaggaaccgtgtatccattgctgcaaaaaggcagttggaattttgataagaattatagattaatttggggaaatattacatacaatcttaattataaactattacctctatatacattgtttacctgttttctctttactaaacaatactgcaatgaactttggttggtgtgtacatttttatttctttgctagtatttctttcagaaaattcctacaggtgaaatagctgagtcaagagcgacatgtatttttagttataatagttgttacattgctctacaaaagaagctacacctgtgtacacctctctccctaccaataagttatgaaatcgtttcctaacacaggatgttgttttaaattttcatctgataggtgaaaaactgcattcatttttgtttggcttctatttctttgactattagtgagctttaacattttcgtatacattggttggccaaatgtacctttgcccactatatttatagcctttggccattctagttttatagtaaaaattaactctctttagtaacaacctttttttcaccgtttgacaactgggcattttataaattgtatccacagcataacttgtctgaaaaatagatcttcattttcattatgtacttacagtatcacatctctttctataggttgttctccaaagaagtatggaacgagtacagtccttttttcagaaaaataaatgccgtctccctctcaagccaagtctagtggcaaaagaattaaatattaaggtgacacataaaatacttataagttcatattacatttgaaaataataggaagaaggcaaatgggcaggtatgcttaaggcaaatgaaggtaaaacctgcacaggttggttataagcatggatggttgtgattaggatccatatttatcttagcatatttttttacctaaccaccattcctgggaaaaaaaaagtataaaattatttactgccttgggcttcatttttttaaattggtctcacctttttatttatttatttatttatttatttatttatttatttatttattttttgagacaaagtctcactcttgcccaagctggagtgcagtggtgcgatcttggctcactgcaacctccacctcccaagttcaagcgattctcctgcctcatcctcctgagtagctgggactacaggcacacgccaccatgcccagctaatttttgtatttttagtagagatggggtttcactttgttgaccaggctggtcttgaactcctgacctcgtgattcgcccacctcggcctcccaaaatgctgagattacaggcatgagccaccatgcctggcctttttttttttttttttkgagatggagtcttgctctgtcactcaggctggaatgcaatggtgcaatctcggctcattgcgacctccgcctcccaggttcaagtgattctcctgcctcagcctcccaagtagccgggattacaggtgcctgccaccacgcctggctaatatttgtatgtttagtagagacggggtttcgccgtgttggccaggctggtctcgaactcctgacctcaggtgagccaccatgcccagctggtctcactgtcttaaattagctttttagtcggtttcattttaaaagtaagatttgatcattgctaataaaatttttagtttttgtgaatacttccatggctaattaattacaatagtaccataaacagaagaatggaggtctcacatcacagtgatttagaagaaggaaaaggatatcacaagacgttgtgttctgttgatggattaagacatttacaaagctcaaactttaaagtttgtgtctcaagtttttgcttctctgcctagcgagatgatattttagtcatatatgctatgtttaagtttcaaaaagtatttttgcgtatctgttatcttccagagagtctagaaaagcaattctaaattagccgggtgtggtggcgggtgcctgtaatcccagctactcgggaggctgaggcaggagaaytgcttgaacccaggaggcagagattgcagtgagctgagattgcaccattgcagtccagcctgggcaacaagagcaaaactctatctcaaaaaaataaataaataaaatgaaaaagcaattctcatgtgttatttcatttgctgtaattcaaaggaacaggtgtttagctgggcatgttggtgcatgcctgtagtcccagctactcaggaggctgaggcaggaggatcacttgagcccaggagttagaggttgtgggaagctatggttgcatcactgcattccagcctgggtaacaaagcaagacgctgtctctaacagaaataaaaataaaaaataaatctaaaaacaagacacaaaggaagaagtgaaaggggaaatgcgtaggacaaaaaaaaattctaaatccattttcatttatctttctaatgcttaacatgttgtatttgcagtcgtgttccttcttcagttctaatgctgtccccctaaaagtcacaatggtgaatgctgaccctatgggagaagaaattaatgtcatgtttaaggtgagtaaataatgttactgttttttaatggcaatttagaaatttttttatcaaattactttcccaaaattgcaaaggtgattttgtttaatattttttttattatttatttatttatttttacacagggtcttgttctgacgctcaggctggagtgcagtggcaccatctcggcttactgcaacctccacatcctgggttcaagtgattctcctgcctcagcctcccaagtagctgagattacaggcacctgccaccatgcccggctaatttttgtattttttagtagagacggggtttcgccatgttggccaggctggtcttgaactcctgacctcaggtgatccacccacctcggcctcccagagtgctgggattacaggtgtgagccatcgcgcccagccaaaaattttacgtgttttgatcatgatttgtacattttgaagacaggatgaagaattttagtttaattcaatgagttggacacgtggaggttcataaagattgcttctacttgaaccacttttgatatatatataataaattcctttgtactcacatctggttttgaactctatatttggttttattgatgtaggtgcctttttctaaaccagtaatatctgttttgaatacaagaattttatgtgttaagttttttttttttttgaatttttttttttttttttttgttttggagactgagtttgctcttattgcccaggctggagtgcaatggcgtgatctcagctcactgcaaccttcacctccctagttcatgcagttctcctgcttcagcctcccaagtagctgggattacagacacgtgccaccacgtccaactaatttttttatttttagtacagacagggtttcaccatgttggccaggctggtctcgaactcctaacttcaggtgatctgcccgtctcggtctcccaaagtgctgggattacaggcgttagccaccatgcccagccaagttttaatattttttaaggcaaattctccttattcttttccataattttcttggctagtctcagaatgtattccttattatgtgtttttaaattattttatccagtttaaagaaaatgaaaacttattcaagttttagttaaaaagtaattcattttggggggttaatttttttaagtaaacttttcattttgagataattatagattcataggcaattgtaacaaactgtacagaggaatcctgtgtactcttcttcatagtaatatcttgtataactgtagtgcagtatcacaatcaggatattggcattgatacagtcaaaatgtagaacatttcatcatcccacagattctccatgttgcctttttagaaaattgaatataggccacatatggtggctcatgcctgtaatcccagcactttgggaggctgaggcaggcagatcacmtgaggtcagaagttcgagaccagcctggccaacgtggtgaaaccccatctctactaaaaatacaaaaattagccaggtgtggtggcaggcacctataatcccagctactcaggaggctgaggcaggagaatcagttgaacctaggaggcggagattgcagtgagccgagatgacccctctgcactccagcctgggtgatagagcaagactcagtctcaaaaaataaataaataaataaataaataattgaatataattcacataccataaaactgaaccttttaaagtgtacagttcagggaactgagatatgaagaggttaagtacctttccctagaatgctgcagaaaaataaaaaggcagttcattttataggtgtgtgcaaccatgcccagctaatttttgtgtttttagtagaggcggggtttccaccatgttggccaggctgatctygaactcctgacctcaggtgttctgcccactttggcctcccaaagtgctgggattacagctttcatagtatgtaatctgttaagtcttttggagatgtacaagtttcattttgtttccttgatttcaaggttggtgaagatcttcggcaagatatgttagctttacagatgataaagattatggataagatctggcttaaagaaggactagatctgaggatggtaattttcaaatgtctctcaactggcagagatcgaggtaagtttattagctgtgtcttgatgtcttatttttttccttgaacttagcttaaagtgtacctgccgtaaacatcctgatgcagataccctggtatcacagttgtttcttattttaatccagtgttactttattgattcagttgctcataattaagtctctttgaaaaataacttagtggccgggcatagtggctcatgcctgtaatcccagcactttgggaggccaaggtgggtggatcacatgaggtcaggagtttgagtccaacctgggcaacatggtgaaaccctgtttctactaaaaatgcaaaaattagccaggtgtggtggcgtgcccctgtaatcccagctgcttaggaggctgagatgggagaatagcttgaacttgggaggcggaggctgcagtgagccgagattgcatcactgtattctaggctcggtgacacagtgagactctatctcaaaataaattaaaaaaaaatttttttaacctagtgtagcctaaataaatgctttgcagtaatcagaggtgtccattaattgacccagtgaggactgtatgggctttagcttttaaacttcacaagaatgccatatctctgggtgcaatggcactcacctgtaaacccagcatattaggacgccaatgcatgaccatcacttgagtctaggagcatgaaccagcccaggcaacacaggcgaaccccgtctctacagaaatgcagaaatggtctcagctgcacttcatgatcagggtcagaagattactttcagctaaagtgtgtaaggcgcagtgaatcatgatcatgcaactgcacgtcaacccaagtataacacgctaggccttgtctcaaaacctaataaatcaaataaaggcacaatctaagtaaaagcaacttttgacatccgggttaacaaatcgaaggccattccaagttaatgatcggcccacaggannnnnnnnnnnnnnnnnnnntcttttccatacttttcttggctagtctcagaatgtatcccttattatgtgtttttaaattattttatccagtttaaagaaaatgaaaacttattcaagttttagttaaaaagtaattcattttggggggttaatttttttaagtaaacttttcattttgagataattatagattcataggcaattgtaacaaactgtacagaggaatcctgtgtactcttcttcatagtaatatcttgtataactgtagtgcagtatcacaatcaggatattggcattgatacagtcaaaatgtagaacatttcatcatcccacagattctccatgttgcctttttagaaaattgaatataggccacatatggtggctcatgcctgtaatcccagcactttgggaggccaaggcaggcagatcacatgaggtcaggagtttgagtccaacctgggcaacatggtgaaaccctgtttctactaaaaatgcaaaaattagccaggtgtggtggcgtgcccctgtaatcccagctgcttaggaggctgagatgggagaatagcttgaacttgggaggcggaggctgcagtgagccgagattgcatcactgtattctaggctcggtgacacagtgagactctatctcaaaataaattaaaaaaaaatttttttaacctagtgtagcctaaataaatgctttgcagtaatcagaggtgtccattaattgacccagtgaggactgtatggtctttagcttttaaacttaaaaataatgccatatctctgggtgcagtggctctcacctgtaatcccagcattttaggaggccaaggcaggaggatcacttgagtctaggagtttgagaccagcccaggcaacacagggagaccctgtctctacaaaaatgaataaatrgtctcagctgctctggaggatggggtgagaggattacttgagcctaggaggttaaggcttcagtgaaccatgatcatgctactgcactccaacccaggtaaaacagtgagaccttgtctcaaaacctaataaataaataaggccatatctaagttaaatcaactttgatttcatttttataaaataaagtcatacaaagttattttctactaatagcagatttctatcttactatttattgaactgttttgaaataatggatgtaaaacatcctaatatctgatatgtattatgtgctcaataaatggcagccatcattattcttattcaacaratgtttgttgtttaccatctataaaatggtaagaatatatggtactcatattttagaaggaagcaataatatgtacaagtaatcagagtatgctttaataagctgaaagctctaaaagttgtaaaggcaataccatcaggttttaaacgaaagatcatctgctgttggtggaaatgagaaacacttcacaaattctatgcataggcactaggaaatcacctgaaagataatcgtccttccaatatttgccattcaatttatgcttaaatgcctgtagtgaaggggaattcactgcatttcaaggcggttcattctatcctgtgtagctctgatagctatagatttctttttcatattcaggtgattaatgggaactgagtcctggtgtcttttacccattggttccagttctgttcagagactatcatataattaagttaaatccatcttcacccttaccagtagtgtggcttcagattctgaattccaaattcttcagccatttatgaaatattactttaaattaccttatcaccttattattctccttgcaaatggttcaggtaatctgttgtctctaagaatggcacctggattttgtagaatacaaaagggtgggcatagtgtcacacatgtgaaactattcataaataaaatcagtaagttgtcatcataccagcttctgctaagccatgtcttggccatcctgtaacttgtacattttctttttgttttctttcttttttcagagatgggatcttactctgtctgtcatacaggctggagtgcagtggtgtgatcatagctcactgcagcctcaaactcctgggctcaagcaatccacttgcctcagcctcccaaaattagcttgatatgatggcatgcacctgtgacatgccaccacacccagctaatttttaaaatttttcataaagacaggggtctcactatgttgtcgaggccggcctcgaactggtctcacgaaatcctaccacctcagcctcccaagtagcagggagtgtaggcatgcaccgctgtgtccagctatgtacttgtacatttttgtgtcttagaaccatgtgtaggacgttagctattaactttgttatatttgatacactacttttcaatttgttgagttcgttttaaaacctgatttttgagtgttacagctcttttagaattcacatagcagaggctgggcgcagtggctcatgcctgtaatcccagcactttgggaggccgaggcgggcagatcccttgaggccagaagtttgagaccagcctagccaatatggtgaaaccccacctctactaaaaatacaaaaaattagccaggcgtggtggtgcatgtctgtagtcctggctgctgggaggctcaggcactagaatcacttgaatccgggaggcagaggttgcagtgagcccaggtggcgccactgcactccagcctggaaaacagagtgagactctgtctcagaaaacaaccagaaaaaaaggagccaaatgaattcattctgccatatgtaactagactactagaattacaatctgtccccacatactttctatcggggtaccctggcagccttggtcaacttctgtttcctccaatcctttgtccaaagcagagctctgttttcatatattttattttaacacaaatgcatctccttcattttaaaaatgtatcaattaatattttaattgtataaataatatttgcacatagtaggatatccagatagcatatagtagaataaattgaaaagtaaatgttcgttttctctcatacctttatcctcaattctaggtaccgtctttccacaatataactacttatgtagccttctggaaatgttttgtgtatattctaatatgcacaaccatccttcttttcaaacacagaaatacagttctccatctggattttgtctttaacattatttttgagatctttctatcaaagcacataattcctccctcattgttttcttttgtgtaaatatcacataatttattgtttgatacttattttatttttttttattttttgagacggagccttgcactgttgcccaggctggagtgcaatggcgccatctcagctcactgcaagctccgcctcctgggttcatgccattctcctgccttagcctcccgagtagctgggactacaggcttccgccacgacacccggctaattttttgtacttttagtagagatggggtttcaccatgttagccaggatggtctcgatctcctgaccttgtgatctgcccgcctcggcctcccaaagtgctgggattacaggcatgagccaccacgcctggcagatacttgttttaaaggagtcagagagaaaacaaaaaacaatttgttcagccaggcatttatatttcaattaggaggccaaaatatatacttgagatttaatcatatcacaaggtcagtcttcatctcttcttcctttcgaaagtgctaacgtattctggaaggttcttatcttgcccaaatatatgattaaagaaatttttttgtgctgaagtgggacagtgtgtgtcttatatgtaactttaccagctaggtcagtgtcttcttgtttgtaattaaaatagttttcctcactgggcacggtggctcacgcctgtaatcccagcactctgggaagctgagacaggcggatcactgaaggatgggagttcaagaccagcctggccaacatggtgaaaccctgtctcaactaaaaataaataaataaatacaaaaattagctgggcatggtgttgggcatctgtgatctcagctagttttcctttgggaattagtacatggatgtacagactagagagtctcaaatagtcaaaattgatgtttacatgttagatacttttgaaaataaagaacaattttgattggcggccagacttgattttttttattttttattttttttgaagacagggtctcgctgtcgtccaggctggagcgcagtggtgtcatcttgactcactgcaacctctgcctcctgggttcaagtaattctcatgcatcagcctccaaagtagctgggactgcaggtgtgtgtcaccatgcctggttaatgtttgtatttttagtagtggtggggttttgctatgttggtcaggatggtctcaaactcctgagctcaagtgatccacccacctcagcctccaaaagtgctggaattacaggtatgagccaccattcctggccagacttgattttttttttttgagatagagtctggctctgttgcccaggctggagtgcagtagtgctatcttggctcactgcaacctctgcctcctgggttcaagggattctcctgcctcagcctcctgagtagctgggattacaggtgcctaccaccrcgccccgctaatttttgtatttttagtagagacggggttttgccatgttggccaggctggtctcaaactcctgacctcaagtgatccacccacctcggcctcccagagtgctaggactgcaggygtgagtcactgcacccaggcagacttgaatttttttgaaggtaacaattgctagctggtttcctatgtcaaagattgaaaactataactttttaaaaggcatgcagccataaaaagaatgagttcatgtcctttgcagggacatgaatgaagctggaagccatcattctcagcaaactaacacaggaacagaaaaccaaacatctcatgttcccactcatatgtgggagttgaacagtgagaacacgtggacacagggaggggaacatcacacaccagggcctgttggcaggtgggaggcaaggggaggaagagcattaggacaaatacctaatgtatgcggggcttaaaacctagatgacgggttggtaggtgtagcaaaccaccatggcacatgtatacctatgtaacaaacttgcacattctgcacgtgtatcccagaacttaaagtgaaatttaaaaagtaataataatttttaaaaatgtttaaaggcttactttggagagacagttttacatagcttaatattttatcattaaaggcatggtggagctggttcctgcttccgataccctcaggaaaatccaagtggaatatggtgtgacaggatcctttaaagataaaccacttgcagagtggctaaggaaatacaatccctctgaagaagaatatgaaaaggtaattagcatgtctcctcattctaaaaagctttgtcaaaaatgtrttacagaggttttaagttctttcattttccagctctggtgaccaaatagtcatttagtctaagtcaggaaaagagcatctttttctaagtataggaaagaatgtaaaacaagacgcatttaatggcaggaatctgagtgaaaccaatgctaaattacacccccaaaaatttccaaacacatacttagaggccagcaaaacagaggcatttttctaatgcagaatgttatatttcccaaagatcttggaggaaggtagggaaatgagtaaaatgggctgcatcatgtggtagttaagaacataaattaggggccaaactctctgggtttgaattcaggtcccgtcccaagtcactcagcaacagggccttatgcaaatttttttttttttttttttttttgagatggagtctcactctgtcacccaggctggagtgcagtggcgctatctcggctcactgcaagctccgcctcctgggttcacgccattctcctgcctcagcctcccaagtagctggggctacaggcgcccaccaccacgcccaggcaattttttgtatttttagtagaggtggggtttcactgtgttagccgggatggtctcgatctcctgaccttgtgatccgcccgcttcggtctcccaaagtgctgggattacaggcgtgagccaccgcacctgacctatgcagattatttaacatctttgtgcctcagtgacctctgctataaagtattgtatatattatggtattatagcatatactatggctgtaaacataagcattgagatttttgtgaaaattaaatgatttaatatatatgaagcactgcatagtgaaagttgtataattgatagctcttattactggaaacatcaattttctgttttactattatttagaattacatatgaggaaagggcagtctttcaggacataggcctctaatgatcctaacttggcctaaggaagacccaagaaaactgagtggtgatgtaggaagactcccattttaatgtcatggagctgcctagtttatgtttcattaatggatcatctttatagacatacacgtgccatctgttgacctacaaagctaatgcaggggaattttgacctttgttagatcttttaaactgtgagatcactcccttttcatacttctttgtgatctggggaaaaaaagcagtgcagcagaagccaatacttgttttagtaatgttggcccttttgtgattcctggtgaggaaataattgccaagtagcatacattaagcatcttttatgaatttggctttttaatgtgatttaataagtaagagggaatataacttagtgaagtcatattgcctggatttgaatcctcactctgcaacttaacaattatgtgatcttgggcaaacaacctctgtttcagttttccatctgtacaattgttatgatgatagtacctaagtcattgattgttgtgagattctaaatatgttaatgtatacacacacacayacatatacacacatacacagagaagtgcctggtttgtgctaaatgctatataaacatttgctgttatcatcattggtaatgatttctggggaattatggaataaaattaactacatgggcaagtcaggccaagtgaatgtaccactcagaaatacagtattttgtataaataaactaaatacacatgctttagattaaagaaaaacctcattgtatgtgtcttgctgtatccttctatacaatattatattagtaattttaataatccccaggagagggaggacttaagatgacacacagggaatcaccacatgggaaacaaaacacattacttgtattcttggatgttttcagatataagctgattttccttacacatgtcttccctgcaggcagaggaaaaaaagcaaaaatcttctatccatcatgtttgtggaatcctgcacctcaccgattctaagcagcagagtcagagaggtgcaggattccacaaacatgacgcttaaaagatgtttgaaggcagcacgtacctaagtagggactggtagagatcccagacttttaaaagagaaaagctagagaaggggcagtaaccacccttagaagagtgtttttgtttttgaaatatgaaaagattggcttttattactatatcccagtttgtatgctattgagagagtggattacaatagtgtttttaaagagtgataaattactttactatttataaactctgcctcttttaaaaataattcattttctaaaataattgtgtatgktttttataggcttcagagaactttatctattcctgtgctggatgctgtgtagccacctatgttttaggcatctgtgatcgacacaatgacaatataatgcttcgaagcacgggacacatgtttcacattgactttggaaagtttttgggacatgcacagatgtttggcagcttcaaaaggtataatgttattgctgttgccaaagaaatgaggcacttcctgtttcacaaattaaagtttgtctcaagctttgtgttttgcctcgcggctccatttgaacataactgggaatgaaaaaggcccaaagatatgaccataccacatagtagacaagaatgtgtgtaaatgtgtataaactttgttttgttgttgttgttgttgttttgttcttttggtatttttttgagacggagtcttgctgtgtcgcccaggctggagtgcagtggcacgatctcggctcactgcaagctccgcctcccgggttcacgccattctcctgcctcagcctcctgagtagctgggactacaggcgcccgccaccacgcccggctaatttttttgtatttttagtagagacggggtttcaccgtgttagccaggatggtctcgatctcctgaccaagtgatctacccgcctcggcctcccaaagtgctgggattacaggcgtgagccaccatgcgcagctaaactttgttgaaatgaattaagggacatatattttttttatctacttagcgataactcttagaaagaaatgatttcgtgtgtataacggcagtaagtagttttctatgtttgtaactactgtttgatctctttgggtatgtggatttataaatatcaccttattttcatatgtaaggaaatttcatacataagttctctctaaataatgagattattatgtgatagctttcttgaaaaatgttattttagaggccgggtgcagtggctcacgcctgtaatcccagcactttgggaggccaaggcgggcggatcacaaggtcaggagatcgagaccatcctggctaacacagtgaaaccccgcctctactaaaaatacaaaaaatttgccgggcgtggtggcgggcccctgtggtcccggctactcgggaggctgaggcaggagaatgtcatgaacccaggaggcagagcttgcagtgagcctagatcgcgccactgcactccagcctgggcgacagagcaggactctgtctcaaaaaaaaaaaaaagaaaaaaaaagaaaaatgttattttaaaattatggaaattcaaaagtgtgtggtattaagtttcctagttggaaatggctgtacctcagatagcttagtttaataatcatgtaatagcactattggagtatcttctgtaaataatattttgtatgtactttcattttaaatagggatcgggctccttttgtgctgacctctgatatggcatatgtcattaatgggggtgaaaagcccaccattcgttttcagttgtttgtggacctctgctgtcaggcctacaacttgataagaaagcagacaaacctttttcttaacctcctttcactggtaactattctttataagcacttaattagttttatattaatgcatctatgtttcaatacttaaaaaagattattttgtgattttggaataaaatttgctttagtcacaaatgtcagatacattattgctcagatattttaaacttactgccgtgtgaaataagccagacacaagagtacctactgtctgactccatttgtataaaatacaaaaaataagtcagtagagtggctccccttgggatgggaagtattagtagctggaccccaaggcaggcatctgatatgctaatgaatgttttgtgtattaatatgggtgtgaattgtcaacattcactcagctgtacaatgaagatttctgtactttcctgggtatatattatcgttaagtaaaaagtaaaaaacacgaacccactatgattattatgagtaaattgatatggtaataaacagaaggctacaattgtcttaagtgaaataactcagaaatagaaagttaaatattgtgtgttctcacttataagtaggagttaaataatatgtatacatggacataaagagtagaataatagacattggagacttgggagggtaggaagggggatggtggatgggagatgagaagttacttagtgggtacaatgtatactattcaagtgatgcactaaaagcccagactttatcactatgtgatacatacatgtaccaaaattgtacttgtaccccctaaatctataaaagtaaaaacagtggcctaggccaggcgcggtggctcatgcctgtaatcccagcactttgggaggctaaggcaggcggattgcttgaggtcaggagttcgagaccagcctggccaacatggcaaaaccccatctctatcaaaaatacaaaaaaaaaaaagttcgccaggcatagtggtacgtatctgtaatcccaactactcaggaggctgaggcaggagaattgcttgaaccctggaggcagaggatgcagtgagccaagatcgcacccggctccctgcccccccccccgcccccaaaaaaagagcctagacaaaaggagatctggatctcacaggtttaattctataaactgggtttttgaccaccaccaacaaattgcttgacttccttggtgtccatttccttatttgttagataatcacctaggtccccaatacactaatgaacccctcaagactgattatttttgtttgctttagttctgattacttgagcagcccacaggaaggagtgaggaacaaatgttttaaaaaatttaactcacagaactttttgttttcttctacagatgattccttcagggttaccagaacttacaagtattcaagatttgaaatacgttagagatgcacttcaaccccaaactacagacgcagaagctacaattttctttactaggtaaagcatatttaagtatattgcagaaggaacataaaatattgctttgatttgttttaccttagtttaaacaaatgctatttatcaaaattctaatttataggaacaaattctgattcatagtaattgcacatagtaggctgtcaaaagttgatttactaataaatacaaaggatttgcaataatattttttaaaatatacttatttkcytcaaaatatctcaaggtttatttaatatgtaatttsaatgataaaaacatatttttctacagtgccatgtgccattttaaaatcttttttaattttttattttgagactgagtcttgctgtttcatccaggctagagtgcagtggtgcaatctcagttcactgcaacctcgcttcctgggttcaagcgattctcctgcctcagcctcctgaatagctgggactacaggcgcacaccactaagcccagctaattaaagtctctttctaaaatgttatctgtactaatctatttttcaggattttgtcttaacaatttccatggagacctttggtgtttttaatccagcaaaccctggtcactgctgcaagtaaactattacatggcatagtacttgaaacacatataccaatgactggtacttgaatttgttattgctttaaaaacagatcttccagccaggcgcagtggctcacgcctgtaatcccagcactttggaaggccgaggcgggcggattacctgaggttgggagttcaagaccatcctgaccaacatggagaaaccccgtctgcactaaaaatacaaaattagccgggcatagtggcgcatgcctgaaatcccagctactcaggagactgagacaggagaatcgcttgaacctgggagatggaggttgtgatgagccgagattgcgccattgcactccagcctgaggaacaaaagcgaaactctgtgtcaaaaaaaacagatcttcttgacaaatatgttctaaaggtctggtgatcaggctggttactgactgctgctgccacatcatcacaataccacagcagggaggggtacctgagctcatgttcttttctctcctttttctcttgccttcttcctctcagtggagaagaggtataaaacactgactggacttccctagtctcaagagtctgggctgaaatgaattgaaggaagctgacttttgtatagccttccaaactaatcctgacaatttaggtattgatgggttttcttttgctttgttttttaagagagattcattggctcccctgggcaaaaccacaaagcaggcatgtattcgtctgcctgcttagacttccataacaaaatactatagactagtggcttaaacaacagatatttattttctcacagttctggagtctatgaggtccaaaatcaaggtgccagccaattacattactgttgagggctcccttgccagattgcagatggccaccttcacagtgtgtcctcacatggtagggagaactagctctctcatctcttcttagacggacactcctattggattagggctctactgtttatggcctcatttaacctttattacttccataaaggccctatctctaaatacagtggcagtgttggggcttcagcatatgaatttgagggaacacaaacattcagtccatagtggggcaaaagcctgtgtttgagattctctcacttctctttttgaatatccttcttctttctagcttccttaaccttgtttctgagacttatttcctttgcttgcctaaaatgttctttccagacctactttccatcctgtcaaaacttctttttccaactgaatgaaaatatgattacctgaaggagtctgacactgaattctacagttctactgtttgataggagagaatttttaaaatttggattactttgtttttgttcttttgtttttgtggttttttggagacagtctcactccagcacccagtgtggagtgcagtggcgcaatctcagctcactgcaacctctttcctcctgggttcaagcaattctcctgcctctgcctcccgagtagctgggattataggcgcacaccaccacacctggctaatttttctatttttagtagagtcagggttttgccatgttggccaggctggtctcgaactcctggcctcaagtgatccgctccccttggcctcccaaagtgctgggattacaggcgtgagccaccgtgcccagcccttggattactttctttcccacctatttgtcatctttctcctttattaaaaggaaataaagtaatgaagtcatctttttagcattataccaatcatcatctatctataatagctctttaattagtcttggggaccctacagggttcaagaaaaccaagcatgaattctttcttgggctaaattattttgttggggtgagatgtgttttaacaaacctttggcctgtagaacaaagggaatccttggcaaagtgacaatctgcttaatatttttaaaggaatgaaagtggtttttgtcatttattacattgaaagaatttaccatgtgttctcatttactgttaacgaattttctgattattttgtaggcttattgaatcaagtttgggaagcattgccacaaagtttaacttcttcattcacaaccttgctcagcttcgtttttctggtcttccttctaatgatgagcccatcctttcattttcacctaaancatactcctttagacaagatggtcgaatcaaggaagtctctgtttttacatatcataagaaatacaacccagataaacattatgtaagtttgatttcaatattcataaacaatcatgcatgtattattgttgtcctttstacttcctttgctgattctgctaaagttgcaagcatttgttctattcatgcttgtttctttcatgaatggtccataaataagtaaatgtacttgaagcatccctaacttttttggtatttaattcttgctatatttgcttcaaacaataaggaccgagtggtaaagtgtgcttgttgtaacaaatttaatcaatagagaagtatgtaaagtaaaaagtcaaagttcctattccagtctctgatacaaaacacgcacacattgtctttgaacagatacaggaacttcagcatgctttttcctcttcgagactgtagtgttatcttttttgttgctacttttcacccttgtgctaccttttttgttagataatactttccagaactgccagtttttaaatttttggcaaatagatagtctttaaaaagctattttactactgtttttcatctattctgttaataaattttagtatctttttgtgtgtttattaaagttatcctaacaccattttattgcatagtccattctctccccaatatatactactacctttaagtttatatatatatccccaaatttgtttctggcctgctatagatagatcctacttggcaccagtattatatgctttaaagtattgtaactttataaaagtttaaataggccgggcgcagtggctcatgcctataatcccagcactttgggagcccgaggcaggtgatcacctgaggtcaggagttcaagaccagcctggccaacatggtgaaaccccgtctctaataaaaatatgaaaattagctggatgtggtggcatgtgtctgtagtcccagctactcaggaggctgaggcaggagaatcgcttgaacccgagaggcagaggttgcagtaagccaatattgtgccattgcgctccaggctgggcaacagagcaagacgctgtatcaaaaaaaaaaaaaagtttaactagccagcaaaacaagttttccttcactaccccccataaaccttttgcctttttttaactgactttttatttatttttattttattttatgttatgttattttatttattttataaatataaaagagtctcactctgttgcccaggctggagtgcagtggcgcaatctcgtctcctgaaacctgtgcctcccaggttcaagcaattctcatgcctcagctcctgaatggctagctgggactacaggcatgcgccagcacrcccggctaatttttgtatttttagtagagatggggtttcgccatgttgcccaggcacatggccaggcgaattcctggccccaagtaatccactcatttcggcctctcgaagttctgggattatgtgagccaccatgcctggactattttatttattatttatttttttatttttttatttttttgagacggagtctygctctgttgcccaggctggagtgcagaggtgtgatctcagctcactgcaagctctgcctcccgggttcacgccattctcctgcctcagcctcccaagtagctgggactacaggtacccrccaccacgcccggctcattttttgtatttttttttttttttttttttagtagagacaggatttcaccatgttagccaggatggtctcaatatcctgaccttgtgatccacctgcctcagccttccaaagtgctgggattacaggcgtgaaccactgcgcccggctgcctggactatttttatttctactttttgagaaacggtctcgctctattaccctggctggagtgcagtgatgcagtgttggctcatttggctcacttggctcactgtagccttgacacctgggctgagttgatcctcccaccttagcttcccaagtagctggggctacaggcatgtgccaccacagttggctaatctttatattttttatagaaacagagccttactatgttgcacaggctggtctctaactccagggctgaaatgatcctctcaccttggcccctcaaagtgctaggattataggcatgagcaaccgtgcccagcttacacttttaagttctagtttatctatcttaggatggttatgatcactcttaaaatgtagttagatgtgttataaatacaatgacttatatttgctttttcctattggtgacatatatattaccaagataaaagtacttgaactgcatataacaattaagctataaatttcttttctgtcaggaaaggaggtttttttgcttcttggtcttttagctaagatcaatataggaaagaaggtttttttgagatggagtctcgctctgttgcccaggctggagtacagtgccatctcggttcactgcaacctctgtctcccaggttcaagtgatttgcctgcctcagcctcccaagtagctgggattacaggcacgcaccactatgcccagctaatttttgtttgtttagtagagacgtgcttttactatgttgcccaggctggtctcaaactcctgacctcagctgatccacccacctcggcctcccaaagtgctgggattacaggcatgagccactgcacccggcctggaaagaaggttttaaatataaattttatgtgtttgtggtgtgatttcttttcagatttatgtagtccgaattttgagggaaggacagattgaaccatcatttgtcttccgaacatttgwcgaatttcaggaacttcacaataagctcagtattatttttccactttggaagttaccagggtwtgtattcatccttgtacattaatcctttttgtaggaaacaacttgttatcaaatgtaggtagaaagctttgtgttaacacttagtaagatattatcggccatgtgtggcttattttcctttgtgtcataaagacctaatacaaaagcagacataaacaaggaactggaagtttttgttgaatgaataaatgatcgggatgttaaaatatgagattttcagacttctaactcttattgaagctttaactttgctgtctctaccatagtaagcaacacaagataataatttggcatcttggttttgaaaaaagtcatatcctgccaggtgtggtggctcacaagcttataatcccagcactttgggaggccgaggcagggagataccttgagtccaggagttggagactagcctgggcaccatggcgaaaccccatctctataaaaaatacaaaaattagctgggctggtggcacatgtctgaagtcccagctactcaggaggctgaagtgagaggattgattgataccaggatgtggaggttgcagtgagccaagatcacatcactgcattacagcctgggtgacagaatgagaccctgtcccccccccccaaaaaaaaagtcatatgctaaatcagtgtagaaataatctatcatgggccatactgagctcctctgctaaaaaaactgaagcatggccgggcgcggtggctcacacctataatcccagcattttgggaggccaaggcgggcggatcacgaggtcaggagatggagaccatcctggcyaacacggtgaaccgtctcttctaaaaaatacaaaaaattagctgggcatggtggcaggcgcctgtagtcccagctacttgggaggctgaggcaggagaatggcgtgaacccagaaggtggagcttgcagtgagctgagatggcaccactgcactccagcctgggcaacagagcgagactccgtctcaaaaaaataaataacaagcaaacatcatcgagactgtcaatcaaaatcttagttttgtatctgataccctttgggagtcttcagttttaatgtagctcaatgaccagtagatttcctgtgtcgagttttttcatattttcttcagactagatttcaaaagtgaggatgaggtgaagtgggtattagagtttgtttccgtgtacagtttcatttttccactgccaccaaaataagtggaattaagattatcctttcagcaccttacttaggccttatgttattatttgtggattttactggtatatgtaatatttatggctgattgagtagtgattttattttttagggatcagatctggataaaatatttatgagtgattaaacttgagaagaaatattagaaaataagtattaagtaggtacaaaagtaattgcgttttttgccattacttttaatgtcaaaaaccacagttacttttgcaccaagctaataataaatataggaaatcaacacatacaccttttcaaccaaggctcataaaaggataatgggtgactgaacgatgtcatctccaatactttgaagagaaatcacaaaaaattacttattttattttgagacggagacttgctctgtcacccaggctggagtgtaagtgatctcggctcactgcaacttccgcttcccaggttcaagtgatttttctgcctcagccttccgagtagctgggattataggtatctgattataggcatcagcacgctaatttttgtatttttagtagagacagggttttatcatgttggccaacctggtttcaaactcctgacctcaagtgatccacccgccttggcctcccaaaggccatgagccaccgtgcccggccacaaaatattactttataatggattaagactactttgtctttaagtatatatgaaaaagtgtatttctaaggaaatattgtacttatttaaatcccacttgtttttgtttttcttttgtagctttcctaataggatggttctaggaagaacacacataaaagatgtagcagccaaaaggaaaattgagttaaacagttacttacagagtttgatgaatgcttcaacggatgtagcagaggtaaccttactaaatgagaagtaataacatcttataccttttgtgttacataatatttaaactaatgaattgctttctctttattcttagtgtgatcttgtttgtactttcttccaccctttacttcgtgatgagaaagctgaagggatagctaggtctgcaggtgagattattttttttctctttattggtaactcatgatctgcaagtctgtaacttctcratgaatgtggtagaatgacagcaggcttactagctgtagtctgagaatgggaggagagtattctttctaagccagtctatttctgaataaatataactttcctaatagatgtgattactaaagaagtataaatcaatgacctatcaggttgtttactcctttttcccctcccttctgtccgcaccacatgtgacagtcttgaaaataaagcaaaatccttttattgcagcttgaaccactacaaccagtaaataaagatgaaaatatttgtattttcagatgcaggttccttcagtcctactccaggccaaataggaggagctgtgaaattatccatctcttaccgaaatggtactcttttcatcatggtgatgcatatcaaagatcttgtgagtgattacaaagaatgatggttgtagaggaaacccttaccttggtaggaagcattactattaagggactgcttttctttttaggttactgaagatggagctgacccaaatccatatgtcaaaacatacctacttccagataaccacaaaacatccaaacgtaaaaccaaaatttcacgaaaaacgaggaatccgacattcaatgaaatggtaagttaaaatcatttctagaagtttccttggtttattatttttttaattttcatttttaagttctgacgtgcgtaagcaggatgtgcaagtttgttacatagctaaacgtaccattgtggtctgcatacctatcaacctatcacctaggtattaagcccagcatgcattagctatttttcctaatgctctccctcccaccatcccatcccccaacaggccccagtgtgtgttgtccccttctctgtgtccattgttttgagattttaaattttaaaacattttaaggccaggcgcagtggctcatgcctgtaatcctagcaatttgggaggccgaggtggatacatcccttgagctcaggagtttgagaccagcctgggcaacatgatgaaattccatctctacaaaaaaaaaaaaagaaaaaaattagctaggcatggtggcacgcacctgtaatcccagctcctcgggaggctgaggtcaaaggattgcttgagcccaggaggtcaaggccacagtgagtcatgatcatgccactgcactccagactgggcaacagagtgagagaccctgtcccaaaaaaaaaaaaattttaagtttttaggtatcagttgctgaactatttgttatacagtgtacaccaataacagtccaatagtatttaacaaaatgatataaaatagagccctcatagaccttaggagccataattcaactacgtttccagtgtgtgaacccccctctataatagtcacaaaaagtggttgtctagtctgtgcttaattacttccagactattcagtttgtcttagatcactccacctcttagatgattattattattatattattttatttatttttagaggcagagtttcgctgttgttacccaggctagagtgcaatagagccatgttggctcactgcaacctccgcctcctgagttcaagtgattctcctgcctcagcctcctgagtagctgggattacaggcatgtgccaccacgcctggctgattttgtatttttagtagagacaggtttctccatgttggtcaggctagttgtaaactcccaacctcaggtgatctacccgcctcagcctcccaaagtgctgggattacaggcgtgagccaccatgcctggcctctagtttttattttttagctaatgattagtcttgctttgtatctctctatgtcagacatcacaggaatgatagtacaatccaagactcctgaaacacaaaatgtccttctaaagtattcagacaaaacctaccggatgtgtcataatcagtgtcactcattgtggtcactctttggctaatattctcacgttttcacttgaaatgttccaagaaaccaaacaaactttaatttgtgatttactgttcttttttcctttgttgtagcttgtatacagtggatatagcaaagaaaccctaagacagcgagaacttcaactaagtgtactcagtgcagaatctctgcgggagaattttttcttgggtggagtaaccctgcctttgaaagatttcaacttgagcaaagagacggttaaatggtatcagctgactgcggcaacatacttgtaaactagtgaatgtytgagctttggaagcatgaacagttataaacgtgcatgcatacatgcacacacacacagacacacacacacacacttgttaattttgtatagtatttttatacttggacagaacttataaagttaaatatacttgctgcatttcaacacatctgttggaccaacagtcacataactaacctttttgaatttttggaagccattgctgttttaaagtcattatgtagaatgctacaaaccctaaacktaatatatactaattcctgaaaaagactttgagacagtactatgtcagttcagccacctattttgcattgttttctataaggaggcaaagcatatgtgttttcctgttatgcaccttttatagcctttaccactgtgtaatgttcacaaacaccaaagtaaaggaaaaatgcaggatgttaccgtaaaatccagctgctattcatggagctgaaaaacaaagcacaaataatagatagctaagttaagaactactaagtagtttatagaagtagggaaaaacgtaatactgctttttattcatgtctttaaagcctttttcagaataagtgccaatcactgatgttgtaaataatggtgccttaactttatatgcttccctggcacttcgtttctgatttttttcctgatttgataaataattagtacatagttttcactcacttgcagcttactaaagacaagaaattatgtacatgtactaatgtttttcccacaaaaaaatcctttacttctgatgtatgaattagttatctaaatagttaagcctaatacctgaataagactcaccaatgtgattgtacaataaattctatcattccattaaaatcctacatttattcccaggaatggtaatttcacctccctacatctatactccactccctcagtaaataagtgaaaattgttaacccatgtgcccattcctgagtagggcagactcttcacaagaggcccatgacaagaattctagggtccagattgaactttaatatagacctttgtctgtgtagaccagtttgtcttgtaaactgtcttacttatgtgtgtaaacattttacattcacatgaaaagttattttcctttatataattggattcagaatcataagggacaggactgaaattattctacagtaaccagtaagaataagattcggccgggcacggtggctcctgcctgtaatcccaacactttgggaggccaaggtgggcggatcacctgaggtcaggagtttgagaccagcctggccaacatggtgaaaccccgtctctacacaaaaattagccaggcgtggtagcgggcatctgtaatcccagctacttggggggctgaggcaggagaatcgcttgaacccaggaggcggaggttgcagtgagccgagatcacgccactgcactcccgcctgggtgacaagagcaaaactccatcttaaaaaaaaagaaaaaaagagtaagattcatttttattagttactcaacttcagacacaattttgttaatttggatatatacatatatataataagaactcatggttagaatagaaatacagatactttaaaaatggtaatagaaattgtaccaatcaggttgctgtgagaaaactgacaaaatatgcaataaagaataccaagagagaaaggacaatcgccaattcagtttcccagaacagaatttttatgaactgcacaaatgtttaatgtaaatggtgatacctacagggaagaaatagaagagttgataatatatcactgggacggggtgggggaaagacttgaaatttttggtgcctaacactaatggtccatatgtagttaaacccatgagtatggtatatgaatgtcttttttaaatgttaaaatgtgttgtctatttaargttaattaaaatgcagatcaaagcaccaccatttgctttttccacagatcattaacatttccttaaagtatgtaagtacctttgcaaatgcaaatgtactagtaattttcacttaagcttttgagaccgaattccattccaccagttatcacttagccactgtaatttaaaaacaaacaaacaaacaaaaactgtcttggtagaggtcgttaattagactcaacatgtactgcctttttgcagtctattatgacagtgtcttttagcacaaataatagagctaaaaaatgtcctgtcacttccattataagaaatctggattcatatctaagtgtatattataatactgtacagttaagagttcagaacaagtggtaatgttttctcttaatttaactcattttgtgccttctttactcattcaaacacacatacattttacatatagtttatttctttatgaaatgctaatcttcagcccgtaccaaaaagtagagtggagcctctttgcactactactatcaataaattttaaatcagttggatttttaagcattttttaaaagctgacattaaagtaaatctaaaaaaagtttaacaaactggccaagacactaatttttatgtataatcacaatattttatactcacctttattgactaaaaataattatgctacatgttgtcctgcatcagaagaattatttcttcttgccagtgttttgggatttgaagataatggttcactcaaagaacctattattttctctactgaggaacccaatgtagaacttgcactgatatttttattactgcctttatatgaatctataggtatctaaatgttaaggcatgtatgatctttgatcatttcttttttcaaattaaagttgtataaaagtttcaatatcttgccttaaattagttgcctattctttctaggattcaaatattgtgacatttaaaaaagaaaacattcacttttgaaacttagacttcagatcaaaaaggactgaacccccactatcataatccatacattcatttccatgttgtttgactagcagtgcatatatgaatgaatatggtaattaatcttacctataagaaccaaatactttaattatattaagatagtgaataaagatgtataatatttttattaataccttgaatatattcagtggattgaatgtgacttcataactgtactacgattgtattaaaatatttctggaataaaagaactctgctatcatttctttccttgttgacatactaacatttttggttccagactttgcaatgagctcactcttgatgttctttgcatctcacccaggagtctattaggtttaataatcctgaatttcagaactaacctgttagttgcccctaaaaatgttcaaatagagattctgacttctgagtgttaactcttttttttttttgagacagagtcttactttgtctcccaggcctggagtgcagtggcgacatctcggctcactgcaacctccatctcctgggttaaagcgattctcctgcctcagcttcctgagtagctggaactacaggcacacacaaccacgcccggctaatttttgtatttttagtgtagcaggacaagccgcagacaaaactcctcagacgcggagttaaaggaaggggtttattcggccgcgggcattggcaagactcctgtctcgagccgagcccccccagggagcaattcctgtcccttttaagggctcacaactctaagggggtgcgtgtgagagggtcgtgattgattgagcaagccaggggtatgtgactgggggctgcatgcaccggtaattagatcggaacaaaacagggattttcacagtgcatttctatacaatgtctgtaatctatagataacccattaggtcaggggtcaatctttaactaccaggcctggggtgtggcaccgggctgtctgcctgtggatttcatttctgccttttagtttttacttctttctttggaggcagaaattgggcataagacgatatgaggggtggtctcctcccttattaatagatggggtttcgccgtgttggccaggctggtctcaaattcctgacctcaagtgatccgcccgcctcggcctcccgaagtgctgggattacagccaccacgccgggcctgagagttactctttgaaggtctggattgcaaccactttgctacagtccatcactatttcttagaagggaaatgcttctgtgagtatagtccctggcctttggtacttaagatattaagtagtcctgcaacagttatattacagacgtatctacagaactgagaaatgtggattcttcttatacagtaccttcatcctgtaatggtaacagtgtgaaggtgtggttctctgaccctaagatgacatgtgaaagggcccagagaccatgaaagagcagtaactcaattagagccagctttgggggtgacagtttctgtcagaaaaaaaaggatctttatttcatccttactcttctgaaaaacttcattatgcaagtctttaatcatttacaaaatcagataacagcataatgaactccatgggtgaatccatcacacagcttcaatagttattaccttagggctaaccttgttccatctgtattaactaagatgttcctaggtatggatatctttgaatgtannnnnnnnnnnnnnnnnnnnnnnnnnnnnnnnnnnnnnnnnnnnnnnnnnnnnnnnnnnnnnnnnnnnnnnnnnnnnnnnnnnnnnnnnnnnnnnnnnnnnnnnnnnnnnnnnnnnnnnnnnnnnnnnnnnnnnnnnnnnnnnnnnnnnnnnnnnnnnnnnnnnnnnnnnnnnnnnnnnnnnnnnnnnnnnnnnnnnnnnnnnnnnnnnnnnnnnnnnnnnnnnnnnnnnnnnnnnnnnnnnnnnnnnnnnnnnnnnnnnnnnnnnnnnnnnnnnnnnnnnnnnnnnnnnnnnnnnnnnnnnnnnnnnnnnnnnnnnnnnnnnnnnnnnnnnnnnnnnnnnnnnnnnnnnnnnnnnnnnnnnnnnnnnnnnnnnnnnnnnnnnnnnnnnnnnnnnnnnnnnnnnnnnnnnnnnnnnnnnnnnnnnnnnnnnnnnnnnnnnnnnnnnnnnnnnnnnnnnnnnnnnnnnnnnnnnnnnnnnnnnnnnnnnnnnnnnnnnnnnnnnnnnnnnnnnnnnnnnnnnnnnnnnnnnnnnnnnnnnnnnnnnnnnnnnnnnnnnnnnnnnnnnnnnnnnnnnnnnnnnnnnnnnnnnnnnnnnnnnnnnnnnnnnnnnnnnnnnnnnnnnnnnnnnnnnnnnnnnnnnnnnnnnnnnnnnnnnnnnnnnnnnnnnnnnnnnnnnnnnnnnnnnnnnnnnnnnnnnnnnnnnnnnnnnnnnnnnnnnnnnnnnnnnnnnnnnnnnnnnnnnnnnnnnnnnnnnnnnnnnnnnnnnnnnnnnnnnnnnnnnnnnnnnnnnnnnnnnnnnnnnnnnnnnnnnnnnnnnnnnnnnnnnnnnnnnnnnnnnnnnnnnnnnnnnnnnnnnnnnnnnnnnnnnnnnnnnnnnnnnnnnnnnnnnnnnnnnnnnnnnnnnnnnnnnnnnnnnnnnnnnnnnnnnnnnnnnnnnnnnnnnnnnnnnnnnnnnnnnnnnnnnnnnnnnnnnnnnnnnnnnnnnnnnnnnnnnnnnnnnnnnnnnnnnnnnnnnnnnnnnnnnnnnnnnnnnnnnnnnnnnnnnnnnnnnnnnnnnnnnnnnnnnnnnnnnnnnnnnnnnnnnnnnnnnnnnnnnnnnnnnnnnnnnnnnnnnnnnnnnnnnnnnnnnnnnnnnnnnnnnnnnnnnnnnnnnnnnnnnnnnnnnnnnnnnnnnnnnnnnnnnnnnnnnnnnnnnnnnnnnnnnnnnnnnnnnnnnnnnnnnnnnnnnnnnnnnnnnnnnnnnnnnnnnnnnnnnnnnnnnnnnnnnnnnnnnnnnnnnnnnnnnnnnnnnnnnnnnnnnnnnnnnnnnnnnnnnnnnnnnnnnnnnnnnnnnnnnnnnnnnnnnnnnnnnnnnnnnnnnnnnnnnnnnnnnnnnnnnnnnnnnnnnnnnnnnnnnnnnnnnnnnnnnnnnnnnnnnnnnnnnnnnnnnnnnnnnnnnnnnnnnnnnnnnnnnnnnnnnnnnnnnnnnnnnnnnnnnnnnnnnnnnnnnnnnnnnnnnnnnnnnnnnnnnnnnnnnnnnnnnnnnnnnnnnnnnnnnnnnnnnnnnnnnnnnnnnnnnnnnnnnnnnnnnnnnnnnnnnnnnnnnnnnnnnnnnnnnnnnnnnnnnnnnnnnnnnnnnnnnnnnnnnnnnnnnnnnnnnnnnnnnnnnnnnnnnnnnnnnnnnnnnnnnnnnnnnnnnnnnnnnnnnnnnnnnnnnnnnnnnnnnnnnnnnnnnnnnnnnnnnnntctcaaatacctgggctcaagcaatctgtccaccttggcttcccaaagtgttgggattacaggcgggagccatcatgcccagccaattcttgtattttttcatttcaagaatcagtatttagttctttttatttgtttgaatcatgatccaggaaagacacacaccaacactgtcaagaccatttaaagaaaaaaagttgtggttttttttgaccatttaaaaaaagaaaaggtttttccaataaatggtgctggtacaactggataaccacatgcaaaagcatcagtaggactcttacaccacataaaaaaattaactcaaaatggatcaaagacctaaacataagagctaaaagtggttgggcacagtggctcacacctgcaatcccagtactttggcaggtcaaggtgggaggatcccttgagcccaggagttcaaggctgcaataagccagatctcatcactgcgctacagcatgggtgacggagcgagaccttgtctctgggaaaaaaaaaaaaaaagaaaaaaaaaagccaaaaatataaaactcttagaataaaacaaaaacctgggtgtacacacatctttatgaccttggatttgatgattcttagatgtgacactaaaagcatgagccacaaaagaaaaaaatggattaattgggacttcatcaaaattaacttttgtgcatcaaaggacgctattaaagaaataaaagacaacccatagaatgggaaaaaatatttcccaatagtgtatctgataaaaggaatcagatatatgtaaagaattcttacaactcaacaacaaaaagacagtccaatttaaaaatgggcaaagggccgggcatggtggctcacgcctgtaatcccagcactttgagaggctgaggcgggtggatcatctgaggtcaggagttcgagaccagcctggccaacatggcaaaaccctgactctactaaaaaaaaacacacagaaactagctaggcgtggtggcacgctccagttaccgggtttcttttgtgggtagtaacatatcaggaattagtggtaatgattgcacaacattgtgagtgtaataaaagttacgaagtaactgtatacttcaaaatagctcctgtgatcccagctattcaggaggctgaagcacgaggatcacttgaatccggaaggcagaggttgcagtgagccaagatcgtgccactgcactccagcctggatgactgcagagcaagaaaaaataaaaaaaataaaatgggcaaagggccaggcgtggtggctcacgcctgtaatgccagcactttgggaggccaaggcgggcagatcacctgaggttgggagttccagaccagcctgaccagcatggagaaaccccgtctctactaaaaatacaaaattagctgggcatggtggtacatgcctgtaatcccagctactagggaggctgaggcaggagaatcgcttgatcgtctcaaaaaaaaaaaaaaaaaaaaaaaaaaaaaagtccatacaatggacttttattcagtcataaaaagggaaaaagtactgatacgtgctacaacatgaatgaaccctgaaaacatgctcgggaagctggggagtggctcatgcctataatcccagcactttggaaggctgaggctggagggttgcatcagcccaggagttcaagaccagcctgagcaaaatcgtgagaaccccgtccctttaaaaaaaagttgggcacggtggcttacacctgtaatcccagcactttgggaggccgaggcagatggatcacctgaggtcaggagtttgagaccagcctggcaaacatgacaaaactccatctctggacatttcatataaatagaatcataaggccggacgcggtggctcatgcctaggctggagtgcagtggcaccatctcggctcactgcaacctccacctcctgggttcaagcgattctctgcctcagcctccggagtagctgggattacaggtgcctgccaccatacctggctaatttttgtatttttagtagagacgaggtttcaccatgttggccaggctggtcttgaacttctgacctcgtgatccacccgcctcggcctcccaaaatgctgggattacaggcatgagccaccgtgcctggccttatgattctatttatatgaaatgtccagaataggcaagtccatgagacagcagattagagtggggagaggagactggagagccaacagcttaatagttaccgggtttcttttgggggtaataacatatcaggaattagtggtaatgactgcacaacattgtgagtgcaataaaagttactgaagtaactgtatacttcaaaatggtaaaaaagtgaatttcatggtatgaatttacctcagtaaaaaaatattaaaaattcagtttgtaaagctatttgatcactgaacttctgaccttaataaatgcattaacagtaactattttctagatactaaaattataactttccctttgtctaaaaaattagaagtttccaatttgcaaaagcagctctcacaaaagcatgccacatataaaggcaatggagcatggcttaatagaaggtaaacaccgtttgattaaaactcagcactacatcgtattttatcatcattactgaatatacaaacattaccagataaaataactatggcaggccgggtgcagtggctcacacctgtaatcccagcactttgggaggctgaggcgggcggatcacttgagatcaggagtttgagaccagcctggccaacatggtgaaacccccatctctactaaaatacaaaaattggccgggcgtggtg

SEQ ID NO: 94400 - DNA, 14108 bp, Homo sapiens
gttttaactcctgtgccagatctaatgattggtagcatcttcctaaagtaatgtgttcagaagaattctgagactccataggaaagatcactataatcatttaaacagtatctggcacggacaagggaataagtgtggaagcttttatgtaagacattttgtatccctgggccaaatgatctcttaaattcctttccaattccaaacaatgtaacataaatataaaaaaacaaggaacacatcaaataaatgtaaagcacattaataaatgacaaaaaacattcactactataagaatagcaccaagcctttcacgaggaatcctcctccatttcccaaacacctttcactaggcccctcctcccaacactgccacactggggaccaaatttcaaggtgttgtggtgggaccaaagcaatcatccaaatgctatccaaaccaaagcattcttcccctccccctcaactcatattcttctcacatacgtcatttcatctcagtagtctcaaaagtcttaacttgtcccagcattaactctaaagtccaaaatccagtctcattgaagactcaggcaagttcctttcagctatgagcctataaaataaaaagcaagttatttacttccaagatataatggtgggacagatatttggtagactttcccattccaaaagggagaaataggccaaaaaaaaaaaaaaaataagccccatgtaaatctgaaacccagcagggcagacatgcagaattaaatccttttttttttctttttttgagacagagtcttgctctgtcacccagactggagtgcagtggcacgatcatggctcactgcagcctcaatctcctggaccctactgaccctcctacctcagcatcttaagtagctaggatcacaggtgtgtgccaccatgccaggctaatttgttttacttttcacagagacagggtctccctatgttgcccaggaaggtcttgaactcctgggcgcatgtgaccctattgccttggcctttctaactgctgggattatattacatcttaaagctccagaacaatctcctttgacatcgatgtcctacatcttgggcacactggtgtgaggggtgggctcccaagaccctcggaagacctgcccacataggtttccaggatgtagcccacgtggctgctctcacaagttggagttgaatgcctgtgacttttcctagctggtattgcacactgcctgtggctctactattctgggggcccagtggtggctctgcccctatggctccactaggtagtgccctagtagtgatttcctgcggtggctccaccctgtagcaagtttctggatgggctcccaggctttcagatatatcctctgaaatctaggtggaagccacctagcctccatgactcttgtattctaggcacttgtagacttagtaccatatggaaaccatcaagacttactactttggccctctggagcagtggtctgagccatacctgaggctgttaaagtgatgactgatctacccagatgggttgagatttggggagcagcatcctgagttgatgtaaggcagtagtgccccaggttcatcctagaaaaccattctgcccttccaggcctctgggcttgtgttggaaaggacagccatgaagatcttcaaatgccggtgtagccttctaattgttttgactatttgcacctgtctcccttttagccctgctaacttctttagcaatccgttgctcagccagtcttgattcctctccttaaaattcccttttattctctaccacaaggccaggctatgaaatttccaaatttttatgatctgcttcatttttaattataaattctggctcttaggtcattcctttgatgccttaactaatcataagctattaaaagtaaccacactaattcttgagcactttgctgcttagaaatttcttccatcagacatgctaggtcattattcttaggtttggccttccacaaagctgtagagcatagacataatgcagccaaattctttgcaactttataacaagagtgacctttgttctacttttcaaataaatactcattttcatctgaaatctcatcagaatatcctttactgtctaattttagtcactaccacttacccaatctctaaaaagttgcaaactttccctcatttttttagtcttcttttgagtacttaccaaaagcaccctaatgctcccattgctgcaataccatctccttctagcctgctctttcaaactcttccaacttctgccctttacccagttcaaagccacttccccatttgcaggtatctttatagtaacaatccactccttggtaccaattttatgccttagtcaatttagtgttgctgtaacagaatacctgaggctgagtaatatataatgaaaagaggtttatttacttcacagttccgcatgatgggaagttcaagggcatagctctggcttctgatgagggatttcatactacgtggtcataacgtggcagagaaggtcaaaggggaaatagacacgtacaaagaggcaaaacccaaagggcattatggctttattaacagcccacttttgaggtaatgaactcatttccatgagaactaaactaatccattaccataagaaataattcaatctcaccagagagaaaactcattgactactgtcagaatggcactaagcccttcatgatgggtcatccctcatgatccaaacacctctcactagtcaccatttctcaacactgccacattggaggccaaatttcaagatcagttttggtaggaacaaacaaaccatatccaaaccacagcaatcagtttctaaaagtaggcataatgtgttgttcataatagtattctcattctctaacaaagtgcctgctacatagtatacaattaaaaatatgggtcaaatcagtgaataattataattactattgacagtagcactttacaacttaaacattacaaaatgtagagaatttgattttaagactgagttttttgatgacccagaatgtcttctgccttaattatacattcccaaagcatagcatcgtggcagatacattgtaggaaacaacaaaaaaaaagtagaattgagttgaaatgtccattggccattaaccatgtagactgttgtcccatttgctgaggagtcagtcattaaaccagatgttaatttgtgtttttcccacctccactccaagctagttattataaatttaataaacacatgcttccccaaatcttctgcttaacactttactaacacttagagagatgtgaaatagagaaatgtgatctgtatatatttccaatatatatagtaaaaaaactgaaaggaaataaaactatccactatttcgttcaagtatcatcaacataaacaaacctgtttgattattttaactgacttcacctcttcaagccagtccagaaactgtcagtccaattcttcatttgacttatttttattgatggagctgataaaaccaatataagtatcaaaatgctttgtgaataaagagttagattaaaattatacaagataaacagttgaggtaaaatctgtaccttctctgatttgtttatctaagttacttgtttgtagtatttgccttaaaattctatttcaaagtttagacttcctgctgccacagaaactgcagcattcagtaagaccaggatgtaatttttaaattcaagtaaataaaaaaagtgtttgtgcccaagaatttgactttatagtcagtgttcaggaatgtatttattttatatatggtcatctaaagagaatttaggggtagagagaagcagggaaaatggttccgttcagcctcactttaagaggaatggcagtgagtggcaaaaacacagattttagagttattaatatttagagaactgctatttcccagctgtgtaaccctggaaaggttacataatttcagtttctccatcaaaaatgtagagataataatatctacagtattagccaaggttctccagataaacagatagatatgtaaataactacatatatataaatctctctctctatatatataaatatcaatatctatatatctatgggtatagatatataggaacagatagctatatttatgttcatacatgttctatatgcatatctatgttcatatagatatctatacatctataaagacatgcatctatgtatctatgtatattgatcaatgtctacatatcaacaaagatatatatttatgtagatatacatagatatgtatatatttctatctgtattaaatatatatgtctatgtatacatatatagcaagagagaaaggaaagagagattcatgtaagaaattaatttaaaagatacattttaaggaactggcttacacaattgtggaggctggcaagtttgaaatctgcagagcaagctggctggctgaaaattccagagtttacgttgtagtcttgagtctgcaagcagtctggaagcagagttgctgcttcctcagtgggcctcaacctttttctcttaaggctttcacatgattgaatgaggtctgctcacctttatgaagggtaatctgttttacaaagtatattaatttaaatgttaatcatacctaaagaacacctttacaggaacgtctggactggtgtccaaactactaggcatcatagtctagctggcacgtaaaattaaccctcgtacctacttttcagggctattgtgaagattaagtgaaattatatatgcagagtacctagcagagtgcccagagtagatgcacaactttcatgatgcccagtcacaataacacaattgggacttggataaaaaaagggagaagagaaaggtgttctatacaagttctatagccattgtactttactcaaaagtaggagaaggaaaatgaaagtgctaaaaacatgtgcccattactgtctctctgccccttccaatacattactcgagtagtagtacaaattaaaagctcaaagatttttaaaatctcagtcagttaaatgattttgtatgtcaaagcttttaaatttgtacaggaaataagatttactttattgtaaaaggcaaccatgctgagcttttgtaatggaagagtgaggaacatggcagtctttgatacaacaaaacaattcaacaaagaaaattatttaaaacacaagttaaatttctggaagttttccctaagggcatagagcagtactgtcataaggaaatgacagaagatggtaactcagttccacagaaataaatgaagagagccaaaagggtaaagaagaatatacatattataaaaactctatatttgtgttctgctctattctcatagtctctttaaaagacatactatataatgttataattaaaacaatgtacttatggatttgtaatatatatagatgccatacgtataattataatagcatgaaaatggcaaaaggggatagagtttataggagtaaatatctatacttcactgaaattaagttaatacaaatctgaaggaaattttgataaattaaaatgtgtattgtaagccctagacagaaactctaagaaaataactaaaaatacaattttaaaataatcaacagaattaaaagcttacactaaaaatatattcaattaacttaaaagaatacagtaaaaaaggaacaaaaatgacatgagacagaaaacgaaaagcaaaatcacagatgtcaatccaactatatcaataataacattaatgtcaccagattgaacaatccaatctaaaagcagataacatcacaaaaaaaaaacgacatccaattttatactttctatgacacacacactaaattcaaagataataactggttgaaagcgaaaggatgaaaaacaacaataagatgaatgactatacttataccacagaagatagattttaaactaacaataaaagttatttatagagaaagaaggacattttataatgaagaaagagtcaattcatcaagaagatacaacaattataaaaactatatcattgaaagcctttyctctaagatcgggaataagacaaggacgcccactttcacaactgttattcaacacagtactgggagtcctagcttgagaaatcagacaagataaacaaataaaaggcatttaaattggaaataaagaagtcatattatccttgtttgcagttaatatgatcttaaatttggaaaaacctaaagattccaccaaaaaaaactattagaactgatgaacaaattcagtaaagtggcagaatacaaaatcaacatgcaaaaatcagtatcatttctatatgccaacagcaaacaatctgaaaaaagaaatttaaagtaatctcatttacaatagctacaaataaaataaagtacatagtaataaaattaaccaaagtgaaagacctctgtgatgaaaactataaaacattgatgcaagacattgaagaggacacacacaaaaaatggaaagatattccatgtcatagattggaagaatcaatattgttaaaatgcccatactacccaaagcaatctacagactcaatactaaccctatcaaaataccaatgacatccctcacagaagcagaaataaaaccctaaaatttatatggaagcataaaagactcagaattcccaaagctatgctgagcaaaaagaggaaaactggaggaatcaaattacctaacttcaaattacaaagctatagtaaccaaaacagtgtagtactggcataaaaacagacacataaaacaatggagcagattggacaacccagaaatgaatccatacaactaaagtgaactcattttttttcattatttagatcatatttgttcgtataatgaaactcatgtagataagatctcacatacttaatacagtgaattacccccatacaatggaaaaaattatatttaatgttyctagatcaatatgactgttaatttctgcacaatgccaactcaacacgataaaatgtaatacattttccaaagytgagagcacagctaaactttcaaaaaatacaaatatatatatataatatacaaatatagatttatagatcaataataactgttatgcatartagcagcaacagcttttccaggttctgtaatcatctgaacacaattatagagacatctagcaaaccccatttaaaaagggagaaaaggtaaaaaacaaaaccccagaaaatagcaatgttctgtttttcttgtggtayttggcactattttttaaattagcttctgaatcatcatctggaaaaaaaattctggaataatatcactaaacacagatctgatgaagcactgtcactactatgtatcataaagcaggaacaagatatttcacattcacagaggtatcatacagtactctcctacatctataatactacaggatacaattaaaaaggcattatttgaggcttgactctacctttccagcagagagcccaaaggatggtatgacagctcggtaaagaaagaggaagtcaaattgtccctgtttgcagatgacatgattgtatatctagaaaaccccattgtctcagcccaagatctccttaagccgataagcaacttcaggaaagtctcaggatacaaaataaatatgcaaaaatcacaagcattcttatacaccaataacagacaaacagagagccaaatcatgagtgaactcccattcacaattgcttcaaagagaataaaatacctaggaatccaacttacaagggatgtgaaggacctcttcaaggagaactacaaaccactgctcaatgaaataaaagaggacacaaatggaaaaacattccatgctcatggataggaagaatcaatgtcgtgaaaatggccatactgcccaaggtagtttatagattcaatgtcatccccatcaagctaccaataactttcttcacagaattggaaaaaactactttaaagttcatatggaaccaaaaaagagccctcattgccaagtcaatcctaagccaaaagaacaaagcgggaggcatcatgctacctgacttcaaactatactacacggctacagtaaccaaaacagctcagtactggtaccaaaacagagatatagaccaatggaacagaacagagccctcagaaataataccacacatctacaaccatctgatctttgacaaacctgacaaaaacaagaaatggggaaaggattccctatttaataaatggtgctgggaaaactgcctagccatatgtagaaagctgaaactggatcgtttttttacaccttatgcaaaaattaattcaagatggattaaagacttaaatgttagacctaaaaccataaaatccctagaagaaaacctaggcaataccattcaggacatagacatgggcaaggacttcatgtctaaaacactgaaagcaatggcaacaaaagccaaaattgacaaatgggatctaatgaaactaaagagcttctgcacagcaaaagaaaccaccatcagagtgaacaggcaacctacagaatgggagaaaatttttgcaatctactcagctgacaaagggctaatatccagaatctacaaagaactcaaacaaatttacaagaaaaaaacaaacaaccccatcaaaaagtgggtgaaggtcatgaacagacacttctcaaaagaagacatttatgtagccaacagacacatgaaaaaatgctcatcatcaccggccatcagagaaatacaaatcaaaaccacaatgagataccatctcacaccagttagaatggcgatcattaaaaagtcaggaaacaacaggtgctggagaggatgtagagaaataggaacacttttacactgttggtgggattgtaaactagttcaaccattgtggaagacagtgtggttattcctcaaggatctagaactagaaataccattggacccagccatcccagtactgggtatatacccaaaggattataaatcatgctgctataaagacatgtgcacatgtatgtttattgtggcactattcacaatagcaaagacttggaaccaacccaaatgtccaacaatgacagactggattaagaaaacgtggcacatatacaccatggaatactatgcagctataaaaaaagatgagttcatgtcctttgtagggacatggatgaagctggaaaccatcattctcagcaaactattgcaaggacagaaaaccaaacaccacaagttctcactcataggtgggaattgaacagtgagaacacttggacacaggaaggggaacatcacacaccagggcctgttgtggggtggggggaggggggagggataccattaggagatatacctaatgtaaatgacgagttaatgggtgcagcacaccaacatggcacatgtatacatatgtaagaaacctgcacaatgtgcacatgtaccctagaacttaaagtataataaaaaaaagaaaggtaccttcttagacagcatttcctttcattagctgcacagttctagtactcactattcttcataaacatcagctaaaaactgttaaaaaaaaaagaaacagagaaaaacaaaaccattggattcatacaaagatcatagaatggagacaagcaagacacaatctaaatagtattttatccaatctgttgtgtttaactggtcagagctccgtagaagaaaggagatttcaagtagcacctcaaagctctgaagcacaaccaaaacacagcatcatttcagaccgaagcagtaaccaaacattcctactttgatatggttcaaggatgctatcatcaatattgaatcatctgctcacttatccaggaagaaggggggcttagttactactgtactatgattgtgctcaatcaacacgttacaaaaatcaagctgccataataataataataaaggctcctatacacaggaccaattatcttcagttcttcacctccaagcatccagtgtttacttccacatgtgctcaatgtttagctaagacatataagtgaaatatgtggtatttggttttctgttcctccattagttcacttaggattgtggccttcagctccatccatgttgccacaagggaagtgatttcattctattttatggctgcatagtattttatggtgtatatgtaccacattttctttattcagtccgaaattgataggcttctaggttgattccatgtctttgcctttgtaaatggtatgacaatgaacatagaagtaaatgcatctttttagtatagtgacctattttcctttgggtttatacccaataatgggattgctgggttacatggtagatatgttttaagttctgtgagaactctccaaactgccttccacagtggatgaattaatttacatttctacaaccaacagtgtctaagtggtgaactcattttcgagaaaggtgccaaaaatgtacagtcttttcaataaacagtgctgggaaagctgaatttccatatacagaagggtgaaactagacccctacctctcactatatacaaaaatcaaattaaaatgtattaaagaattaaataaatctaaaacctcaacttatgaaactactaaaagtaaacattggggaaactctccaggacattctggagtggggaaaaatttcttgagtaatactgccacaagcgcaggcaacgtaagaaaaaattgacaaattggatcacattgagttaaaaagtttctgcacagcaaaggaagcaatcatcaaaattacgagacaaaccacagaatgggaaaaaaaaaaaaaaaccctgcaaactctccatctcagaaggaatcaataatcaaaatacataagaaactcaaacaacaatataggaaaaaatctcataatccaattaaaaattgggcaaaatatttgcatagacatttctcaaaagaagacatacaaatggcaaacaggcatatgaagaggtgctcaacatcactgatcaaccaagaaatgcaaatcaaaactaactacaatgagatatcacctaaccccagttaaaatgactttcatccaaatgtcaggcaataacaaattctggcaagatcgtggagaaaagggaatccttgcacactgttggtgggaatgtaaattagtactagcactatggagaacagtttgcaggttcctcaaaagactaaaaatagaactagcacatgacccaatagtcccactgttaggtctatacccaaaagagagcaagtcagtataccaaagagataactgcactcccatgcttattacagcactattcacatagacaagatttgcaagcaacccaagtgtccatcaacaacgaaaggataaagtaaatgtgacacaaatacacaatggagtactattcagccataaaagaatgagatcctattatttgcagcaacatggatggaaatggaggacatcacatgaaataagccagacacagaaagataaacttcacttgttctcacttatttgtgggagctaaactttagaacaactgaactcatggagacagagagtagaatgatggttacaagaggttggaaatagtagtggaggggggacttagggatggttaatgggtacaaaaatataattagatagaatgaataagatgtagtatgtgatagtacaagagggtgactacagtcaacaataatttagtgcacatttaaaaataaaagagtataactggattgtctgtaacaaaagaaataaaagcttgaggtgattgataccctatctactgatgtgattattaaacattgtatgtccatatcaaagtctcatgtatcccataaatatatacaccaactatatacccgaaaaaataaaaattaaaaaaatgcacctaataaaagagccccacagtaaatgaagaaaacagactgaattaaagtgacaagtggccaactgaacaataatagttgatggcttcaataccccattttcaattagtcatctttagaatgctccagccactatcagagtactcattcttctcaagtgtacacaaaatattctgcatgatagatcacatattaggcaataaaacaagaatcagtaaatttaaacagactggattcatatgaaataggctatccaaccacagtgaaaagaaattagaaaacaagaacagaacaaaatttaggaaattcacaagaagtagaaatttaaaaacacattcctggagactcatggcagatgggaggcaggactagattgcagctcccactcagacagacagagcagtgtgtggaggcttacatcataaacttttgctccataacaactgcagaaatacattagtaaaggcaagagaacccacaggccctctgaagaaagcagactgttcctgcaggaatagggagacaccccaaatactgggaaacctgaaggtctatgttacagagattctgaccttacttggagctgagtcaatttagagagccaagagaaatacagggtagagaaaggagtgggaaaatgcctgtgggctcactgggttccctagaagccatttctgccctgcctcagaagggtccttagggagggcagtcagaggcactgggaaaagggcacagggagaaggaaacctctagctcaacactgttaacaatttgaactgattgagaagtctcctggccagaactcaggggagggcgtgaatctggtgtgcagactccacaggcaggagaagaatgaaagccttaattgctttcgcaactggaaggtgagtagtctgaggcaagttctcagccctgctggctcagtgcctggaaacaaactccgtgttgttggggggtgcacggtgagagtgagactggccctttgggttgagtgggggctgggtgaggcctgtgactgacagctttcccccacttccctgacaacatgcatgacaaagtaaaggcagccgtaatcttcctaggaacataactccattgatctgggaacttcacccccatcacccacagcagccacaagaagacctgcccaaggagagtctcagctcgaacatgcctagccctgtccccaccttatggtactttcttacccaccttggtaaatgaagacaaaaggcatatactcttaggagttctagggccccacccaccacatgttcctccccatactactacagctgatgctctcttgaaagtgccactttccaacaagagaccaaccagcacaaaaatagtgcagtaagcaaccaaagctaaggactctcagagtccatcttgcccccctgtcacctccaccggaataggtgctggtatccagggctgagagacccacagagagttcacatcacaggactctgtgcagacaagccctagtaccaacccagagcctggtatactcactgggtggctagatctagaagagagataacaatcactacagcttggctcccagaaagccacatcccttggaaaatggggagaatactacatgaagggaacaccctgtaggacaaaagaatctgaacaacagccttcaggcctagaccttccctcagacagtctacccaaatgagaaggaaccaaaacaccaactctggtaacgtgactaaacaagtttctttaacactaccaaaaaaaattgcactagctcaccagcaatggatccaaaccatgaagaaatccctgatttccctgaaaaagaatttagaaggttagttattaagctaatcagggagccaccagaaaaaggtgaagcccaataaaaggaaattaaaaacaaacaaacaaacaagaagtgaagggagaaatattcaatgagatagcataaataaaaaaatcaaaatgtcaggaaacaatgcacacacttattgaaatgcaaaatgctctggaaagtctcagcaatagaattcaacaagcagaagaacttcagaggtcgaagacaaggtctttgaattaaccaaatccaacaaagaaaaaaaaatatgaacaaagcctccaagaagtctgagattatgttgaatgaccaaacttaagaaaaaattgccattcttgagaaagaagagaaatctaaaagtt

SEQ ID NO: 94401 - DNA, 103339 bp, Homo sapiens
  misc_feature (1)...(103339): n = A,T,C or G
tgaggtggtggccagcatcaaggcacgggaggacgaggcccggctgctggtcgtggaccccgagacagatgaacacttcaagcggcttcgggtcacacccaccgaggagcacgtggaaggtgggccacggcccagggcacagggtgggtgcggtgtggtggctgagcagccactgacacgctgtccccacaggtcctctgccgtcacccgtcaccaatggaaccagccctgcccaggtaagagggtggggtgcccatgagacacagggtgcctctgggggtacccaggcccgacagaggcccccttctccctggagatccgtcctcgaggtgtgctagtgacacccgattttagccctgtcacctccctttaatgcccctgtgggtctcatcctgggtcgtgccacacacaagccacgtggggcccctggggtcggggccactgccttctgtcctctcctgggcaccacctggtaaggagttgccctccagtctctgcctcctcagggagctggcggtggcctcaccccaggcgttgctcacgccggccattcctgcacctgaaccccctctgcaccatgagccggccaggccacctgcctgtcactgccaggcgcccggtgcctgccccgccgcatctggagtccaccagaggcccgaggccccctgccgagtggaggagcacacactgggggggkgtgtgcctctgtgcacatgtgtgcgtgtgcaggtgttgtgtgtgtctgtgaaaccacaatctgcccttggtttcccagctcaatggtggctctgcgtgctcgtcccgaagtgacctgcctggttccgacaaggacactgaggtatggatgttctccactcctgagctcacacgtggggttgctagaggccttggggtaggcgtctgtggagatgtcagcccgggcagtggggtctctgttcaggaagtcctcgtgagccccagccccagcaggcagcctctgttggttgctccctaggaggggccaccgtctggggtgtgggactagggctcactccagacaccccacccaccgtgctcaccccaggatggcagtgcctggaagcaagatcccttccaggagagcggcctccacctgagccccacggcggccgaggccaaggagaaggctcgagccatgcgagtcaacaagcgcgcgccacagatggactggaacaggaagcgtgaaatcttcagcaacttctgagccccttcctgcctgtctcgggaccctgggacccctcccgcacggaccttgggcctcagcctgccccgagctcccccagcctcagtggactggagggtggtcctgccattgcccagaaatcagccccagccccggtgagcccccatcctgcccctgcccaccaggtactgggggcctgtggcagcaagatagggggagagagacccagagatgtgagagagagtcagagacagagacagagagagagagagagagacacagagagagacagagagagagcgagcgagcgcgcggcagccgcggggcgagggcctttgctgctctgccggggcctgctgactgaaaggaatttgtgtttttgctttttttccaaaaagatctccagctccacacatgtttccacttaataccagagaccccccccccttcccctcccccttcccctcccccttgggacgcgctctaaataattgcaataaaacaaacctttctctgcaaaccatttcctccccgccccctcccctcagcagcggccgtcctgagtgggagtccctgggacttcccagtggccaagttggggcgcccagcctcttcgtggggaccttgggtaaggccagggaggcctgatgtggccgtaggagctgcccctgcccacctgccctggtgtgggggtccctaggccacaccctgctccccacccagctaccctgtgcgcctgtgccctgctgggggcctgggctctccgaggggcctgaggatggaggccccamgtccccgaggagggcggcctctggacaggcccctcattccgcgcggcagctcccaggcctggggaacgtaggtgtgtgagagcggcacccgggaaggacgcctggcctytggctcagccctgcttggcgggctcccccgtggacaccctgttgactttgcacttccctcccgggccccgcacccccgaaccgaccaccgatcgaccggcaccgctgttgcytcgtaagccatagcgcatgcgcgctctcagrataaacaggccctgcctgggacccacacgcctctgtcttttctgagcctcctccccgtggggtgagaggggtggagggatgaggctgtttcagggagccccctccccgagtctcagcagctggaaacggtctcgttcctgagcccgtgccctgcatccatctgctcccagccctgctccatctcccccgctgacccccatgggaccccctgctgtgtggcacatcctgggcccatgcccatctctcttatttggcagactcagcctcccaccttcaccttccctgtgaagccatccggccccacacaacacccacacgggccaccctttgcccaattcaccctgcgacctctagcagtcacaggtcaagctttgtaccctgtggcgccctgcctgggtccccagtgtccctttcaaggccgggtagctctgtaaacaggggtgggaccctggcagaggctgggctttgagggcatgaaagttcaggagctggcggtgtccgggctgggaagctggggggccggcggtggatagcatgaggggccagggtccccagccagctgcccgggggctgcttgcttccccagcggacttccaacagctggctgcagctggctctccccacttcctccctcccaggttcatgcacaccccctccccctccctgagtacatagcaaagattgtcacgtccccagccggcctcccaggcagccctgctccagacacgcgagcacgggtgtgtacgaacacatccttgtatgcgattcccaggctctctgccccctcagggacagacatcagccagatcccatctgcaaacacaccaaagctttattcaacaggcgtggcttcctgaagcgtaaagccacttcacagacggtggccacagcggcacctcggccagagccatgcggccatcaragaccctgggcggccgggcagagggcttggttgaggcaggcgtggcagcgagggtgcacaggcagacaggtctgctggccgaagcccaccaagagtccattgatctcgtgccacagctccctrtgggggtgggggctgggtcagtgctgacagagggcgggcggggtgagctcttctccctaggaagccccccacatactcatacctaggcagccaytcctccagggcggygcgggtctcctctggggacttggttgccttcttggtccacctcagcctgttggcgattctgtgcacatgcgtgtmcactgctgctgggaggccaagcggggtgaacaggggcacactccaccagcctagcccgtgcccctccccgcccagaggcgagtctgccaccacccccgtggccctccagttagacattggaaccgcaaagccctggctgcaagcctacatgtgaccatcttggctgcccctgaggtgctggggcaggggctgagccctctgttggggtgcaggcctctctcccatcacctgagccagcctggggggctctgttctgggctgcccactcccaacactggtgctagttggatgtgtgggtggtggggtctctgctttgggcagggcctgggggtgatgactcggctctgcttggagctctattccccacaataacagcgacagctcgcttggacaaacgcttgctgggggccagaccctgccagagagattggccagctcagtgagtcctcatgaggtcctacggatgctgaaaccgaggcccggcaggatcccgactccgaagcacctctcagccctcagcctccccaggaacgtggccctgtccccggaagggtccatccaggcttccctctgtctgtctcctgtggcctgaggctcctctcggcataagcactggctctgggcaccaggctgggtggcaacagctctgcctggcaggccggcatgaggtcactgcctgcagacctagcacctgccactgcagcggtcagggacacagcgggagcatgccctggccggccgcagctgctgtccacctgggttctggctcctgctcccctcagctggccaccccaggcgtctgctcactggggctcccttctcccacccggtggccccggccagctgcagccccagccctgcctcctcctcccgtgtttcccaaagagaaagccgaggcctgcaccagctccttcgctgctgcctagaaaaaggtgtccgagggtgtggggagaccacaaggcctgaggggtcacacccctggggctctgagcctcagtttcctcctctgtaacacggaagtggccatgcttcaaggctgagtcaggccacgtcacgttgtgtgagcctcctgcccacctggacagtgaatgacgaggactgcctcacccactttgtggccagagcttagagaagccaagggcctggcccagagtcacccagccaggaggtgcagagctgggaccggagccagcaatctatggctgtggcatttttttttttttttaaacggagtcttgctctgtcacccaggctggatacagacaatggtgcgatctccactcactgcaactttcgcctctgggtttcaagcgattctcctgcctcagcctcccgaggagctggaattacaggctcctgccaccacgcccggctaatttttttttttttggtgagacggagtcacgctttgtcgcccaggctggagtacactggcgcgatctcagctcactgcaagccccacctcccaggttcacactattctcctgcctcagcctcccgagtagctgggacaacaggcgcctgacacaatgcctggctaattttttgtgttttttagtagagacggggtttcaccatcttagcctggatggtcttgatctcctgacctcgtgatctgcctgcctcggcctcccaaagtgctgggattacaggcgtgagccaccacgcctggccacacccggctaatttttgtatttttagtagagagcgggtttcaccacgttggccaggctgatcttgaactcctgacctcaggtgatccacatacctcggccttccaaagtgctgggattacaggcttgagcccttgtacccagccagctctgacattttaactgagagcgtttctctttcggggaacccctaggaggcagccctggggtctccttgcaggtggtcaggcccacagacacctggagagggaggtatttccacatggctgtctcttgtgcccgctgctcccaaagcccgttccctgcctggctgcgggcagggaccttcccccacagccctgcccaaccacgatgcagcaccccagggacacgggcagctgaggacagccgcccagataagctcaagtgtccactgagaggctggcaggtggtgacgctgggagtctcagtcgggaggaggccctgccccggcgcacctggcctggctctggctctttggggctgctgtggctgttcagcctcaccaggtggccccggctcagaatagaggcccccggcccttggtggccctcttgcccaccagaaagtgctgcaagccccccgcctccggcacaggccccctgcaggagtcccaaaggggcctgggatgggggcacacagagggcagggccaagccctggtttctggactggctgggcccggctgcgtgtggccttaggagccccaaatcctctggacaaagccgaggaggaggcagccccaccccaaacccaggggtctgtctgcacccaactgccaagaagcctccggtgctaggaagagacaccaggacctgggaaaaggattcaaggagggccctccccccagtgcctccmtccccaccctcccctcttctccctctcaaccctcccctcttctccccgcagcacctccctctccaccctccccccatcctcccagcgcctccctccccaccctcytcccccattcccccagcgcctccctccctaccattcccctcctgtccccgcagagcctccctccccaccctccccctttmtccccccagcacctccctccccaccccacctgctgaggggatactcttcctcctccctcctcagtccttacctccccactctgccctcatctcattccagaacttcctgctcctggccctctctctcgcatcatggttttacagatgctgttccttctgctgggaacacacttcctcctcttggcctggctcaccccaccttgctctgcagctctcaggtgaaggatgaccttgggggccttcccagaggccctgggcccaagccaggccccaagagcaccctgcacaaccatcagggtttccactccacgagtggggaattcctcgctccacatttctcccgaatacaacgcagatggagtccagctccggggcctctctcagagccctgcacggagcaggtgctcagcccatgtgacctcctgccccagcacctgtctctgagtggggctggcctggctccaccctgggagcacctttctgactctatgggctgggtggaggaccagcatgctggaagtggagtcacaggtcacaaggatgtggggaatcccaagagcagccagtgggctggagccagccccgccctcctctactcaccaatgcctgacacagtgccccaggccacagccatagccaggtgtgccatcttgggcccaacacccggcagcgccaccagctcggccacagaggctgggatgtccccaccgtagtgctgctgcaggatggcgctggtctgcttgatgtatttcaccttgctctgaaagacaggggtgggttcagccttggaggcaagggcacagsccaacctgggaggatgcagcccccaggagacccacaggtggccagagctacctgcacctgctgaggacgtgtgcaagctcagcccccgccccccaggaggcgggaacaagcggagggcagcagggaggcccaaggtaggcctgaccccctcctcccacccgtgtgggccaatgatgcacgtgtaggctctggctggggttcccctgcccgtcattccctgccagcacccaggccaggccaagcaggccagccgctcccaggagtggggcttggctgcacctgcgccttcaggaaggagggctggagctggggcttccccaccagctgccaggcctgccgggtggttcccatcctgtgcctgagtggagagggctatttaaaacccatctgagaaactgcggcccacrcgggtgccaaggggaagcggccccacccaccaagctgctttcaacagatccgcccaccaccatccagtgctcggcggggttggggagcagcctccccagggctcctggagggtgaggggctctggacaggagggggtgacacaccgggagaggctagcagtaaacaaagggaaaggcgggtgggcaggcagccttggcggtgaggaagggtgggcaggcggcgaggcggggaagcagaggaaggaagggaggatgcgaacaggaaggccaaggagctgctgggactgggcgtcaggcctcagggccccacggcctggggggrgcttcagggggaccccccgagcctgagatgcttgaccctcacttcctgcaccgtcgccacccccctcagccttctgaggtctctctcaggccactgccacccggcccccgttgccacaggcagggctcaccctccagaaaccgacggggtagrtgagcttgcccagcgtggcatcatctgtctgcaggatgctgtccaccgtcaggccccgcgcccgcagtcgctgcatggcgcccgccgtcacctggtctttggtttggctggagagcatcagtgacagcagcacctggtacctgcgtacctgcttgtgcastgacagggaccggggtggcggcggrtcctgggtgattccctggccaggctccgccccccgccctcgacacaccctggtttgttgccctgggccacacttgaggcatcagcctccccctgtggggtggggaggtctggtttgggtatgtttggtcatctacaacaccaggacaataatagtacctgactcactggagtaatgtgaagcttaaatgaattatctcagtgcttagaatcgtatgtggccgggcgyggtggctcgcacccgtcatcccagcacttcgggaggccaaggcaggcggatcacctgaagtcaggagtttgagaccagcctgatcaacgtggtgaaaccccgtctctactaaaaatacaaacattagctgggtgcggtggtgcatgcctgtaatcccagctactcgggaggccgaggcaggagaataatttgaacctcggaggcgaaggttgcagtgagctaagatttcaccactgcactccagcctgggcaacaagagcaagacttggtctcaaaaaaaaacccaacacgatcgtatctggcccatcactactgaacagccattggccactactattatgattgcttcgtgaatcatcacactaccctttaaaacaaatttttttttttgagatgcagtatcactctttcacccaggctgaagtgtggtggtgccatcttggctcactgcaacctccgcctccggggttcaagcgattttcctgcctcgccctcctaagtagctggggttacaggtgcctgccaccacacctggctaatttttgtatttttagtagagacgtggtttcgccacattggccaggctggtctcgaactcctgacctcaggtgatccacccgccttggcctcccgaagtgctgggattacaggcctgaaccaccatgcctggcccatactacccattttacagacaagcaaactgaggctcagagaggcctgtatccaagccacctggtagcagaatagggattagaactcagcttggtctaagggtttcaggccctgggaccgtgaagcaaaaggaactcttccttcctgatatcacacaaagcccaggtcacgcctgcactgggcagaagttcgagcacgaggccctaaaccactggtgtcctgacctgctgagtggctacagtgatgcaggcgatgctctggggcaccgggtgtccatcctcccaaggtgctgtctgcaggggagggtgccagccaaaagccaccrggtagaaagaaaacaaggaccttgctaagatggggggtcatytgggcagatggggcccctgcctacctttgggggggcactggagtcatagcagtgctcagtccccagatggtccacaggtgcatcctttttgttcctcatggcacggatgttgaccagctgttgctgccagtcctggggctcccagactggcaccttgaggggctcagccccctcacctttctcactgtccgagccctcataggccacacgcagtctctgtgctttccgcggacgcttcacggggctgtggcttttcctcgcttctgcaaaaagcaccacrcagtccctctggtggggccrcaggtgaaggtagggtaggggtgccatcccgcctgctagctcacccctcactcgttcatgccacaactgtccatcatctaatacacttggggtgctctgccctctgcagtctggggtatgtgggccctccttatgccagcgaccctgacaaggtccatgttagctcatgaggactctagcaacagcctgtaccaaggtgcccccaatacatcttctatactgcaccagagacagtctgctaacacccacatcaggttgtgtcactcccttttaaaaaatcctggccggccgggcgcggtggatcaagcctgtaatcccagcactttgggaggccgaggtgggtggatcacttgaggtcaggagttcaagaccagcctggccaatatggcaaaaccccatctctactaaaaatacaaaagttagccgggtgtggtggcaggggcctatagtctcagctacttgggaggctgaggcaggagaactgcttgaacctggggggcggaggttgcagtgagctgagatcacaacactccactacagcctgggtgacagagcaagacccgatctcaaaacaaacaacaaaacctcctaattgacttccgtttactgtcataataaactccaaactctatcctggcatcaaagctcctgccaccctggctggcatcaccacctgcctgctcccagctgcaccagttcctcctgmcatagtytggactacccctggggtccctgggtgcctatgggaatccarctytggccaattctgcagaagtcccagcgggactagcgcagaggccctgtccgtgtccctcactgctcactgcagtgcttggcccccagcaggtcctcaacggctgcaggataaatataataagtgccatgccctttcctgttttccctcagaggcaccctcccccgagctgggggagcaggcttctggctgcgtgtgtccttggcacccagcctctccgaggacagcaagttcactgcaggagggcggggatgggacccacagagcctggagtggagagtcccggacagagtggtgggaaaggaagcgttttcttgcttggggcgaaagggggcagcggagcggagcgcccgaaacccagcccctgcggaccgcaatctttgggaaaaaggcgcaaggtgggaacgcagggccgcacgtgggaaccgttcgcggctgccgggtttgcagcccctgcccgcgcagctgggagccgcaggaggcggcccgggactccagcctgcagcccctatcccgcctcctcccacgctccagccacggcgcggcgctacctgctgcagcctctcttctccggagaggcccgggctcctccytacacccccgcggcccagccccgggtcccaggctccrgctccgggtcagcatcctcgcgctcaaggcggtcatgccggactcctgcggactacacatcccggcggcccatgcggccccgtcacgtgatgcaaggatcgccggcctttccgccagagggcggcacagaactacaactcccagcaagctcccaaggcggccctccgcgcaatgccgctaccggaagtgcgggtcgcgcttccggcggcgtcccggggccaggggggtgcgcctttctccgcgtcggggcggcccggagcgcggtggcgcggcgcggggtaagtggcggtccccacggggcaagtggcggtccccacggggcagcggcctagagaggcggaccccgcagtgtccgggtccygggccctcacccgcgcccactgcaacccgactccggagctccgagcatcccttagktttaagtcatggcgggtgcgaacgggtctctgctgcaggcggctccgtgacagctcctgcttcacatgggtagaggagagacggcaaacgtcggggctcccaggacttcgcggcggcagtcctaacccgtgcactgagtcgggyggggcgggcggcagcgtctgagtagagagctctctagaccaggcctggtgtctcccgggctttcctaggtgcctgtttgcgagctggtcagctgggctgtagttgagttctcccagggagtgtgggaggaaaggttatgcccaccagagacccagggtcctgacggctggaggtccgcagtggggaaggtgggcagaggtgttgctcagatgtccccattcctgtttcstttgcacagaggggttttctggtgcgtcctggtccaccatggccaaaccaacaagcaaagattcaggcttgwaggagaagtttaagattctgttgggactgggaacaccgaggccaaatcccaggtctgcagagggtaaacagacggagtttatcatcaccgcggaaatactgagagtgagtgagctacctgtgtctttgctaggctagagggaaatgcagagaaggctgggtttggtcttgcaccaggttctgtgggagacgggttgctggcaactgtctacacaggaatgctgtctccagtacttggaggccgacatgtccttcctcaggagacttcgaaagtcaggatcttggtgacctggttcaggcacacttgagttactattcagatgttgatgaaagaaagcccatcttatagatgaggcctgagtatcatcatcttcacaggtaaggatatgtccaggtgttacatgataagatgtgagttcctgggagaagtaggttctttattttattttttttttgagactgagtcttgctctgttgcctaggctggagtgcagtggcacaatctctgctcgctgctacctctgcctcccagtttcaagtggttctcctgcctcagcctcctgagtagctgggactacagacrcgtgccaccacacccatttaatttttgtatttttagtagagatggagtttcactatcttggccaggctggtcttgaactgctgacctcaggtgatctgcccgctttggcctcccaaagtgctgggattacaggcatgagccatcgcacatgggctaggtcgttatcttttatgtgtgtttgtgtctttgtcacrcatgcctggcattgtgttttgcccatgagtaaatgctgaatttttgcacttgtaaagttttctacttagaaacaactaaaacgttcatcaactgatgaataaaatatagtccatcctggctgggtgcggtggctcacgcctgtcatcccagcactttgggaggccgaggcgggtggatcacctgaggtcaggagtttgagaccagcctggccaacatggcgaaaccccgtctctactaaaaataccaaaaattagccggtcatagtggtgggcgcctgtaattccagctactcggggggctgagacgagaattgcttgaacccgggaggcggaggtttcagtgagccgtgatcgcgccactgcactccatcctggggaagaagagcaaaactccgtctaaaaaaaaattgtgcagtttgaaattgtatttcatgttatgttttatctcaatacaacatttgcagttgtgaaaaaaaattgcacattctcaactcctcgggatggagcagtaaagcccctcagtaaatctttttttttttttttttttgagaccgagtttcgctcttgtcacccaggctggagcgcaggggcgcgatctcggctcactgcaatctccgcctcctgggttcaagggattctcctgcctcactctcccgagtagctgggattatagacgcccaccaccacgcccagcaaattttttgtatttttagtagagacagggtttcatcatgttgggcaggctggtctcaaactcctgacctctggtgatccacctgccttggccccccaaagtgcagggattacaggcctgagccaccgcggctcgtcaagtgaatcttgattccagaaagatctgttttaagtctctagtctggaaaatgcagtgggagtctttaggtggtttgtgacttgcagttaaggagaccgtggcctgagcactggcccctttttcttctttcatctctctccaggaactgagcatggaatgtggcctcaacaatcgcatccggatgatagggcagatttgtgaagtcgcaaaaaccaagaaatttgaagaggtaggtttatccagttgagctactagagagaggcacgtagactattcagagcctgagtttgctttttttaggaacatggttgacagctgactgccgatgatctggtttgcactttttttttttttttttttttgagatggagtcttgctctgtcgcccaggctggcacaatcttggctcactgcagcctctgcctcctgggttcaagcagttctcctgcctcagcctcctgagtagctgggattacaggcacgcgccaccacacccggctttttgtatttttagtagagacggggtttcgccatgttggccaggctggtcttgaactcctgacctcgtgaaccatatgcctcagcctcccaaagtgctgggattacaggcgtgagccactgcgcccagccagtttgcactgttttaggggaatttagctttcatcgtagtgatggggaagctactggaaatgccccgaatacaaccttgagggaccaatcaagcgtggaaatggggagcaaagggattaggcttttctagcaacaccagaaaggatttctatgccgagcgggggtgcgggggcttatgcctgtaatcctaggactttgggaggccgaggtgggtggatcacgaggtcaggagttcaagaccactctggccaacatggcgaaaccccgtctgtactaaaagatgatgagccgggcatggtggcacatgcctgtaatcccagctacttgggaggctgaggcaggagaatcgcttgaacccgggaggcacaggttgcagtgagccgagatcgccccactgcactccagtctgggtgacggagcaagactctgtctcaaaaaaaaaaaaaaggaagagtttgtagtggctgatagaaacgcatgctcactcgctctctcctgttacaagttcaggccaagaaaaatcaagaaagggtttgttccacagagaacaatcctaggcacgctggtcttggtgccattttgggagggtgactggtcggtggtattgggcgacctcacggacatagaaatatttattttgggcaaacattgccagactttcctgatgacttgtggacaggacaggaagtggtcattttgggagygcaggttgctggtagagcacctgagggctctgcccttgccttgcccagcatttgtgtgtgggagagcagtgagacctggacctctcatgctcagatctgctaagaggagagtgattgctacctctgcagcagctcatctgaaacgtgctggccgtacrctaccaaagataggtgtaaagaacaggtgtccttagccgggcgcagtggttcacgcctgtaatcccagcactttgggaggccaaggtggatggatcacctgaggtgaggagttcgagacccgcctggccaatgtggcaaaaccctgtttctactaaagatacaaaaattagctgggcatggtgtcgggcacctgtaatcccagctacttgggaggctgagggaggagaatcgcttaaactcaggaggcagaggttgtggtgagctgagattgtgccattgcactgcagcctgggcaacagagcaagactgtctcagaaaacaaaaaaaagaacaagcgtcctgcatcctgttctgaaagttgtttgtgtgggtacggggcagcctgtgagtggataaataggcctccgaggctgggatggtcccgggccctgtgtccacggatctttgcagctcaggttgcaacggtaagagtattgtcaatgagacaaaggaggtgagagtgccagttgtctgaattggttgggatgttggtcagatgacatctaaaagaacacggccattttgttattatttggttagagacaaggtctcactctgtcacccaggccggggtgcagtgtcacaatcatggctcactacagcctcaacctgccaggctcacgtgatcctcctactttagcctctcaagtagctgggactacaggcatgcagcaccacgcctggctaagttttgtawtttttgtcgtgacagggtctcactgtgttgcccaggctagtctgaaactcctgggctgacgtgaccctctcccctctgccacccgaagtgctgagattacaggtgtgagccaccgcacttggccrgaacacggccattttagttcccctccttagaggagtaaggccaggaatgagcctgtggtctgaaagccgtggctgttggttaatgtggagaagggaaggtggtgagagccagcccaaacccctgccgagtgagactgattctggcagctttagggagcagggatgagcccctcacaggctgggtggtagttagaggaggcagatttcagaaggccacgcagcgctctttctcagcaggtcaggcaggcagcagaggtcgggcaggggcatggggtcgagggcccgatgctggtgtgttcactagaggagagccacaagcagggattctgggtcaggtgcaggcctagggcttagtgtgcacttgtggttctgagactgtcccatgacttcctgycagcattccggcagctctagtgggactccctcctggtccaggtgaggccaccattgctgccctggcttgctgctgtcctctcagcccccagtctgtcacctggtgggagttaaagggacctgctggggtttgaggaagctctgagccgttccctgtacgaagcctgtggycatctcaggctgcaggagacacaggagatacgagctttggaggtggggctctcagtcacaagccccygttgttcctccctgtcctccgctcacggcactgctccagttgccggggccagggttcttggagagcacatcctcaccgctgtcccctctgctggtgacagcacgcagtggaagcactctggaaggyggtcgcggatctgttgyagccggagcggmcgctggaggcccggcacgcggtgctggctctgctgaaggccatcgtgcaggggcaggtaaggcccagggcgacgctgggatgggtgayktcaggctgcccactgactgtcctgtccctgctgggccgtgtttggactcctgcctcggtgagttgctgggcacagggtctaggggctgatgggctctggagctggatggcctgtggggtctcctggtgtcatgaggtctgtgtgaccgtaggcactgcctcctcgcctgtaaacagatggtcactgcaccttcctcttatgggatgttctggggatcatatgaggcagttstcgcagagtgctgagatcgtacctggcagctggtgtggggctacggtgttgttttgcccttgcaccctttcggggccactcccctgctcactgcattccatctgtgctggtcttggctgaccctgaacacccaggcctcttggtgttcctgcctcccctggtcggccacttctactccttcatgtcccagctgctcagaagggccgtccactctcacaggctctcctgggtttcccccactcaggccttgtcctcastctctgakcacaasgctgtctgccctgcaccgaktgcaggggtcgggcaggagctgtgtcatcccctgctctgcgccacccgctgtgccaggtcccgacacacagcagttgctccccatacgccgctctgcggtcggccggtgcatccggccccctgccctgtacaatgctgatgctgcagacctgtctcttgcagggcgcctctgtgggaaggagaggggtccagggctggagtccgggtgcccctgcacttcagggacttcttggcagccgtgtgggcgacgctggcaggctctgctgatcctgtggcttttgtctttagggcgagcgtttgggggtcctcagagccctcttctttaaggtcatcaaggattacccttccaacgaagaccttcrcgaaaggctggaggttttcaaggccctcacagacaatgggagacacatcacctasttggaggaagagctgggtgggtgccaccttgggttggaggtttctctggccttgacgatcaagtgtaacctggatgggaaggacctggggctggggaggggctgccgttctcagggatggcctgcagcgggtatgcccaccctgcttcatgcacctgggctcacctgcgtggccggagtgcccctgaggcacgtgttaaaaatgcagagtcctggccttcaccccagacctgctgactgtgagtctctggggcttggggcctccgaacacctctgcaacggcaggagctgggcgagttctgtcactgggaggtggtgctgctgacttggtctcaaccggagcgtactggtcccgtcttcctcctcctttctccactttgtggaccttcctcctgccatcctgtggtgggaggtttccattagtcttgggtctctgtgtcatgattctgggaagtagagaaagaggaggaagagatcggtctgactctggctttgctgttctgtcgcccagaaaagggcctcagtggctgggctgcctgcaggacaggtgccggccaggtgcctaccgtcaggtttcctgtctgaggtgacgtggccggcagccaagtgtgcacacgtctcctccgagccrctctctgctgggggtggggaacgcccaggagtctggtgatgtcggcgtctcccagcctcgggttgggccctgagtgtacggcatacacacttctgctgccgcctcggcacagaccctctgtgcagccccaggggcggtagatcctagtgtccgtgcgtagccggcctgccctgggctcccctgagcctcttcgggcccagtgcgtggtctgtctgttgctgccgggggactgatgatggggtttctggcagtgacgggtttggacacactgtcctgcggsgggrgggggaggtgagtgggagatgtagattcggcgtcctcgcaaactgccgccgcttctccccyagctgactttgtcctgyagtggatggatgttggcttgtcctcggaattccttctggtgctggtgaacttggtcaaattcaatagctgttacctcgacgagtacatcgcaaggatggttyagtaagaaaagaattgagatcctgttctgataatggtcctaagttcagctccgcagtgaataaagttgaaaccaccaaaaaaatagaggttgggctgggcacaatggctcacgcctgtaatctcagcactttgggaggccgaggcaggcggatcacgaggtcaggagttcgagaccagcctggccaacatggtgaaaccctgtctctactaaaaatacaaaaattagccgggcatggtggtgggagcctgtaatcccagctactcaggaggctgaggcaggagaattgcttgaaaccggaaggcagaggttgcagtgagcggagatcgtgccactgcactccagcctgggtgaaagagcaaaactccatctcaaaaaaaaaaaaaaaaaaagagaagtacgtagctatcttctgtttagctctcatctgatgtcttggttatctttttgttgtttgtttagaatgttgcatgagctctgtctcactcatgctgaacacccagcaccgagagcagtggctggcgcacagcaggcacctgagtgcttgttgggtgggtgggacccccagggaggatgagccatgcgtgttattgaygtcatagagtgactagaccacagcccgtggtggctcggccatccaggcagtgctgccgggactgagctcggtgctccctgcaggatgatctgtctgctgtgcgtccggaccgcgtcctctgtggacatagaggtcagtgcctcccctccccagggccggcccatttcaccctggtttctgggaggctggggcttgggggttgagccctgtgtgccacctgctggctgtgtagccctgggcaagctgctcggtctctctgagcctcaggagtcccccatgtaagtcaggatagcygggcgcctccatgtggagatgtagctcagggtggatgacrgcatcaatgacccacagtgacagggacgtcaggtgcttcccacatgcccgcttgccctgtggcttggagagagggtgccatggcagcggggagaggtggcagcgcaggctgaaggaggtgggaaggaagcctgggtgtcctctcctgtggggaggagctggggtaggacgggcgtgagccgtctccctctccaccaggtctccctgcaggtgctggaygccgtggtctgctacaactgcctgccggctgagagcctcccgctgttcatcgttaccctctrtcgcaccatcaacgtcaaggagctctgmgagccttgmtggaasgtggggtttctgaaactgctctggaaggttcctgagagcacatggatgggacaagggccatcctgtctcccatgaatggttgtctgattcttggggtggccagacaatggcctgttgagggacggccagtgtcattttcscaggcagttgagctgaggtcagggttttggtggcattttgagaaccctgctgcctctgtctttgggaggagatggtggcgagctggccggaccttgggtggctatagggcagcagccaggcggggccagcagcgggactggggctgggggcagggcttatgcctgccagcccctgacacgcattgtgtctcgcagctgatgcsgaacctccttggcacccacctgggccacagcgccatctacaacatgtgccacctcatggaggacaggtgagtgtggtgggtggggcgcagggcagtggaggccagcacagccctcggggcagctccagtgtcccttgccaagcacacactggcttagagagtccttgtcctctcgggcagctgttccagaggctgccactagagcgaggcccatgacttctaggatccagcccctgtcctctccttcctctgtcagttcaacagaatatccacacccagctcagtgcctgccccatgctcggacgtcctccagcggtgctccccaactacttagcctgttacaaggcgaggctcggggtcttggcttgacgttgcycttgccctcacccccacagccaggctgtggccacttttgttgctttagccattagagatggctcagctctgcccacaccctggcctcccacccatgctgccagctccccctcctgctctcctgtatccatccgcgcctcctgaagcccactccatgcagcacccgggtggcctttttctgacacagatatgtcggtgtcaccctttgctggaagccaggtggttcccagcgcccttgggatgtaggcttctcctatggaaccaggccctggggccagccctgcctcagccctgcatctctcccagccctgcctcggcccctgcatctctcccagccctgcctcggcccctgcatctctcccagccctgcctcggcccctgcatctctcccagccctgcctcggcccctgcatctctcccagccctgcctcggcccctgcatctctcccagccctgcctcggcccctgcatctctcccagccctgcctcggcccctgcatctctcccagccctgcctcggcccctgcatctctcccagccctgcctcggccctgcatctttccttccctccatccttggaaccaggccctggggcccagccctgcctcagccctgcatctctcctagccctgcctcagcccctgcatctctccctccctcctcccgtagaaccaggccctgggggccagccctgcctcagcctgcatctctcccagccctgccccaccccctgcatctctcctttcctccatcttgccttctcccctccaccaagggcttgtgcatgccctgattcctcttgccagcaggttcttccacctttgccgagttactctgtttactgaggtcttagcgtggtcactgactcccccacctccctgagtagtttttgctgtggctttccttcttggctgtgattggaggaagagattttgcgtttacctgggagattatgtggctggcgcctgtctcccccagactgcgaggctgtgggccatccctcttgcctgcttcctgtccctggcatgacctgtagctcacagcgtggtcagcagtgatgggctgccgcctgtgcgcaggagtgaacaagagtgttactgctggcctctgttccctgcccttccccagcggtgctcctgccccccccaagcacagggacctctggggctgctgcaggagcctcggcaacctcacacatccatggcggaccctgggacagggccctgctcacattccgtctctctggggaacacttttagagcctacrtggaggacgcgcccctgctgagaggagccgtgttttttgtgggcatggctctctgrggagcccaccggctctattctctcaggaactcgccgacatctgtgttgccatcattttascaggtaaggcggtttctgtgtgcagtgagctggcaggaacgggagagctcccctcacgcctgcccacccatcccactgggggtcctgctgcgggggctgcggtggcatttctaggcctttccaggcagttgctttgcagctgggggtgaggtttggggccctttgtaggctttagtcttttttttttttttttgagaaggagttctgctctttctgcttggctgactgcaatctccgcctcccggattcaagtgattctattgcctcagactcctgagtagctgggattacaggtgcctggtaccatgcctggctaattttgtgtttttagtagagacggggtttcgccatgttggccaggctggtctcgaattcctgacctgaagtgatccacccatctcagactcccaaagtgctaggattacaggcgtgagccaccatgcctggccaaaggcttttttctctctctctttttttttttttttttttttgagacagagttttactcttgttgcccagggtggagtgcaatggtgcgatctcggctcactgcaacctctgcctccccagttcaagccattctgcctcagcctcctgagtagctgggattacaggtgcctgccacagtgcctggctaatggtttttttttttttttttttttttttaatgggacagagtttcgctcttattgcccaggctggagtgcaatggcgcgatcttggctcagcgcaacctccgcctcccaggttcaagccattctcctgcctcagcctcctgagtagctgggattataggcatgggccactacacacagctaattttttatttttagtagagactgggtttctccacattggtcaggctggtctcaaactcccgacctcaggtgatccgccagcctcagcctcccaaagtgctggaattataggtatgagtcaccgtgcccggccaaggctaatgttttgtatttttattagagatggggtttcaccatgttggtcaggctggtcttgaactcctgacctcaggtgatccacccgccttggtctcccaaagtgctgagattataggcatgagccactgcgcgcagcccaaaggctttattctcaagcaaaccttacatcttgcgagtttcaccttctggagttggcagtggaggggtgaacgctgcctcgggggtagccgttctcttgctgttggcggctctgttttgtcaagtgctggtcttgtcctgtctctgcaatgacgccgtggcacagacgctggtggtacagcttcagtttccgcagtgccccgtgatgacagcgctttttgtgtccgtcctcgttctgtgctcacagctccctggagggtggggcgatcacgtcgtcctggttttatagtgatgagctgcggtgtgggtcacagggctctcctgatcctctgctcttcctgctacccccctccccgtaggggcggtggggggatgttgtctttgtgcacagcttgcagccgaactcagggcagctttcagttgctgctgggctggcccaccgggtgcccaggattcagttgctggtctgtccgagtcagggactttgcaggcaggcatgggggtggggcccgtctgggtcctgactgtgctggagcatgtagaaacccctcctgggcgccccacctgctgtttctgcggcccctgataaacgtgtggtgggcactgcgsgctcaggcgtgctactctcggtcccaagggtgactgrgagggcgtcccacagcaarcaagcagctctgaccctgtgtgctggccgggctcgtgttccaggccatggcatgtccgaacgaggtggtgtcctatgagatcgtcctgtccatcaccaggctcatcaagaagtataggaaggagctccaggtggtggcgtgggacattctgctgaacatcatckaacrgctccttcarcagctccaggtggggtgggggcaggagctccggggagcaccgggaacccagacaggcaggctcggcccactcagaagatggtaccttgggccccatctctgggggtcccgcagagactgccagaaccgtgttctctggtgattcgcagtggcgctcatccaccttccaccggagacaggtctgatttttccagacgtggtgcatcgtttaggccccagacaggaatatgcagtaggtgagccggggctgggccagtgctgtccacagtccgcagagtgacctgcaggccgccttcgtggcctgagtgggccccggcacagttcccagagggatgccagtgtggcttccgcatgactttggaggaccgcattagtcgagtctgttaaccacagctttaaggaggactccacggccacacgggctcrtcagcataggggccctggggaggcgaggctagtatccagcagcctcagggctgtgccttttcctggagcctggggcgggtgatgtacaggaggccaggcagcagaagggaggccgggacttcgccgggacttagcagggactgaagtcctctcagagcctgtcgctgggccagagcattgcccccgaccgctggtggcagtggcagaggtcatagcctggggcttctaaaagaggctggacctgggagaggcaagaaaggcttgtagttgtggctactcttggccctcctgcccgagcttccttcttggcccagctgcatgggcacagccaagattccttggggggtggggtacgggcaggaacagcagctgccatcacagccactgtggccccttgagaggatctggggggtgtcctgggccacgtgggtcagggtggcccctggagaggatctgggggtgtctcaacccatgaggcccggagcggcctcagagggctgggggcgtctgtccccatgcggcccagagcggcctgagagggctgagggcgtctccatgcggtgggtgtgtagcgaggcctctggtgccaagtccatgtggggagtggaagtcagcctgtgtcatcgtgcctggtactgcagaccttggacagcccggagctcaggaccatcgtccatgacctgttgaccacggtggaggagctgtgtgaccagaacgagttccacgggtctcaggagagakactttgaactggtggagagatgtgcggaccagaggyctgtgagaccccctcctgggtggggcctttgggctttggctggtggggaggggccgggtgctgggtgaagtgcagctttctgagcctcagaagccaagggccaggtgggcgcctgctttccaggtttctgcactcggcagggaaggctggcaggcacagcacgtgtttggtaacaagctcggggctagcccacccatcagtttcctcccacctgtgtggagcaagcttccatccggctctgtagagtcctgtggctcccaggcggccgcagtcattttgccaggaacactcagcttagggcccaggcttttccatgggtttggacacaagtcttccccgctgccaggagtgcctttgtgtctgggctgtgggctgcaggctgtgaggcggctgggctctgacagcaaaccagcctctcgaccagcagcccagtgtggagaaggagagcgccggaggggcagaggggcaacaccggctcttcttttgacaggagtcctccctcctgaacctgatctcctatagagcgcagtccatccacccggccaaggacggctggattcagaacctgcaggcgctgatskagagattcttcaggtagggggtcctctgtagccttgcctggcacctggagcctggccctgtctctgtctggggcccacccgggctgggtctcaggatgcccgatgagcagggccctcccctctgcctctggagagccctggctctgggtgagcaggtgctagcttgctttccagtccagcaggacaggtcctctcatgacgccactgggctccctcttttcgggggtcgtctggagagatgctccctgggaagcagagctctgtgccctgtgtgcctggccgcgggaggacccagagtcgggctggcctgcgccaggcagacgggctggtgtggggctgtggccgggcactccccacccgccccagcaggctgccgtcccgcaggagygagtccygaggcgccgtgcgcatcaaggtgctggacgtgctgtcctttgtgctgctcatcaacaggyagttctatgaggtgcgtgtccaggcggccgcagctgggggctcagggctatttctccgtgggcgggctgtctctgttgtgcacgtgctcccgcagagccgggctctgcctgggacttcggtcctgccggaccctctgcagcccccagcgtggtctgtttacccctgttcaytcactggcttgctcgtcctgggtgcctctgccaggccttgacacgtggccaagtagcaaggaaggcacagtgcctgccctcagggagctccggccggttttcacccaacacaggagcctcttaaaaattctgtgtgagttcgtttcagccagtcttgcatggggacattgtcttccgtttcagtcctgacgttcaccctgtgcacctgcgtgatcgccagccctgcctggtctctcctctgcgggctctccctctccactccctcctctgggagctctgtggccccaggcccaccttccttgagagacatttgtgtgcctgccagtcatacccctttcccaggaggcgcagcttaggctctgaggctgtcccttcccaccgaactcctccctgcagcctcgcagtcctgccctcctgagagctgcccactctgctcctctccccagcgtccactgtccttgaattgccctttgctgggcattgcgatcccgcattctgtctgagggagctaagggcctcctggaagttcctctgggtcctctggcttctcccatcagggctggtcttgtcctggtctctgttcctgtggaactttttacctgcttctgtgaaaactcacgctgtcctcagcacagcacgcacacacacgcatattcacgcatgcacaggcacacacgtgcacatgcccacgcgtgcacacagccacacacaccctcacgcacacacgcacagcaccatgtgggaggggttctcggctgtgacagtgaagggcagggcctcacctcggctgctccttgtgagttgtgggccccgtgtctgtgcccggccgccctgcggtgctcaccagccttctgaacraggagctggacaggatccctggaaggggccccggggtctctgagtcgcgytcagcgggtgcttgtgctctctgcccagctgtgctgaagtcccgagggacrtgtccgctgcttgcgggtcggttcctgaggaattggaagtgtcacgagatgtggccctcgttgggctggcgctcattggcctcccttgtgcctgtgcaggaggagctgattawctcagtggtcatctcgcagctctcccacatccccgaggataaagaccaccaggtcygaaagctggccacccagttgctggtggacytggcagagggctgccacacacaccacttcaacagyctgctggacatcatcgagaaggtgagagccgttgtacccggggccgggtgctagcgtgccagagctccgtgggcagcaatggcctctgggccctctgtcctcctcttcgagtgaccggatggctgtgtccgtaggtgaggctcccctccctgcagggtgggtgtcccgaggcctgtgcagggcctgccactgctggatttgtgtcctgactgaaagtcctggacatgggtgtcctgtcacactctgggacagctgggctgggcctcctggaccgacgctggagcccagacctggggctggggctttggcctgccgtcctccctgcccagccaacagctttgctctttgattttcagatgcattttggtttctgcacagtcactcgggtataaagggcatctttgcttttgagcaataaagatgaaggccgggcacagtggctcacgcctgtaatcccagcattttgggaggctgaggcaggtggattgcttgagttcaggagttcaagaccagcctggccaacatggtgaaatcctgtctctactaaaaatataaaaattagctgcacgtggtggcgggcacctgcaatcccagctgctcaggaggctgaggcaggagaatcgcttgaacctrggaggtgaaggttgcagtgagccaagattctgccactgcactccagcctggacgacagagcaagactctgtctcaaaaagaaaaaaaaaaagggccgggcacggtggctcatgcctgtaatcccagcactttgggaggccaaggcaggcggatcatgaggtcaggagatcaagaccatcctggctaacacggtgaaaccccatctctactaaaaatacaaaaaattagctgggcgtggtggcgggcgcctgtagtcctagctactggggaggctgaggcaggagaatggcgtgaacctgggaggcggagcttgtagtgagctgagattgtgccaccgcactccagcctgggcgacagagcaagactcgatctcaaaaaaaaaaaaaaaaaaaaaaaaggtgtttgtggtagaaagtgttctcacggctgctgactcagaayyatgagcctgtgtgtaagtcctggycttctcttcaaaggtgatggcccgctccctctccccacccccggagctggaagaaagggatgtggccgcatactmggcctccttggaggatgtgaagacagccgtcctggggcttctggtcatccttcaggtgggtgttctgcacgaggcctctgctcccggggcgcgcatggctagcgtccaccagctgcatctgcgttgtgttggagtcygttccccagcgggacccacaccctccctggatttgctgagggtgcggtggtctcagcaggcagcagaaccttcctcctgctcttgtggagggatggatgcragaggccccgttgtacgccctgaccagagcttgtctcygtgctcctgagtcagggccggaaccatgtaccatcctcagcgtggcgcttgccctcgtcacccagcacagcacctgggaagtaagggtggccctccattcctgccctgcagtccgtttaatatttgcagctgttttgttgagatttaatttacatatcatgcaatttacccattcacagtgaacagttcagtggttttcagtaaattcacagagctctgcagccaaccccacagtcagcttgagaacctcctgagcataccagtagcacacgctcccatcccccgttgctcccgtacccccgggtaccatcaagctgcttcctgtctctgtggatttacctactctcaacatttcatggaagtggaatcacacaaaattcatccataagatgttggatggtagaacagtttcctgtctgctgactggattgttccacccagcgccatgtgtccaggcccgtccaggctgtggcagctgttggtgctcccctccttttcatggctgagtagtattccatcatctggaaggagcacattttgtctgtccgttcctccattggtggacatttggcctgtgtccgccttgcagctgcggtgagtggtgctgctgtgaaccttctcctacgagggctccgccgggcctgcattttcacttttgggtctgcacctaggagtgaattgttgggccctaggtttagtctgcatttggtgtttcaaggcgataccaggctgttttccactggtgctgtgccattttccatccactcgagcagcatgtaagggttctgatttatctttttttttttttttttttttttttgatacagtctcactctgtcgcccaggctggagtggagtgcagtggcgcratcttggctcactgcaaccttcgcctcttgggttcaggcgattctcctacctcagcctcctgagcatctcgtattacaggcacctgccaacayactcggctaattttttgtattattagtagaaactgggtttcaccatgttggccaggctggtcttgaactcctgacctcaggtgatcctcccgccttggcctcccaaagtgctgggattacaggtgtgagccaccacgcccggcctgcctctacttttcaaagcctcacagcatcacttacgtgtgactgtcagtgtcagtatcgtgtaaaatataatgtatgaatcagtttgctcaaaagctcatccttaagatgttggatggtagaacaatttcctgtcatgtttatatgtcatgggtttttatttcttgccatggaagttgaaagtggtgatgatttttttttttaattaattttttgagacaagatctcactctgtcgcccaggctggggtgcagtgctgtgaccatagctcagtgcagccttgaactcctgtgaccaagtgatcgtcctgcctcggaggcctcccaagtagctgggaccataggcacacgtcaccacacctggctaattttttcattttttgtagagatggggtctttatatgttgcccagcctggcatcaacctcctggcctcaagcagttctcccaccatagcctcccaaagtgctgggattacaggcatgagccaccacacctggccgtggtgtttgattaaaaaccaggcatcagccgggtgtggtggctcatgcccgtaatcccagcactttgggaggctgaggtgggtggatcacctgaggttgggagttcaagaccagcctgaccaacatggagaaaccccgtctctactaaaaatacaaaattagccgggcgtggtggcgcatgcctgtagtcccagctactcgggaggctgaggcaggagaatcacttgaacccatgaggcagagggtacagtaagcccagatcacgccattgcactccagcctaggcaacaagaatgaaacaacgtctcaaaaacaaaacaaagcaaaaacaggcatcacctccttggtgtctcatccacatgagcaccatgctctttactgactggttgggaaggggtgtgctgggctgtgggggcctatggcctgggagaactgagaacctttctgcttctgcagagggaaggaaagaggttctgttgcccttacttggaactccagccctggaggcctgagggtctgggctgcagaactgagatatttcctagttgaggcagastcctggttctggctgctttcatttctttatttttttgagatagagtctcaccactatgtcacccaggctggagtgcagcggcacgatctcacctcactgcaacctccgcctcccaggttcaagcaattctcttgcctcagcctcctgagtagctgagatgacaggtgcgcaccaccacacctggctaatttttgtatttttagtagtgacatggtttcaccatgttggccaggctggtctcaatctcctgacctcaagtgatccacccaccccagacccccaaagtgttgggattacaggcgtgagccatcgtgcctggcctgttttcatttcttttgttataattgaaaagtaacacagttgactcttgaacagtatggggctgggagtgccagcccctgtgcaggtgaaaatccccatctaacttttaactccccagaaactttaccaacagccctctgttgactagaagccttgctgatagcagacagtctattaatgtacagctcgtgtgttttatgtattctgtgtttttacagtgaagtaagctagagaaaagcaaatgctgttaagatgctaggcatggtgactcacgcctgtaatcctggcagtttgggaggccgaggcgggcagatcatgaggccaggagttcgagaccagcctgaccaacatggtgaaaccccgtctctactaaaaatacaaaaattagctggatgcggtggtgcgcacctgtaatcccagctactcgggaggctgaggtaggagaatcacttgaacctgggaggtggaggttgcagtgacctgagatcgtgccatggcactccagcctgggcgacagagaaagactccgtctcaaaaaaaaaaaaaaaaaaaaaaatcataaggaagcgaaaatacatttcctgttccttaagtggaagtggctcatcaccaaggtcttcattgttgtcatcctcatgttgaggggactgaggaggaaggagaggagacacatggtcttgctctctcgggtgggagaggcggaagaaaattggcatgtaagtgacccatgaaggccagcctcgtgctgttcgagggtcagagagtttgcacaatggacacggtgacaagtttgattccccttttcctgcctgcctagtgggcccggcagggcggcagctgctgttggttccatgtggccttcccagaatggggggtgccaggcactgtgtgaacccccacctccacctcttttttgtccgaggaagggatgttgcttttatgtcataatattttgagatgaggagaaactgttaatcatttaatcatctttttttttgagatggagtctcgctctgtcgccccagctggagtgcagtggcgcaatcttggttcactgcaacctccgcctcctgggttcaagcgattctcctgcctcagtctcctgagtagctgggatttacaggcatgcaccaccacacctggctaatttttttttttttttgagacagtcttgctctgtcgcccaggctggagtgcagtggcacgatctcggctcactgcaagctctgcctcctgggttcacgccattctcctgcctcagcctcccaagtagctgggactacaggtgcccaccaccacgcccggctaatttttttgtgtttttagtagagacagggtttcaccatgttagccaggatggtcttgatctcctgacctcatgatccacccgcctcggcttcccaaagtgctgggattacaggcgtgagccactgtgcccggcctaattttgtatttttagtagagatgggctttctccatgtaggtcaggctggtcttgaactcctaacttcgtgatccacccacttcagcctcccaaagtgctgggattacaggcgtgagccaccacacctggcctcagtcatttctttcaatgattttttaatcatttaaaggtgttaatcatttctttaaaagaataacagtgtaaccacttacctccagagtgctgcaaagggtccctcaggccagatttcccctggctcctgctggcctcggccccagggttgctggaggcaacagatgctcttcacaccttgccacacgtgtctgggaggtgcccttgaccttttgggaggggctgcctacacctgggatcgccctgcagcacacactccccgccccattctgccctgtctgccacgcagctggagcttctccattgaatggactcttcctcacctgttgatgactgccctgatgatgagatgggcacgaggttgggttttactttttgctgctgtggagagagagtcctggtggtcctgggtttgaaggtcgtgtgttttgaagcacgcactctagagcagccgccccggcccctgctccgggacaagggtgctgtcytaggactgcgttttcacctcctgcgccgtggtgagctgcgtcctctctctgcagaccaagctgtacaccctgcctgcaagccacrccacgcgtgtgtatgagatgctggtcagccacattyagctccactasawgcacagctacaccctgccaatcgcgagcagcatcyrgctgcaggtatggtggctggggttgcgcagccagttcctgggggcccagccaggtatccccgtctcggcaggtgtggttcctggaagctgcagagacggccccaggatggggcctcagctgaccgtccctcctctgcacccactgtggccgcagcctccccagtcctggtgtccttccctctgcctgcagtccacacatctgtggcttgtcgctctaagccgcacggtgacatgggttggggcagagaaaaggacgcacggcgacttccggggcagtgcatggccctgacgctcctggtgctgcagaatctgtgaaggacctgcagcagagggctgggcaggtgggcggcacagggcagagctgagagggcagagctgagacggcagggcagggctggagagggcagagctgagagggcagggcagggctgggcagaacagggctggaggagtttcgctgagtttgcgctatagatgttggcaccaggctgagcagaggtgactgggatgggagccctccctcctagagcaggtgctctctggggccacccctgtggcctcagagtcctgttcagcctgtcgatggaagaagtggcagggctgggagctgagctccgctttctggcagttgggggcgtgtggtgctgccagaggagcgaggcgcccatcccttccatcccaggcgggcccagctgtggtggtggggacaccaggctctgtgagctccgaggcaagggagggaggaggctgtgggtgctgggcctccggtgtcaccaggacagagcctgtgtctgtgttgggaygtgggtgtgtgcacatcagcaggtggccttttctgagtgcctgtggtgctrgacgtgggtctgagcaggtgggacgccgcctgtcctgggcctgcacgagcttggctctggctttcaccatcctcttcctgacaggmctttgacttcctgttgctgctgcgggccgactcactgcaccgcctgggcctgcccaacaaggatggagtcgtgcggttcagcccctactgcgtctgcractacatgtacgcgggacctcgcccacggcccatgaggctcagggcgtcagaggcgctggggctgtggtggcgctgtttgcatgtctgagggatgtcccagggttgggaagagccaagtctgttccgttcctgctgcggggacttggcctcagctgcttctcttgcttctgcagggagccagagagaggctctgagaagaagaccagcggccccctttctcctcccacagggcctcctggcccggcgcctgcaggccccgccgtgcggctggggtccgtgccctactccctgctcttccgcgtcctgctgcagtrcttgaagcaggtgagtggggccgggcagggaccatccgtcccacgttgggccaggaggacagggagctgccacctgcctgctgggcctccctccctgtctggcctgtggagggcagccctccctcagagctgagccttcccccttccccgagcagctgcagggacagaggcctgcgctgggcaggctcccccggctgagaacrgggctccatagcccttgacgctgtgcagccacaaagcagagcctcagatgctagcttccgcctctgtctctagggtccagaaggccctgtcctgacgcctcctctcctcgcaggagtctgactgraaggtgctgaagctggttctgggcaggctgcctgagtccckgcgctataaagtgctcatctttacttccccttgcagtgtggaccagctgtgctctgctctctgctccatggtaccatggccggcctggggttggggtgggggacccagtagggtttttccccaaaagactgcgagcctctgggcagagcgagtgagacccttcgggctcgggctccatttccctcaaactcagctgcactctggagcgcagattgtgccttgggcagggtggagggacccctgccccagctcgcagcttttgggactgacgtcagaggtccccagccaagggcatgtcactgaatgtggatgtctcccatctgtgcttttcctaagtggggctcccgtgccgttcacctcacattcctggtgtgttacttggcaggcactcccaccactccgaaagggaggcccttcctgggagggaggcaagaaggctccccagcccctttgccccctttcctgggcctgcgttcccagggcctccccagcccctctggctaccccgtgacctggccgctggggagrggtttcatgcctggatttggtcatcagctttsaggcccaaagacactggagcggctccgaggcgccccagaaggcttctccagaactgacttgcacctggccgtggttccagwgctgacagcattaatctcttaccataactacctggacaaaaccaaacaggtaggaggtcagagcaggacaggcgagcttgatggggcctgggattcgagggcctggcccaggtaggccccacatttttctcataaacgagtttctgccaggccagggatgagtgagttggctctgcttccctgggtggctgccagatgcccagagtggggacatccgattccctggtgcttctagctctctttggggcctgggagccatccagtgttccctgtccaccccggacagcatctctgctctctgtagagcgttgcctggcttgttcctgctgtcccaagggggaggtggccatgccggttggtggagctgggctggttctgaggcgcagggtgggcaggccagagagtctggcttctgcctccctccacgccccatcaggtgccggaaactgtcccttcacctgcgatctgcctcgcccccgtcccagtcgcattcttccacacctctctttgacatggccctccgggacgaggagctggtgtcctagagattctggcctccgctcagggccatgcccgccaggagatgctgactctgaggcttggcccatctgtgccccgggcctcagcttctgatggtggccctgtagggagctgttgttgggttcccatccctcaggctcagccccaccctgttgggccccttcagcccctctgagaggctcactgggtcctcatgggtcttgcctcaaagcatagccagccttgctgggctgcaggttctgaggccttactggcccacagtgtatccgaggggtgaggccggctttgggaaatggaagctgttcccgggacactgcctggcaggccatctggccccgggctctgcctgagctccgctcatcttctgctgtcctcatggaagacactgcccagggttggtgtgggatctggtggcttggccacttcaggcagcactgccccttgcaacagagccagcctgtgaagggcccagaaccaggggatgagagcccagcatgtctgggttctgttggcctgtgggatcgtgtcggaatgcaactgaccggagcagtctgctgtgcagagtctgctcgggtagctcagcactgctggctctgccccacaggcattcagggacttgctaagcctcggctgttctcccggtggagcactcraggttggcgaggggtaggcgaggctgcctctgctgcaagcgggtggggcctgaggtgtcctgtctcctgcagcgcgagatggtctastgcctggagcagggcctcatccaccgctgtgccagmcagtgcgtcgtggccttgtccatctgcagcgtgragatgcytgacatcatcatcaaggcgctgcctgttmtggtggtgaagctcacgcacatctcagccacagccagcatggccgtcccactgctggagttcctgtccagtgagtccccgccctgcctgcgcatgcacccgagaggttcgggctgtgtaacctgtgcgggcttctctggtgccctctctcaggactccttggggaacctgggtgtctcgccttctgctgcctcagggcctgggcgtctctgcccggctgccatgagtgctctccttcctggctttgaggggcggctcctctcacccctctagtgtccatgtgaacgctcctccttgaagaagcctcttcccccccgagcagtggccctcccctggttttgggcctcctctctgtccaacagagcacacgccgcttcaggggggctttgttcgcttcccccagactgtgacttcaggagctcaggtgcctgtcccttcccctcaccgcctgtgcgcatctgggcaggccctcaatgttgagatggcagaagggcactgctgggcccgcacttggtgtagaggctggagagaagatcgtgtgtgctttgtgggccacatgcaggtcctgtcggtctttctgttttgttgataaccctttagaagtgtagaagcctggccaggcgcggtggctcaggcctgtcatcccagcactgtgggaggccgaggcgggtggatcacctgaggtcaggagttcgagaccagcctggccaacctggcgaaaccctgtctctactaagaatacaaaaattagccgggtgtggtggcgggtgcctgtagtcccagctactcaggaggctaaggcaggaggcaggagaatctcatgaacccaggaggtggagcttctagtgagctgagatcacgccaccgcactccagcctgggcaacagagcgagacaccgtctcaaaaaaaaaaaagagagaagtgaggccgggcacggtggctcacgcctgtaatcccagcactttcggaggccgaggcaggcggatcatgaggtcaggagatcgagaccatctggcgaacacggtgaaaccccgtctctaataaaaatacaaaaaaactagccaggcgtggtggcgggcgcctgtagtcccagctacttgggaggctgaggcaggagaatggcgtgaacccagggggtggagcttgcagtgagccgggatcgcgccacygcactccagcctgggcgacagagccagactcatctcaaaaaaaaaaaaaaaaaaaaaaaaagaggtgcggaagcctttcctcacggatcacacaaatggtaggcgacagctcgaattggcccagaagctgtggttggctggccatgggaccgagagttgaggccagggtcgggaaagccacgtccgtgtggccgtggccttctctcctctgcagcaccccatcgctgccgtgggcagagcagccgtgttggccttcagaggcgctgcacgggaccccgrctcccctgaccaccctctycattaccgcagctctggccaggctgccgcacctctacaggaacttygccgcggagyagtatgccagtgtgttcgccatctccctgccgtacaccaacccctccaagtgagtggtcgccccaggccctgtgcctcccagccgtggccccsgctaggccttgcggcagaaagccccggcagcctttgtccccaaggcctgagcgcctcggttttttgcacttcatgccctggggatgtttccctgctgccaggatggagtgccagcccccttctcatctcaggtttaatcagtacatcgtgtgwctggcccatcacgtcatagccrtgtgrttcatcaggtgccgcctgcccttccggaaggattttgtccctttcatcactaaggtgggctcagggycggtgaaggctgtgtctctcggtaggccagggcttgctttgcccttggctgtccatggtcgggcagagtgacaggcaggtggagggcagtgggagggtgtttggggctgtgcctgtggcgctgggggctctgctgggcagcctgcagggctttgatgcgcggcaggcattgaggggtgggagctgggtgccgccgccttgcccctagcctgcagcttgtccctggccagggggcacccggcaggcctggtgagggcctccagcccccattgccacccctcactgtctgggtgtgctcactctgccagggcctgcggtccaatgtcctcttgtcttttgatgacaccccckagaaggacagcttcagggcccggagtactagtctcaacgagagacccaagaggtacggcctgcgggggtgtgcctggagtcggtgtggggtggggaaggacatggggctgtggcctgcctgacggtgcctccaagtcagtgagtggaaatgggtcctgtgtgccctggagtatgtgaggcagggcaggacctgcaagggccgctaacacccctcagcccctcagcaggttggccgtggtggcctgggtccgggctgcgtgtgccacgggcacctacttgtggaattgggggttggggtgcaagctttaggcgcctgagcccctcgaaggagccggccttgtctggggctgccccctcctctgcagcccccagcctgctgctagccggggactctgcttcatcaccgccgccttgccggaccgcaaagagctgagccagcctctgtgttcttgtttgcatttcatttgaacggctttctcctcctgtcccccaccttcctgcccgagctattttggctttccctagatgggaatacggcattttccagcgtgacctcaactcggaagctgttgtctccagcccctgggggccgggggccaagctcggccattacggccagagactactttctggggtcttggtctcttttcctagtgaccttcagggcctggccactgaggcctcagtgccgcctcggtcagagctgggcggtgcctgccttccgcgggtgggtgggattgcctggccagcacagcctggaatctgccgtgggggtgacccacacacgtttaatttgcactgacgttgtttgttttggtgtcatgcgtgaagccttacttgttctcagtcatgtttaccagacgtattatcatgcatttttgttttctgtctcttccccgctaactgccctttggcatggctctttttgctcatctcacccgcgggatctctccatcctgaccctgtggcctgggacctttcctcctcacccctccactggcttgttctccccttcccgggagctgggctctctggggcgttggggctccttcctcacccgatagtctgaggatagccagaccccccaaacaaggcttgaataactctccacccrtgaaagaattcaaggagagctctgcagccgaggccttccggtgccgcagcatcagtgtgtctgaacatgtggtccgcaggtagcgggactgtcgggtgsggggcacggaccctggagcttggccccgtgagcacctgggtggcagtgcatggggctgcttgcatgacctcatcgtctgcccgtgtcctccctggccagcscagggggagccggtgacgaggggtggaaaggttgcattctgtccccaggccccgtatgagcacgggctggttgcacgcatccccaggccccctcggggtgccgctccgagagagccaggcgtgccgggcagcagcctccccaggctgtccccaagggccgcagtgtgggttgggggagacaccactcctggttttggccttttcgtattctctagaatggacgtttttcttcgggctttcttctcaacaaggtttattttttgttgtagctgaaagggaacaaggggcatttgtggagggtgctggggtggggcagcctgggagggcctgggtgggggctaggatcctgcagggcatgggcatgggcctgggccccaggccatggtcttagttctccccgcagtgtctgggtgcaggtgtgggctctcgggctctcggctgtcacctgcctgtgggtcatcgctgctggcactggcagaggggatacctgtctcctcctggaagcccgttgcaggccaaggggtcccatggccctcagtccatccacctcctcacctcaggccggcctctgctgggtgggacttggccaggggttggggtggtagaggtgctcggtgaggcttaaagccattttctagcacattctgtatcatgagcaaaatattgcctaggggctatgaaatttgtatcagaatgaactcccataagcctcttccctgtcactgggtgtggagctcaggcagccgctcgcctgcctgagggtgacggtggaaggccacatggggatcccagacctctgtgtgcttgccggaggcagcctgcgggcagaatgcaatctgggcctgtctgtgtggcctccgcctctctgcatgactacaccgtttcgccaggaggccgtaacctagtgctcccgtgggcttcggtgagggggatgtcggtctctagcctcctgagtctgctccgaccagtaggcctggtcttccccacccagcgtctccccgttctctgggacaatgtggtccacgtgattctcaagctgaggctcgctgggccgcccacgccctgttggggtctttccgagcgaggtcctcagccgtgcatgcgttgagctttggcccttggtgataggtggctcggcccgccctacctggcaccctgaccctggtcacggcctctccctccagcaggatayagacgtccctcaccagtgccagcttggggtctgcagatgagaactccgtggccyaggctgacgatagcctgaaaaacctccacctggagctcacggaaacctgtctggacatgatggctygatacgtcttctccaacttcacggctgtcccsaagaggtccaggcggcactacagggctgggcgggcctgcgggagctccacgggcaagctgggtttcacgctccctgtcttctaggtctcctgtgggcgagttcctcctagcgggtggcaggaccaaaaccyggctggttgggaacaagcttgtcactgtgacgasaagcgtgggaaccgggacccggtcgttactaggcctggactcgggggagctgyagtccggcccggagtcgaggtgactgcaccttcctttcctccgcgcctgccagcctcgacaccggctgtcccgagcccaggcccacgtggcaccctygtaccagcctggggactaagtccaccctgtgcgtgggattctcttctcagctccagccccggggtgcatgtgagacagaccaaggaggcgccggccaagctggagtcccaggctgggcagcaggtgtcccgtggggcccgggatcgggtccgttccatgtcgggtgagccttggccccagccacctccacacaggcaccggggctccctcagttgctgctggtcccagtgttcaggaaggccccgagcccaggggccggggtggctggcttcaggcccggcccacgtcctgactctggggtgagccttccacagctcaccccagagccgtggagtggtggagtgtggcccgcttgctgcagaggggcctgctctgggtgctggtgtttcctgcgggttttcagctcggctcagtcctggagcccttctctgctccagcgagccgtggtctgactgcaggacaggttctgggtccctccctgtggccctgggttcactgaggccagcactgtggtgggcygtgccccaagggcagagctgccaccgtctctggctgcctgtggcactagcttgccaggctcggggggagcattcagcttgaggctggtggttttgcatcaggtaagtggtggtcaccagtcctctgccctcttcttcagggggccatggtcttygagttggcgycctggacgtgccggcctccyagttcctgggcagtgccacttctccaggaccacggactgcaccagccgcgaaacctgagaaggcctcagctggcacccgggttcctgtgyaggagaagacgaacctggcggcctatgtgcccctgctgacccagggctgggcggagatcctggtcyggaggcccacaggtactgggcggggctggcctgagcgccatctttctgccagtcacccacagagctgtggacactcaggggcgattgcagacttggccctcttgggatatttgggggtaacttttgttttttttttgagacagagtcttgctctgtggcccacgctggaacgcagtggcgcaatctcggctcactgcaagctccacctcccgggttcacgccattctcctgcctcagcctcccgagtagctgggaccacaggcgcccgccaccacgcctggccaatttttttgtatttctagtagagatggggtttcacyrtgttagccaggatggtctcaatctcctgacctcgtgatcygcccgccttggcctcccaaagtgctgggattacaggcgtgagccaccgcgcccagccatttgggggtaacttgtaagtctccagaggtgagctgtgaggggcgatccaggtggctgaggtggggcaggggcctgtggcgaaccaagtgacttccatggcagagagttgccctccccgcctggaggctgcaagtccgagaccaaggtgctcctcggcaggaggtgctcctcagaggcctcaatccttggcatgcagttggttttttccctgtgtcctcacaggctctttcctggatgtctgcgtgttaatctcctcttgggaggaaaccggtcatggcttagggtccgctctggtcccttgctagccgtaattagctttctgaaacccagtctccagagacagtcccgttctgagttcctggggttgggactaaagcataccaacatkggggcacagctcagcctgttcccaggggcagagggagcccccgcagaggcccagagcccagggacagagggaggcctttgcagaggcccagagcccaggggcgcctgggtgtgccgtggctgaggggtgcaaagagtaggggttccagccctcgtggaggccttgggtccggactgtgaggctgtgggctggaggccgctgctctgaggtgcctggcggagcctggcctcgaggcaggggctgagcggggcagcagggtgggtggccgtcagagcagcgctggctccgacatcgtggtcctgaggattgtgggagggagcatgagggcaaaaccagggcccaggccaggaggcccctggggggccagagatgggtaaggggaggtactggcctcaggccaaaggtgctgccgcctccgcagggaacaccagctggctgatgagcctggagaacccgctcagccctttctcctmggacatcaacaacatgcccctgyaggagctgtctaacgccctcatggcggctgagcgcttcaaggagcaccgggacacagccctgtasaagtcactgtcggtgccggcagccagcacggccaaaccccctcctctgcctcgctccaacacaggtgagtggcatggcgggccttggcacgggctctgctcccactggcctggtgctcccggtgacggcaatgtggctcctctctgctgagggcgcccacacggctgggagtggtccctggcctgcctcagcaccattgttctccggtgtttgggaggaggctgacccgtgggaggtgtctgccctgctcaggaagctggggctggcagcttcagaagcagtaggggccctgtggagcctctgcccagcatcctccgtggggagtccagcactgcgggctccaggaggctctgcggcagcctccctccctgcctgggcccaggtttggacacctgagcccgcctgcgcactctgggcccccaccccactcggcaccgtgcttctcgccaggccctctggctcttccctgtggctgcagatggcacttagcggcctaggacgtctattcacgggaggagggaggcactgccctcctcaggtctgcccaagcagcttgtagctagcactgggccccgtgcgcgcccctgccggccgctggccctgccctctctcctctgcaggcacggggcctgtgctctctgctygacctgtgtgtagcccctcctcctgctgacgtggccgcacacggccttcccttgcagtggcctctttctcctccctgtaccagtccagctgccaaggacagctgcacaggagcgtttcctgggcaggtatcgcstctcagagggaagcggttggctgcagagcgccactctgcctcataggtgctgtgctcrtcgcctcatccrcccacccccatggtccgtctgcctccattgccctggggagcaggtcccgactcgcatgaggacgtctgtgcagaatgtctttggcttggccagcgggatccccttgacttggtccctttgtggctgagccctgttcccacgctgtgcragcactcccggcccagcttcaggcctgaggggtgggggtggcctgagtctccatggtgacatcagctgagctgcagactctgatgggtggcagctgtttagggggaagcccacccctgggcctgcaccgagcgggccttgccctggcctttggtggctcccctggcctctggaacccacagatggggctgcctcaagtcccaggttgaccaggggccctgcagaccgacctctgcctgttgcccccaagccctggtggggagtgctgtgacctgcatggtgctcccctgccaggtctccacgtgcagacgagctggtttggaagggctgcgtgggacgggccctggggtggctgactgcgcgtgtgcagggctgtggggcgcccgggggctgtgatggtcccctctgttgctgcttctacttcctctccccctgtcctgacgctggcacaggaaatgctgctttgggacctcccaccctctctccttagcgtccccagctgtgggtctggcttggagttggagggtgagcctctgctcttgggagcagtctgtttgcaaacagggacttcccccacgtcacggagtctccgcagctctcctcggttacgagggctggtttcaggctcccgctcttttagagctgaggcccgtcgggcggagagcgtcttgcccctgcctacctggaggcacaggggtggctgctggtggacactagggtgggcagagccgattgcctgcccaacccccgggcactcatgcaggagaggcctgtgtcggggtcacgtgcaggccttcccagcgtcctccctgcccgctcggtggatggcagcagtaagcagagccctggggaggctcgcagggctgctgtccctctggtcaggagaaggctggttctyggaggccacgtcagggccagggcctggcccagccccacatccagcagccccgtctgtgtcctcccagwctccgccgtggtcatggaggagggaagtccgggcraggttcctgtgctggtggagcccccagggttggaggacgttgaggcagcgctaggcatggacaggcrcacggatgcctacagcagggtgagtgtggctcagagcctggaccctgctgacctcggggggctccttaggggaggcagggctctgcgtgggtgtgcctgcacyctgggaactggctctgaacttgggggagatgttcttccacatccctcgtgcacagacggtctgcactttgcagccatccacctgggccggccctggctgctgggcagcctgtggtctcaggggatgctgatacctctgctcacgcagtgtggggcacagctggtggcagtgctgctgcgtcaacgggcgggggccgtagcctggtgctcgggctggtctgtggccctgggatggaggacagatagggcctcaccacctccaggtcaaccccaggtgggctcgagggtgcctgctgacaggggttctctttgggatggtcctttctagtcgtcctcagtctccagccaggaggagaagtcgctccacgcggaggagctggttggcaggggcatccccatcgagcgagtcgtctcctcgkagggtggccggccctctgtggacctctccttccagccctcgcagcccctgagcaagtccagctcctctcccgagctgcagactctgcaggacatcctcggggaccctggggacaaggccgacgtgggccggctgagccctgaggttaaggcccggtcayagtcagggaccctggacggggaaagtgctgcctggtcggcctmgggcgaagacagtcggggccagcccgagggtcccttgccttccagctccccccgctcgcccagtggcctccggcccygaggttacaccatctccgactcggccccatcacgcaggggcaagagagtagagagggacgcctwaaagagcagagccacagcctccaatgcagagaaagtgccaggcatcaaccscargtgggcctcttgcttccgggcggggctcctgacacctctcctgcgggaacctggtgcctcacttgccccaggccgagcgggctggggtggggtcctcgcctgtgccctagggctggctggaacccctgggagggcggtggagtgggagatggccaggctctgtgttcctccctgtgggctgtggctgccctggccaggccctcacctgggtgcccaccatcccctccctgtgcagtttcgtgttcctgymgctctaccattcccccttctttggcgaygagtcaaacaagccaatcctgctgcccaatgaggtaggcgtggcctccctctcctgcatccgctggagctgtgtggytcrggtgaatggtggggggcccagctctgctgctgggagctcaggcttrcagagggctctggcctaagctccctgtggcagcctgccgtgaccggcctgggtggggcggcctcctgtggacgggcgtctggggctcaggcagggctctgtgtgccacagtcacagtcctttgagcggtcggtgcagctcctcgaccagatcccatcatacgacacccacaagatcgccgtcctgwrtgttggagaaggccaggtgaggctgcggggccggcctaggtgcctggacagggccagctgggcctcagcctgcagtgggtagggagtctgggcccccaacgccccacagagctcaacactgccgggtcccctacagcatgaagtgctcattgagctctgtgccaggtgctgctctgagtgctggggaccccggtgcgagtgacaggttagcgtgggagcacccggcacaccaaggagtgggaaggactgggcgggtggcaccggtcgcagggctggggagggcgctgttggtcagtgagctgacagctgagtggtgagggagcgggcagggggagcctgcataaggggtgggggcatcccacacaccagcagcgggggccgggcgcaccctgcccagcttgagcactggtgctgggcgagcacgggagccgacaggatgggcagcctcagcgccctataggctgcaccttcatcccaagggaaagggcagggcctgggctgcttctgagcagagggcacatggcctgactccgcccagtctcagtgagtccctcctgctgtgtggctcgaggaggtgggtggtgatggttcccgtgggagtggggtaggcccctgggggcaggctgctgaggggccagggccccgggtgtgctttgagtgtggagctccctgattttgccggccaggcacacacggggctgagggaagagagggagtcaaggatgacacccgatgtctggcctgggtggctgctggaatggatggtcttgtctgcctcagggatcagagtggggctcccggcagagcctgctgggcacccccaccctctgcggggcagggcccggccygggagtgatgccaccctgcctctcccctctccccacagagcaacagcragctcgccatcctgtccaatgagcatggctcctacaggtasacggagttcctgacgggcctgggccggctcatcgagctgaaggactgccagccggacaaggtgtacmtgggaggccyggacgtgtgtggtgaggacggccagttcacctactgctggcacgatgacatcatgcaaggtacggcctggcgcctacccgctcctgctgccccaggcctcagggcacggctcccatccagtcctgctaccccayrccctggggcatggccctggcacccccacctgctccagctccccacgcctcaggttccgagcctaacagcgtgggcatggaggcagtgatggggctggtggctttgcgtcccaaagccctgcccctggggagagccgaggaccactggccaggcaccagaggacgtggyccccgcaggcccccagagcccctggagtaatcaggaggtgccccagtgcaaggcacagagggcctcagcactggccccacaaacccatccggccctgctcaccctcagccgtcttcyacatcgccaccctgatgcccaccaaggacgtggacaagcaccgctgcgacaaraagcgccacctgggcmwsgactttgtgtccaytgtctrcaatgactccggtgaggacttcaagcttggcacyatcaaggtgagtgaggggccgtcagtgaggctgggccccaggcaggtgcccactgctgtgtcccgggttggtggcaggtcctcctccctgagcttcggtcacgaggagcaggaggagaggccgcagtgctcagggccccgtgggcacgagcttcaccccgagcctgcgttgtgtcctctgtgccctgaagcctgtggcgcctgctgctgagtgtctgtcaggagtaactggcaagtgcagactgggtgtgctgggtgggcacagtgtagttggtgcttcctgtctgtccggcgcggcccttgggcccccaccatctccccagtggcagctgtcaggctgctcagttggttatcgccacgcaccactaggcagcaaccagcgtcaccctcttcctggaggtgggctgggtcggccagtgtcacagcacggtccgggtgagccccagcatggcggggagagctggcatggcccaggcagggcagataggctggaggcctcactccaagggccccaggatgctgaggcagccactgaaccaaaaccccggggctggtagtcagagtccaggaggggcaggagcatagggaggtgggctctgctagatgccaagacaaccagttgggggggggggggcacctgggcggctgaggagggtgtggtggtgccgagatggggtgcacggctcacttcatggctgggcagacggattcggacgtgtggctgcagacaccctgggggccccagtgagtggaggtgccccagcaattagaggtgtcttgcctgtggctgcagcatatgtgggtgctgcgcccagatgtggagggggcttggcctgggggaggccagacaaacacagccccgctgccagaggggaaagttcaggggcagatgctgcccatggagctgacaggtgtctagcagtgcaaccaggcagtagccgagatcagccttcagcacacgctgtgtgcggggatgaccctttctcttgtcygggcagggcyagttcaactttgtccacgtgatcgtcaccccrctggactacgagtgcaacctggtgtccctgcagtgcaggaaakgtagggccgggtggggccctgcagtgcaggaaaggtagggccgggtggggccctgcagtgtggcgccaagagccctgggcctggcgtgaccaccaagtctccccagacatggagggccttgtggacaccagcgtggccaagatcgkgwctgaccgcaacctgcccttcgtggcccgccagatggccctgcacgcaaatgtgagtgggggtgggtccaggcgtgagctggtgggacaggcccaggtgccacctgatagtgagctcaccccctgcctmcgtccccagatggccycayaggtgcatcatagccgctccaaccccaccgayatctacccctccaagtggattgcccggctccgccacatcaagcggytccgccagcgggtagggaatatggggctccctcagcggggtgtgctggctgcccaagctgtggggcgggtgtgtgggcagagyggttgccaygcctcccagacttastgcccaagccgcctctgccttcagatctgcgaggaagccgcctactccaaccccagcctacctytggtgcaccctccgtcccmtascaaagcccctgcacagactccagccgagcccacacctggctatsaggtgggccagcggaagcgcctcatctcctcsgtggaggacttcaccgagtttgtgtgaggccggggccctccctcctgcactgrccttggacggtattgcctgtcagtgaaataaataaagtcctgaccccagtgcacagacatagaggcacagattgcagtcagacagctcttttattgacttygtctgcttggtgcgggggttgggggggtgtcgaggctctagaagcggccatgcccacagaagtggtacacagaagcaggcacagccagctccgagggccttgaggctgcctgggccatacagcacactcgcgcgtgcgcgcgcrcacacacacacacacacagtcaccttcctccaccctgggagccagcccccaggaggagtcttttcctctaaccaccctggggtcctctgacatgcctagtcctgctacttgcccagacctgatgccagcaggcctgggcgctgctctcttgctacctggcctggggcmagggaggatgacaaggcctctggggtgatgagagtgcctggcagacagctgtgcccccagcaccggcccaaggccawgctcgcatccaagcagcagccgggctgccataacgccaccacacctaccaagcgcassaggtgttgggggaggccagctctgggcgcaggcccctcagccctagtgaaaatagtgacatacaaaaatatacacattttaacaccatataaattactgacacgagacacacagtgagacggtgcagggagtacggtaggaactggagaggtaataacttaggggcagggtggcggcggtgcaggctaaccctccctgaagccagcagccttagcagtgggggacatctgcccagggggtggggccgggcacagcccgctgtacctgaggactcggggaaataaattagcatctcagaggctagaaaccgtccaatactgctgtgtccttcccaagggagctggggaggggaccctgggtcctggttggccacacagcctctttaaagtgctgaagcccacagacagacagatgcccctgcctgctcyctggggaacctacgtgcagccattctgcctggccctcggccttgacagcggcagaaagtaatactgagcggtgtccactcygactccacggcccacccccgccaggaaggaggactaagtgctgctggggtggaccttgttcttggccygaaggggtgtcctgctggggccagtggccaggtccacaccccgactggcccrggcaaggcggctgggcagtgctggccgcaggcccggggatgggccacgggaagatccggcggrcgcccggctgctcctgcggccttgcaggctgtgcagctgctgctccagctgstagacgtcctctgtggcctggttgagtcrgtcaaackgggtgagcagggcctcgaacacggcttggaggcgggagggctcrggctcacaccttgtccccagccggcccaggctcacgctcagcccatccagctggctggaggaggtggaggggtgcgaggcatcggagccagcgctgggtgggggcacatccggggataccttggagcccctggaggagcgagagggcagcggctccatcccttcaaagcrgactttgtggcggaactgggggcggcacaggggctcagtcagtccggctgcaccctgggcagagcccagggcgtgtccctctcccccccactgggccgtacccacctccttgaccttgctgaggcccatccagaggcgcarcctgcgcaggaacaactccaccatctcstagtcctrgggctcccaggccggccggtacagctctccacgcaaggcgtggtagcgccagcggagaataacagcccccagccgtagggcgccccacagccgcagygcccagagccccacwcacagcaggggtgacaggtgccaggactcggcaggacacagggtagagagcccagtcccaggrcacagcaccaacagggcctrgrccacgctccagagggagtccacacaggaagacacgagctgcggggaaggcgacaccagtgagggcgtacagctgagctgagctgagctaagacgccctccccggccgcgcagtcacctaccaggayggccagctrggcktaggctaccccgagcaccaccaggyccaaggtgacccycaggagctmtggcagagctcrgcataatgtcttgccaaagacggaccactggcgcacgaagcgtasstgctgggcagcctgcggacgagaaatctgtctkcttgcagccctggggtgtgcgcccagccccgcgcccaccggcccagccctcaccttgaccaaaagcaggaagagcagcgaggccgccaggccacgggctgcggagctcasstgcgccacctggtcgaagctagtgaagcggcgcgggcggccgcgcacgaaacgggtccactggcggtcagcggcacccagctgggcgaggcgtaccagtgccgtggccgccgtcagcgccaccagcagccaccgcgcccaggctccgagccgcagcacgcgccagcgcccttccctgtgccaagtacgggcctcggccacggcgaagtgcacggcgaacagcagcaggcacacctgtggggggcgcggtcaggagggcgggagggacgctgccggggcggggccctgcgagggggcgggacgctgccggggcggggccctrcgagggggcgggacgctgccggggcggggccctrcgagggggcgggacgctgcgagggggcggggcsctgcgaggggtgagacgctgccggggcggggccccgcgagggggcgggacgctgccggtgggaggcgcggggtctggccggggacgggcgtaccgaggtgagcagaggcagcgagaggcccgcgctgaggcggcgcagcgcaaaggggcggacgctgagggcggccagggcgcggccggccgccgggaactcgaggcgcagcgtgacggcggcgtgcagccccacggccgggctgtagcgcgtgagctccrggaacacagcgcggctcctgcgcagagggtgcgggtcagtaggagcgggtggcagggcgggagctgcggggaccgcgcagtgcaggcgtggctgaggggctgtggaagccgcctaggccagcgggggccggaggagtgagggtgggctcctggctggtgactgcggccaccccggagagggcaggggagggagctcccacctgttgtccagccagttgtgcagctgcaggaagcgcagccggtcgcggctctcctccaggctcaggcccagctcctrcacktagcccccgctgtcatacacggcacaggagscccaggaccatgccctgccggagaggggtggcgtgggtgccgcaccccagcccttccggcaccccggagccaggctggtcaggaggccgcggcactcctggagaactactcccttgtccttggcgtagacgcccggggccctcgctctgctcaccccagcagatccggcgctgaataggcccacgtccccgagccattgtgaggactctcccagccaacgtcstaatcgctggtgctgaagcctcctgcggccgagcacgtgtggaccctggggccgggagggtctgggtagagtgctgaaacacacagagccccaggccggggccagggcctcatcaaaacccaacaggagtgtttcctgctggccagctcgcctgagctctggttcggcgccaccccagggaaccctcccagcagccatcaattagacaacgttaccatctctcatatacagagaagraaacggcggtgttaagagggcaaaggtcacacagctagggagcagggctgatgccagagctccgctaaaggctgctctctcaacaagaggaacgatttaagtcttggggcacgccctgccagctcaccttcctgcagccrcacctgccgcagccgtgggggccccagctctgggctggactggttcccgtggacgtagggcagcagcacgtgggccatccatggccagagctcctcagacctgccacagcatcagtcacacgctccagcccctactgccccatgcccgcctcgagtgagcggccaccagagacccagggaacatggytcccactgccctgctggccacggctagacctgggcttctcagccttatcctggggatgttctggggcagacagttgtctgtcatgggcccgtcctgtgcactgcaagacacggacctgtgtccctcccctctgcctactgatgccagcagcacctacctccagttctagcagccacaaaggtatctacacatgtccacatgtcccctagggtctggctggactaaaggcaaaactaaagcccagaagacagaccagtgcacyggatgcccgtacygcgtgatggccaggaaggcccggctgtgcagctcctgcttgatggcgctttrcagacggtaggcgtgcccatgkcatgaggcatccccatagctggccagcagggtcaccagcagaaaaagcrtgtacaccaggaggctctggtggacgggggggccctgtggtcagcctggccccagcccacagtgacagcagggctttggcaacggctggagccatggctgcggcaggtgtggctkcaggaaggtgagctkgcagggggcgccccaagactctacctggccagggtaatkgsagcacacaccctgcccggaaccccacctgggggcagacacacaggccactkcagtggtgcttaggggccttcagggccaggcaggagtgggcattggagctgggccctgkcagggactggggcagcaagtggggggcgtggggtaggagggagaccgggcaaaggctgcagagcattgaacccctaagggccttctgaggtgaggaaagggggacaggagtgtcctgcgtgcatgggtgggaggtgggagacaagagacggaggtggcaggggcacaggccgcacccaggctcacccgcagcatgccatgtagcctcttgaccttgcgggcttcttccttggccaggaagagtgcaaagccgtggrgtggccgtacgcggggcacacgtgcgctcacaggcgtcacagccgggctstctaccagggtgtcatcttcatccggstgcagccgcttggccaccagtgagaagtacagggcttccagcaagacctggggagggggtggcttcagaggggtcccccgtgatggaggcctgtagcctacccctggcagccccctcaccttcagtggctcccagcygaggaatgaggccaggaagstggcgctgctggacaggagccacgcaacactcacgcccggggggaagctcgcacccacccaccctgagacagccacagccacagccaccaggagcaggctgagccygtgggccagggaggcacaccaggccggcagcaggyscttccgcagaccctccaccagtcctggggaagcagagacagacctgtkagaggcagctcacagggaggggctaggggcatcccggggctacgcaagcacacctgtcctggacagcctcgctgcctggggctgttcccagttcaggcctgggctgggtggccccagctcccccagcctctrcagcrccagcgtctctgtcttctccccaggagtgctggacctgagggacatggtaggctgtgaattcatcccggcctccaggaggcagttgcagccaagcccatgttaacctgggcgggcagtttctkgagcctcttgggtcacagggtccccccgacawaawgccggaagaccctaccccaaacgagagtgggagtggtgctgggagccagggaaccaagagccactscaggcaccgaagtcaggcgtccgcctgcgtccctctcccgcccgcttgctgctgataaacccatcgcccacagcctgaccagctgcccttacagcagtgcacagtctctcagggtgcaatgagccccccttyaaccctgcaaactatgattgggtytcaaccatccaacaagcatctctacaatctagagacgccagtgtgtctgtcccatgcaggtttatggcctaaaattaacttctggacaaggaaacatatgaatgcctttcaaatcccaacagtgtgtagggctccctgaggccagagatctgcttgtgtctccaggagccagtgaccaccgaggctgtgccactgcatcgggccaccatgctgatatgcccggtcccagagctgctagagaagaggtacagaggcagcgaagacacgttgagggggaggacgagaccaactgcgagacgccgagtcccgggctctcaggacgctctcccgtacctgcrccctcgtcagcccatcaccgaaagaacggcctgacccagggtcacactgcactgaatgcttcctgttttgctgtctctcggaggataaaagacactcttggctgggcgcagtgtctcaagcctgtaatcccagcacttcaggaggctgaggcaggaggatcacttgagctcaggagttggagacagtgagaccctgtctttacaaaaaattaaaaaatgacctagcctcaacttkgtcaggcgtggtggctcacgcctgtaatctcagcattttgggaggctgagatgggtggatcacgaggtcaggagttcaagaccagcctggctaagatggtgaaacctcctctctactaaaacacacacacaaaaaattagccggctgtggyggcgggcgcctgtaatcttagctacttgggaggctgaggcagataactgcttgaacgtgggaggcagactttgcagtgagccgagatcatgcgactgcactccagtctgggcaacagagactccatctcaaaaaaataaataaaaataaaaaataacccagcctcaactattcctttatagcaacacaaatgactcagggtctgactcagggagcaggctctcgctggcagagacggagaatggccaatagggaggcatggagtggcagggaatgccagggcagaggcgccgccaggacggagggtgcaggctcaggcgcagggaaggccgtgctctgcgttgggaaaggagccacgggacgcgctggaggctgcagtgaggaaggacgcagaggggtccaggacaaacccaagcctccgacctggtcagcccgaagcactgtccgagcaagggacggccaagggttgaggaagccgggagggtgagggccacgcgctctgtgtggmtgcggagtctgagctgccgtcagaaatccccgcggaagcactgaatctggatttcacagagctttgggccggagatacctggggctggtcagcatgtagtgactacccctggatttccccatactctgtatttttaaaaccaaccagcaatttattcataaagatgccctcatgtgatggttatctgccttttgtaaatcaggaagttttcctttttgtttgagtccaggggcagttcatacctctttagttcttggttgcttaacaatgagaagcactcaaaggaataacacacaaatcaaactagatgtggatgcaaaagcagcagtcacgcaccacttagtgccagggatgtgttctgagaaatgcgtcattaggtaattctgttgctgtgcaaatgtcacagggcgtagttacccaaacccagacaccgcagcccctgtgcatgcaggccctgtggtgtggcctgtggctccggggcaccgcacctgcacygcatgccactgcactgaatcctgcaggcagctgcagtgcaacggcagggccgtgtggacctcagcacacctgagcataggagggcatggcagagcccggggtcacacgcgtgggaacacgccgtgggtgcgctccgccgccggctgccatgtgcgtgactatgtgcgtgactacatacaaggtaacctctatatgaccatttgttgataagttacaaaacaaccaagaaattgaggaatttttttktttttgagacggagtttcgctcttgttgcccaggctggagtgcagtggcgcgatctcggctcactacaaccttcacctaccaggttcaatcgattctcctacctcagtctcccgagtaactgggactacaggcgcctgccagcatgcccggctaattttttgtatttttagtagagacggggtttcgccatgttggccaggctggtctcgaactgctgacctcaggtcatctgcccacctcggcctcccaaagtgctgggattacacgtgtgagccaccgcgcccggccaaaaatggggtatttaaaaacccgcccataatttctcactgctctgagaccaagataaaaacgtggccccggccagcctcacacaggagcctttctgctcctacaaagccccatgagcctgctccctccctagagggaaggttctggggccctggggatcccatgaggctctttccacagacaacagaggttcagagaagtgaagtggtgcagccacagccctgccctggcaccccaccccaccctaccccaggcgggaaccacggctgcctggcctgagtcccggcccctcctctggcaatcccccctcccccgagagccggacactcacaggctgctgagcaggtccgtttccatgtgggtgtcttgggtaggggctgggctgctgaccccctcggcaakgacctrctrgatcaggtcttcatctagaggtacaggaggcatagggtgggcccagctgcaagggtgagcttcagagccccctcctctcaccccagctcacctgatgctgagaaggatttggcaggcgagtaggggctrgccagggagaagccgtcctcctctgggcccagcccatggcccgcctggccccgtgccagctgccgcagattgctacccacaatggacgggtcactgagcaggtccggccaactgagcgttccctcgccggagggccagcacascagactgcaggtggcgcgggtcagcaaggtaccaggggatgtgtcacacacacagcccacccccgtccagtcacgcacggacaccctgggcttccgagcaaacctgctcccrsgtggtgtgaccacatggagccacagacacccagcaaggacacgcagcccgcacacccccggcacyccagacacagtgacctgcaccagggctcgaggtttctctagggaacccacctcttagaatcatccagaaacaagtcactcttcatctgtccarcaaaggcctgctgagaggtgcacagkgtcttgagtccaagctgcgccaaggcggcaggacccccagcccagcccaggacccccagtagagycctcacctcagcgtggaggcctgagaacrtgaggaaggagctgtccagcayggaygagtccaggcagctgtcratgtccagcacctgctgcccggcaggtgtggggctcgggctcccagccacctgcaggacgagggcagtggtcagcnggcggcagctcagacctgctcaggacagggatgagaagccacctcctcagcagacaggacagagcccggtgccatctkacagaatgtyctagaatgctrgatatatgggacatctgcaccgtccgtgatggcagcccctcgcgacgtgtgccactgaacrcttracagcagactggtgcagctaaggaacagagttttaaatttcatattttcttttttagatggagtctcgctgtcacccaggctggagtgcaatggcgcaatctcagctcactgcaacctccacctcccgcgttcaggcgattgtcctggctcagcctcctgagtagctgggattacaggtgcctgccaccatgcccagctrattttttgtatttttagtagagacggggtttcactgtgttggccaggctggtcttggaactcctgacctcaagtgatctgcccgcctcsgcctcccaaagtgctgggaktacaggtgtgagccaccrcgcccrgccawcgttccattttaattaacttwaayacgagcagccacatgtggcctctggttcctgccacggactcgggagcaacccctcctggtcgcrgcttatgcgccttctctgtgtgctgctggggttagtttgcatgtaacctcttgaggaccccacgtgtgcattcctaaggggtgcggcctcccgtttccgtatgaatgggaagcgttcccacctgctgtawtcttggaaagagtctgtgaaggattggtgttaawtcttccttaactgcttagaaaaattctatcgtgaaggctctgascctgrgcttttctttgtgggattttttttttttttttttggagayggagtcttgctccgttgcccaggatggagtgcagtggcgcaatctcggctcactgcaagctccgcctcctgggttcatgccattctcctgcctcagcctctcgagtagctgggactacaggcgcccgccaccatgcccagctaagtttttgtatttgtagtagagtcggggtttcattgtgttggccaggctggtctcgaactcctgacctcaagtgatctgcccgcctcggcctcccaaagtgctgggattacaggcgtgagccaccgcgcctggccctttttaatgttttatatagatgkggtcttgctatgttgcccaggctggtctcaaactcctggactcagatccgcccacctcggccacctgaagtgttgggattacaggcgtgagccaccacacccggcccggccaytgggacgtttctaagggactaactcagcctcttcacttcctatagatgtactgagattttcttctggagtrcatttcggragcgtgcacagccgcgtgcttgcttcttctgagttatctggcgtgctgctgtgcagtcgtccgtggcgtctgcttagcaaagtgccctcgttctttcaycattctggcttctgagtcttctctctttctccctggtcagtctagctaaggctgctcaagtgtgttgacccttcccgagcagcctttggtggacgcctttccctctggctgcagcactggaaagtggcggccctrggcatggtgccgaggcccaggctccattcccagtactcccgggtccccagccccagcccaccttgctccgggacatccggaagagaaaraggatggccaggtagacgggatagacaaccacgctggacaccaggccaacagcgactgtgtcgacgctcagcgggctcagcctggacacatgccccgtgctgtgtggaggagaggaggccacacaggtgaggctgaggggcaggaagggctgggcaggaagaggctgycccgacccctacggcacccacctgtaggcagagtcrccaacagccccgtaccacacggcgttggcgcccaggaagaggcagatgaggagaaygcagcaggtggccctctggatgcgagtgaaacggctmcgaggcggccggtcccatatggagagccagatgtgcttgtcaaagaagccacgctgcagctcagccaccagcaggcgccggaagcgcaaaagggctgcgtcgcctagaaggcagggagggccgcactkcaggaggccacggggcaggaccaccytgcccaacctyccacggagtgggamcatggaacgaggccttactcgcggccagcacctccttctccaccaggcccccgttggcctccgtctccaccgaaagccagtcattgaccaggaagaaggcgctgygtgccgtctrcaggtccctgacgatgacgtgctgcaggaaccaggcagggctgagccctgcagaggcgcrggagggaggtcaggctcgcagggcgccccaatscgggggcagaggggcagagcttggcagggtccgcacaaacctttgttgtcgtgccacactcggatcttccacacgctacccaggctgtgcggggtggcgatccggaagawgtccaggctgttgcggtggaaggctctgtcgccrtccaggtgccggtggccgctccggctgtccaccccatacagcatgatgcccacgtgggccgtggtacctgggaggcaagagggaggggtgggaggctcggtctgctgcccaacacgtgtggcatcccaggcaagtcatctcagctttggcctgtgcgcactcaaggagccacacaggcagtcccggctttgcacggctctgccatacacaaggagctgcggttactgcaatttgtccaattaacagcaggacctcaaggacatgattaagttacatggaaagaactgtaacttgtgacatgcaaacatggctgcacacgcctcagtccacaccacaaccagtgacccgcactgcacacctgtccacgcctcagtcatgccacaaccggtgacccgcaccacacacccgtccctcagttcatgcacagactgcaaagcgtgaagctgtgtcacctcctctcccagtgacagacccaggtgacagtattttttttcttttttttttgagatggagtcttgctgtgtcacccaggctggagtgcagtggcgcaatctcagctcactscaagctccgcctcccgggttcacgccattctcctgcctcagtctcccaaggagctgggactacaggcgcctgccactacgccgggctaatttttttgtacyttttattagagacagggtttcaccgttagccaggatggtctcgatctcctgaccccgtgatttgcctgcctggcctcccaaagtgctcggattacaggtgtgagccaccgcgcccggccgacagtttttaaaagtaggtaatcaaaagaaagaactgggcaatgaagaggaaagcagcacagagataaaaaatgggaacacagccaggtgtggtggctcacacctgtcatcccagcactctggcaggccgaggcaggcggatcacctgaggtcaggagttcgcctggctgacatggtgaaaaattaactgrgtgtggtggtgtgcacctgtactcccagctactcaggagaatcgcttaaggggaatggcttaaacccgggagctggaagttgctgtgagccaagatcatgccattgcactccagcctgggcaacagagtgagactccgtctctaaaaaaagaaaaacgaaaacaamaagggaatgccagaagggcaattccaatgaaaggaaaatggaggtactgaagaaacagccacggkgagggtgctggcrcctccgtctgagagacgagctatgcagtcaggatcgcgggtggatgcacagtctcccacagtggtagygatgctcaygtmacttgtggggcyacgctactgtgyagaacgtgggctgcccaccctgactgactggcacctacttccagctaggagctgtcctagtcctcagggacagtgagtgctcacgaggtcattcccaggatgaacacacgagcccttcacacagyactgcaaaaactgccttgttctgacgcctgcgacgagactcaytcccagagggtgcaaccagcacagccagtgagagcaggggaggccctgccaccccgctgcgsccctcacctgagccccggccccagcctgtcttgacgaggatctcgtacttgaagcggccccgctgcccacasaargggatggcgcggccccggctggcatccaactggtccagcttgtgcaggatggcggccatgaccatgtaggtcaccaggcacacagcacatgtcagcatgacgatgtagtttacatccgctgtyggctcctgtgaggacacagccgccgggcccaggaggtcacgtgcaagctgtgccttctcaggatagagccgagcccacccaggccctcctcgactctgcagaggctcccaggagcacagggtcactcacaggaarsacaaagcggacatggcttgggggcacgaagaggctggygccgaaggcggtgaggtggcgggtgaggcagacggcctggcrgggcgaggtctcctccaggggcagcagcccctctgtccgccacaccayrtcctcctmgctgaagtacyggcacagggacgtgtacargcccasggacacctscagcgccgacyagcggaagtggctggagaggttcagatggtaactccccgctgggtctcygctcctgggmagggaaggggyagcggacgtgagyccaggytccgcmaggttggatrtcgcagtctyagarcccatacccggtccagtcccctcgctgcctgccgtccccatrgggccygtaacccaggcaatgctgacccatgatgccctgccctgccctgccaggcyggcccrcagagctcaccccggggaaatgaagaaggtgtagggccggtggtcagcaccctrgagkgastctgggcggatcctcctgctagccgagcagttgygctcattgggccggggctccgagtgyaggtagactgccaggtagggctcaggttcctcagacaggtagyggcctggggcagaacgcgcaggtcacacgcctgcygggaagctcaaccacccgggggacacccacgatggccctcctgagcccaccctctgccacgggcctgaaaggccatmggagcctctgcaccagagctggcacctgcttctccgtggcccccagctcctytytggccaggcccccarcagcccatgaaacagaaagcaaatttcaccagagacacccatggaagccctacgrgaaacgscttccccccaagaacaaggccagggggccgcgtgtgccccamccgctgcayrcaccgtccagcagcgtatagttgagctgcagatgcagcmcggccrcagggttgctgctgtccagggtgaccacagcaccgacggaggcctggggctrgaccacaacggagttggcggagttggcggagctgcggtggccccgggcagcccagtccgagttgttgggcaccttcacggtgatggcgcgctctgaggccagccgctcgatggggatctgggcgcyggcctgtgtctggaaygccatcgaggccaccttggtggagacggtgtagttgctgatatagccaaagrgaaagggattggagtccaccagaaagrtgagctgcaccacgtcactgaggttrgccrgggccccgctgaaagcctcggggatggagaagtggcagccaggccctggggcgccgccatagcacagcaggctcygcgggtccgagcgcttgycctgggccacgatctcctcrcccgccagygtcaggggctcctygttgagcaygcgggagcgcrtgasgatgsgcrtgagggcagaggtcaggttgtagkcctgggacgccaccatcsgaratggtgactcggctcccagctctgagggctgyggtgcccgcacgtccgagctggccaggtggatgaggtctcctgcagacatgcgtgaggtcagtgcagagacagggaggtagagggagggtgggggcaggcaaaaagggggagccggagggtgggggctgggagaaagggggaacctgagggggcagagagcgaggtgcaggcagaaggaagggggaagctggagagagagtggtggaggggggagggggaaggtgatggggatgaggacgaagatgagggggatgatggggagagggaggaaaaaggaaggaaaagggtagagaaaagagaagggagaagaagaggagcagggggaaagggaggggaagggggataagggaggggaagggggatgagggggatgaggaagatgaggggaatggacaaaaggacggggaggacggggggggaaatggagaaaaggggagagagatggagaaaagggatggtaatagggaagggggagggggaggagaatgggaattgggggagggggatgaggatgggaattggggggaggggagggggacgaagatgggatggggcaaagrcgacrcggttggggggaggagggaggcagaggaaagggccscacggggcgggcgggtggcrtggggcacggrccgcggcacctgtgatgttgaggatgctgtctccgatggcggtgggcgtcacggtgcccgcggtggtctctgcctgcaggatgmgcatcatggcctccagcttgtgcagcgtctgcttcaggcacgagcggcatacgagctccctgctgggcccctgtgtggagccagcagtgtccagccccgctcctggccccactccttgcacacgccctcctctctacacgggtcctcacctggctcccacccccagccctgcagctggagagcccacttgactggacccccmcagyctcctcactaagcattttytgtggctctgcatgaccsasggcctccacctggggaccacgtgatgcagcccacygaccacacaaggcacctcttcacatgagagcggaggaggaggggagagaggagaggggagtggagaaaaggggggagaggagaggggaggggagagaagggggagaggagagggaagggggagaggagaggggaggggagagaagggtggagaggagaggacaggggagaggggaggggagagaagggggagaggggaggggagagaaggggggaggggagagaagggggagagaaggggagagagaagggggagagaagggggagagaagggggagaggagaggggagagaagggggagaggggaggggagagaagggggagaggggaggggagagaaggggggagaggggaggggagagaagggggagaaaggggagggaagcggaggggaggggaagaggggaaaggggagggaggaggaggggaggggaagaggaaagaggaagaggggagggaagaggaggagaggggaagaggggagggaagaggaggggagggaagaggagggcagggaagacaaggagagggaagaaaaggggaggggaagagaaggggaggagaagagaaggggaggggaagaggggagggaagaggaggggaggggaagagaggaaggaagaggaggggaaggggagggaagaggaggggaggggaaggggagggaagaggaggggaggggaaggggagggaagaggaggggaggggaagaggggagaggaggggaggagaagaggggagggaaagaggaggggaggggaagaggaggagaggggaagaggaggggaggggaagaggaggggaggggaagaggaggggaggggaagaggaggggaggggaagagggaaaagaaggggagagaggaaaaggaagagaaggggagaggaaaggaaggagaaaggagaggggaaaggaaggggaaagtggaggggaaaggaagagaaacagagaaaaggaggaggggaggaaaggaggagggaagaaaaggggagaagggaagggaggagaacaggggagaaggaaagggaggaaagaaagagagaaagggagggaggacaggaggggagaaggggaggagaggaagagaaaagggaaaaggggagaagaggggaggaggaagggaggaggagggaaaaagagaagggggaggggagaggaggagaaggggaagggggatggggagaaggagggggaggagggggaaggagggggaggggaggaaaggaggagggaaggagaggagggggaggggaggagagaggagggggatgaggggaggagaggagtggggaggagaggagtggggaggagaggaggggggatgggaggaggggggatgggaggaggggaggagaggaggagaggagaggaggggaggagaggaggggagagaaggggaggagaggagggggatgggatgggaggagggaggaggggaggagggggatgggaggaggggaggagggggcatgggaggagaggaggaggaaggaggggaggagaggagggggaataggaggaggggaggagaggaggggggataggaggagggaaggagaggagggggatgaggaggggaggagaggaggggggttaggagggaaggagaggagggggatgaggaggggaggagaggagccgggaggagaggggggtgggaggaggggaggagaggaggggtaatgggaggaggaaggaggggaggagggggaatgggaggggggaggagggggaatgggaggaggaaggaggggaggaggggggagaagagggaaaagaggaggaaaggagggaagaagggaaggatgaaaagagaggagaaggggagaagaggagaaggggagaaggggagggaggagagaaagggagggaggagaagaaaggagcggagaaggggaggtgaggaggagaggagggcagggggaggagggagaaatggaagggggaggggagagaatgggaacggggaggagggatgggaggagggatgggaggaggagagggggaggaggggaggggggagggggaggaagggaggggggagggggaggaggggaggggaggaggggaggagggaggaggggaggaggaggagggggaggagggaggagggaggagggggaggaggaggggggaggaggggaggagggaggaggggaggaggggggacaggaggggagggggaggagaggggaggaagggggaggaggggagggggaggaagagggagggggaggaggggagggggaggaggggaggaagggggaggggaggggctaggggagggaggggctgggggacgagtggaggggctcagcgggaggaggtgaggggaaggtctaggggaggggaggaggggaaggggtaggggaggggaggaggggaagggctaggggaggggaggaggggaagggctgggggggaagaagggaaagggctaggggaggggaggaggggaagggctaggggaggggaggaggggaggggctaggggagggaagggggaggggaggggaggggagagtggagggcacagagcagcatcttcttagtccctccccacatctgggcccctctttacaccctgggtcccccgagaggcaccctgcgttcacacaggacagaawggctgaggctactgaagcaggtcagagaccgaggaacgccatggcakgaaggagcccaggctggaggctcagctcctcggccaagctgcccgtctgccctggggggstgaacccagtgccctggcaggcatgcggggcrgggwgagcaggtggggccatcctaccatgcactgggccagcgcagcagcgatctgctggatgtcatccacagtgtggaccctcagggacaccagartctccgtgatgttcttgcgtatctgggctcrgygctgccgctcgtgcttgggctctgccgccacgtccagggcccgctcgtactggggcaggcaggsggcacagcaagctgtcagcagcgcaggagrccggcaggaggccagcagatgcccacgactcccggggtgcagttacgtgctagacgctgtgtgatgcgggcaytgacccacaacactgagctgtttcttcatgggcaaaacagggtaagcacatgggccctcctgggcgggggctgcattgtggaaagcagacrccggagagggcccggtgggtgtggctgctgggagcggaaggtcggggtgctgcttcagggtcactgggatttatctctggggcccgggatragccctctgcaaagctccaggcaggggwacaggtcttggtcccmascacgcatgcagcagatgtgacgtcccctsccaggctgcactcacctcgttcagcacggtgaccagggccaacgagtactcgatgacgwgctggggatcrgcctgccgcagcagcccygggagcacactagcggtgagccsgtgcagccagactgtgagccccrttgcgctgccgttgggctctgggagggtgatggccaragacctaygagcagagsggggtggtgagcaggtggcagtctcgggggcgccctcccacggcctggctcacctgttgagggcgaccacagcggctcccagctggtcctgcaccaccacggccaggcccacctcgaaktgtggcctgaaacccgggggcagcacggctccgtagcyggagaggctgcycttgtagacacagaactcytygcagtggcccwggcrrcagcgcygcagcagcagggcrtacaccagcggggcgccagcatcctccgcgtcatgccagcctgagggayggtccccacrgcatcacrggagggctccgtgacstcacagagtcgggggatcccgctgctcccccyamgcaggcctgyactcacccrtgcattygaagtgcaccttggtggtgagrgcgtgcacagcgccyartgggaagasgcrgcaagagccccccagcrgcgggcggttgggggacaggsggatggaggcgcagccctcctcctcrccagagcggcccagcaccgtsagcgtgaaggtgtatccctcgccgtcccgcagcacgccccgccgcagcaccagtcrcatgcctgcrctgcccgtggatgtggtggtctcatccagcaccagygtcttgttgctgaacgtacrtgcagcccaccgctgyaggyagaagggrtggtgagggggcgcaaccctctgccctgtcagccccacttytgcctgcaggccccgtcccctcggscatgggacccatccccaryccgcccacaccccgytcaacactcacccctcrcttggagccgctgctgcaattgargcagcggccctccargtacacgtaggagctgcggctcacttcgtacacggcctrtgccttgcaggacacwcactccaaggacacaatgggcacccggccactscggatcagcacctggcgtgggagtggggttacctccaacacaggtctatttggcctgctggaaggwctgggggacccrtggaggatgctgctcccaaactccaggtttcccaggggcctggccactgccggtgagctcacyccctcccaggatactcatccggtttgccaccttccaacytggrcggcggaagggcatacacagggcagaggacactggagtgtgygttctggtgtactggasccagctggaccctrrcaggaggcaggcaatgctcactgagggcccctggggggatgcgtgtgrgaasagacgtatgtgkgggtgtgaggaccgcagytgccacgtaggcctgactcacagactcctgcagcccttagccagggcctgggtcaggaggctgagcygggatggaacctgctcccacaccctcccctcagacgacccctctgggaagacccccaatcaggccagctgaggraagcagggactggggaacagacrcccactctggggcaccagcaggccccgcctgacagcagcaggagcagccaccacgggctcagggtcaccaagcctcctggccggtccagagwggggagcrtragggtgagaaccggcccaccacatccagcaacagggacatgggctggggacagtggctrcctctggggtgggaaggggctcttcctcactgttggtattgctrggggactgtgtagcttttgycactagagcatatgtggcttgaagactgtacgtggaactgtggcaggtttggaaggaagcaaagctgaagcaggctgtcgtgttacrtagaatttgcatcagaaacagagagggragagcgtgcggcctccaccagcactaaaacacggaaaacagtagatgaccagggaggytgggctgtccaaggcaagtggccgaggggcgggcggcacccaccgtctggttggtggcctcctccttgcggccggccttccacacggtcaggctgaaggtktmctccacgccagcygccagccrytcccgtggaatggtgaccgtgctgctcccgcggggcccaaagttcagcgcacacccgccagcctccctctgcaggccgagaacaaggggcgacgtggccygagarccccatccagttttaaagcagagcccggcccaggagacagcgcgggagaccccctccccatgctgggacggggcccaccaggcactgaggacgggccagccctggtggcaagctgggtgttctctgggctcatgggtgtggacgggtgaggggcakggaggacggccctgccacgcactgacctgtgtcgaagccacacaggcccastggaaactgagcggcgtctggtcgccrtcctccaggttggggtcgtaggactcgctcccatccagcaccaggtccygtgtgtctsaccacacgcggtakgagccaccctcartgatgggcaccaggcgctcrggggccaccrtcacattggcctggatgctcyrtgycagtggcgtgtccccaaatgacacgacaaacacaaakcagtagtgccccacaggcagcgccagccrcggcagcaccagcygaggccggctcacgtccacgccgggcagggccacacgcgcygggcrccccggccgctggcagctggcggtgcgrtacacctcccagcggtmctcagtctggtaggtgacrcagtcgcgcaggtcaacgtgggcctccaagtagttgcgctgtsatcrycgcatcagcacctrcaggggcaggaccacrtccacctccggctcccggcaggccagcacctggacggtcaccgtggcctgcgccacgaagaagctcaccaggttggaggcgttcacctgcacgcggtagtccccaggcctcaggtaggagtgctcggccctgggctcatctgtgtcctgccctggcgacccatccccaaagtcccagtggyaggccacacgccgggggctggggctgrtggcggcctcaaactgcgccgagcggttggtgaagcaggggccrctctgcagggccacatactggacggcgtcctgaacctccagcaccagcgtgcggttctcactgcccagggcgttgaaggcgcgcacctrgatctccaacagccccgcggccacgggcgtgtaggtgacgtcgcggcccgacaggatraccagcgagtcgccctrgaccttctgcagcgagaagtaccaggcgtaggcgacccgagagccgcgctgcacgcgggctgtgaagttcctctcagtgcccgtggcgatgccaggctcgcagcagttgggcayctgcagcccactcacggcctccagcaccacgatgcgcacctgcgcctrggcccagctcwcgtggtttttgccccgcacgctcaccacgtggtctccgacgcgggggaagctgtgggagaaacggggcccggggagcacctcggggttggccccgccgacctryaggcggaaggtgacagctgagccggcagccagcaggatctgaaaatggaccagctgcccgggcgccaccaccttgctgctggcccacagcaccaggcccacgatgggctcctccgccgtgaggttgtacgtggctgagacycagctgactgygttggaggcattgagccggatggagaaggtgccagcatccgggaagaccatggtgacatgagggccacgcttgctgctgccgccgggcacagcccagcaycagctcacattggtgcccgtggccagctgcccccaaaagggcacagaggacccggcygccacgaagctgcctccgggctygctggccctgatgctgaggccactcacaggcacctgcacatccacttccacggtggcgttggctgagcccagcgggttccctgccgtcatggtgaccaagtgcaggccgggtgtggggaagctatgggtggtaaatggctcggaggtctcccagctcagcccctcctccaaggaccaagtgtatacgacaccactgccaccagccagctcggcactgagggtgacgcttktgttgacggcagctgggttcggggaggcrgycaccatcagccaccccacaggctccacgaagtccatggtgcagtcggcccaggcgctgcccagcatgttggtggcccgcagctgcacatggtaggtgccggcctcgagcacggtgagcgagaagcctttgccgctgccggccagggccgggcccctgtccctccaggcagtccagctgtaggagacgttggtgccatccctaaccacggcctrcagctgtaccgtgtggttggtggggaagtagcggccaccgcccaccacctrcagcccctctatgagctgcaggacatagacgaagatgctgtcctgggcggagcccacctcgttctcagccgtgacgatgatattgaaggtgcccacggagcggaaggtgtaagagatggtaggacccccagrgatgggcgtgcagcggtcacagagcacccaggaatagcgcacatcactgccggcctccagcgacgtgctgaagctcaygctcccattcaggggcaccaccgtgsrgcttgcattgacgacgagcccccgcacgcgccgcttcaccgtcacattgagccaggcctmgctgcggctcacctcattscagccggccaccctaacggtgaagtcacctgtgctgttgtaagcgtgggtgacctccggaccctcgagccrcccaccgtcccccagatcccacaggtagctggcggggcgcccacggcccacagcagagaacaggtacggctgctgcagctccagcccaagggagccattgaccttgatgctggtgaccagcacgggctcctgcacctccaccagggctgagtcattggcagcagagatgttgttggacgcggtgactgtcacaagataggagcctgggtctcggtagatgaacgtcacctcagggcccctggcacgggygggggcggcttcctcggtgccaaagtcccaggtgtagcggtaggggaacgggggccaggcacatgccaccagccaggcctcgtccccgagctgcacaaactgcctctctggctgcagggtgacgttgcccacctctggctccacgcagatgctggtgaagtaatgcgccctgttcacgcggctggacagcaccagcgccagggggaacgtgccgctccgcgtgaagttgtgtgtcaccgtcgggcacccccrcacggtcgtgttggaggagccatccccgaaggtccagtcgaagaggtagtgggccgggttcccggtgacgtaggccgtgagccgcgcgtcaggctgcgtggggatgcaggcggcgggttcaacgcgcagcacctccaggacgaagaccagcacgtgcaggctccgggccaggtggccggcggggctgsccgcacccacggtcactgtgcagttctgtgcccgcaggtacacatgctccactgttgcctccgggcccgacagcacggtgccgtcccccatgtcgaaggtccacgtgatgttgtcgcccgtctgcaccgcggcgctgaccaccacgggggcgccctgctccacggccaggctcatgtccacgctgagtccgcggagctcctcaaagacgcgcacatccgcctgggccgccgcaccgctcaccgtgttgttgacctccaggcgcacgtggtaggtgcccctcgaggcataggtgtggttggcagccggctggctctgggtcaggacaggggagcygtccccgaagtcccacgtgtaaagaacacccccaggcgagggcagcgggtgcgggtagaaggtgacgggccggccggccaccaggacgccgtcactcacacccacagccacggagggcagggaggcgcgcacgctcacaggcacctgctgcgtcmggttctcgaaggcattagatgccagcacggtcaggaggtactcacctgtggggacaggcccgagtggggcagccgcggcacccccacctgctccccacccrctcggcagaagccccccgcctgaggagcccggggtgaacggctgcacctgcggcccagccttaagggtcccaggctcccaagccacgtgcgggacggagcacaggtgtagcagcactgagggctgcctggcgaggacggcaccgcctccaagtgcagctgcactcggggcagcagagcagcaagagccaggcccgsggagggyggggggcgcagttcaggggcccagcttccctgtccactccyccmacgcctggcccctccctcaccccagtaggggcctaagccatcagcccaggtgaggtcacagtgagggctgttggggaggaagsggggcagcttgactggggrrctggggggaccccgtgctcagagcctgaaaggmagtggccccctcaccccctcatccctcacctggggcagcgtaggtgtgcrtgacattgtgctccaccagcacctgggccaccgaggggtctggaacygggaaggactcgttgtayggaggctggaactggtggagggcctgctccccatccccaaagktccacctgccggggcggtgggasgcagtgagtgaaccgggacaggggtgggcggtggcggggcagggggtgcttgggacccagccgaggctccactctgcagtcacgccccgggcctccattcagggcccacccggctgtgctgaggcctctcccggctcccgtgcagcctcagggctcctgtgcacccagttacctcccaacagayagggaaaccgaggctcagaaaagcaaccccstgatgtgggggtccctcggctgaggctggrgctgggacaagagcctggtgcccaccccaaaccggccccygagtcactcacaggaaggccacctccacggccgagtccaccagcacgcccgccgtcagtgcyagcgtggcattgggggacagcacggcyggcactgtrgagaccygcagrccctgcatcctgttcatccgctccacggtkaygttgtagttcacggtgacgttgctcacgtggttggaggccgtcagctgcagggacaggcrtcagtgrgcccaggtggcaggtgagaggcctggccctgmttrgcgtccctccctccactcacccacagccatggcagcgtcctcgggcagcatgaagcagagcagaaggcagaggtgaaggtggagcccgcccccgccctgccccgccccatcccctcccctccccacycccgcccacctactgagagcttgaagaccgccgcgctctgataaatgacattgaagaccacgttctggaaggtcagggactgcttgtcgttgatggtccrccggaagaccatgtccgagccggcctccaccacggggctgtacctctgcggggggamtggtgtcagcctgggctctgtggaggactctgcccttagcctgtcgcctcctggacacamctcccgtcrggctggagagtcccacgcggggcacagaggagaggaggtgsccggggctctgcatgccatgrgagccaagcccgggctgggacactsactgtccggctctccagccagccatgtagtactactaatgcctcaacctctctgtgcctcagtttccccatctgtaaagcaaacctagtaccagctacaaagagtccacctctctctgagtcttctcagaccctcccggcgctcytgccccagctcctcacccagagagctcggagcagtgaggggaggcacctacactggcttacagaacccaggacaggctgcacaggtcacgccatttctgatggcccctcccaaggcccctggtgaagaggcaggtacccgcaagatggagacagccctgtcccccatgtacccagcatggtggcaccgcgggcagcccgcagtttcccatcaggggttcagactycacctcaaaagccactcgctttagccaggcgagaacacagcagagggcgtgagagactcacgggggctcgtgtgaggtcagggagcrkagttttaaattcattttgtgaaatgagacrgtggaatgagttrgcggagccrctgtcagagccgtgactttccaggaatttaaagcccaccaggtagcccgaggagccagccagcaggacctgcccggggccgacgtccccagtaactgggctgcygccctcactgggaagccaggcctcamgccctgtgtgagcaccctgtctgcaggcacctgcctgggggctggtggtggagcctcggccatactcaccactrggactccctgcagtacacgggcctcggggctgggcrtggcgcggaggccacagatgggctcctccgccgtcacccgcaggctgaggttggcccggctggcgctgttttccaccaccacrtccaycacgtgctccccctcactgagccayggcagtgctaccactgagaacagggtatcgttggtctcccaggggcagsygggcacgaaggtggccaccagggcagggcagacattctcaaagcgggcgctgasactgcccccaggccagcragccgtggccgtggcgttggcaccagagtccacctggagcaccraggctgagccgttggtgggcacgtagaggcggccgtcgcggggggcagggtagatgacccgcagcccagccactggggagaccacgtcaaagctgcaggagaggttgtgcctggacacgccattgcccacctctgcccggacctcatagcgcccaggcakccgcagyccagggttgggcctcargcccagcagcacggtgagctgttccgtggctgcaagcagccgcagggcacaggcagggcagscccaagtgccctccagctgggctggcaagtggggcagccatsacgaggcgttggcggagaggtacggggccyggggaccagggtggccgggagccggcragcagtgcrggagggcgccagggccagcgtcgtgctgcaagccaacgaggtcaccagggagcatgaggacatcctggcygtggagggtgacctgtggagagggagscagggctgcatcacgtcctcacggtcatggcccgtggaccccygcacgacggatgagggtggacacgcagggctccccgcttcgtcagccacacctcaaggagcctccccacagtgctcgtgacaaggacaggcaggacagttgcagaccgggggacacacggggagaggacacaggccaagacctggcagacaggaaggagcagctgtgctgggagagaggaagaggaggcacagctcgtgccaagggcccaggcgagagcttctcccactgggagaggsccgagggcactgcagaggtcggaggtcakaggtggcaaggacgtgggaggggcctgcaggctgggtgtgtctggtgcacagacccagaccctgggcagcagacaggaaggtggcctgaggagatgcagggaacagacccaggtcagggccacacaccgagtactgcgcggggggccccgcggsaacggagaagaggaactctctccatagcgcatagggggccccgggtagccctggccctgacgtgcagccattggcgcaggcctgggggtggcargaggygtccagcggcaagcagatgttggctccagggcaccagcgtccccctggcatgcacgcggggrccagctgggtcctgttgtcyggggacctgctctcaggctcgctgccgttctccggggtccctgtgaggaggggagggtgttggggccctsatttgcccacaggccaccgtcagagatgcccaactgyctgcaccagcaatcctggycttgctgtgaggacaggtctccccacctgggcagcactcccagcccagtgctgcgtccgtctccggccagscgactgacccaggccggcccccaggcaggccccacccaatccacccccaggacacctggaatgagctggtgtctctggaacccctgctctgtccacctaagactgggaaccactctggtggccacaggaccagcagacgtgaaagctcagagaggccaccccgagtcctgcggcgcccaccacccaccacccaccacccagagtcccacctgctgtgctgaggagccggtacacctgcagccgcagctgggcgggccgccggagctcctgggtcccaaattcggccgtggtgaggaaggcttcacggctcagacgcaggcccgggaataccatgacctggtgggcagggggccgcctcagctccacagaccccatcccagcctgaagcccagactcccccyacccgaacttcscaggaagaggggagggaaggagagcgagccatcagacccccacaggcctggctcctgtcgctcgagaggaagactccgrtggaaactgtccatggggggcaggacccctgacctgcctttcaggaataactcacmcacgctcagagaaaaggcctggrggtaatgtgagtaaacgctttcctctctgcactctggattttcccaaccatcttcactgggcacaagcaacattaaggcccccaagttttttggsgagacccacagtgggcagggcaggcaaggcctccaggggcaggcaggagggcaggttwtagaacgtggggggccgactacctccacgggctcgtgcggggctgagaggccgtcctgctgtgccagaggcgtcaggggtccctgcaggtccccactgggcgctcccacgaggaggttctcggcatcctgcactgggcctggggtggcgagtgcacagtgaggcgccgggccagggcccaggacaccaggacraacagactggggaccgagccgcccgaraacccccccaccagcccctcctcctcagcccaggctccaccgcgggcgctcggcaggcccctaaccacagccagcgtctcaggcccctgcctggccccysgcacacctccrggcygcagctcgcagacgtagctgtgcrgcgctgagcacaggtcggtgttacaccacccggtgggcccgagccggacgcagtgctcggctgtggctgggtgtggctccccgggcagccagttctggcagctctccaggctraaggcctcgccctgcggsgctgggcccacctccaccccctgcacagtcgagaagccgatccacaygtctaggctcctgggggcgggtgtgggatgscagggggctcagggcactcctccatcctcccaccctyacagsagcccrctgggagccccatcactgtccccctttccagatggggaaactgaggctyagagcccggagascagggcccaccascccaggctcacagcagcacccacccacgrggcctgtgggyacyggcagggatccccgygcaggccacctcccgtatggcgtgcccaggagtgtccggaggctgcccccagctcaygtccacctctgcatctgcagagctgacaggaacggccccaccggccggcgccacctgctcaccagggccggcccagctcccacctccytcctcctgagactccccasccscagkctctgccccastgcttcagagatctcccaacctatggcccctcggggggtgggggcaggcacctggtgacccgggagaccaggaagcgctgcacggcgggactgtccaccattgccagggyggccccggcccaggccygacactgctcctgcgcctgcagccaggccgccttctccaccaccaggcggtagcagtgcccrttgccagggaagatctccgtgtccgaggggcagagcgggtgcaccgctggagaccggtgggaaygagggtgtcaacggtcagtgtgggcccaagacgggggtaccaggctctgccccatctggatggccctggggaggaaggggagtgggcagmagacactcacctcrggccggctcctcgcccagggccacgatgctgtaggcrgcctccaggcctgaaccammrcggttctggatgctgaggtcraggctctcgtcactctgcaccgaggacgggcacacgagctccagggcggcaggtgccgcttccacctgcacgtctgtccccagcagggctgagccggyccccagggccagcacggccrtcacgtgatagcgcccaggcagcacatagmgatgcgaggcagccggcccagcggcatccacctcggsggagccgtctccgaagtcccagcgtgtggcagtgacagggagcggggcagcgatgtggaaggctgctagctggccagaggccagaggtccgtggggccccaccagggkggcccctggggaggcagggaagacgtgctrgaggagggtggggcccctacaggtgggggcaggaggtgscgggggsccggagcagagggacaggcaggcaaaggaggcactrgagggctgggcygmcccacacagkcaccagccctrctcskagagggctgcgaggccctggccggtggagaagcagaaggcgctgcaggcctctggctgaagcaggccttcgtgggcagctgaaaaggacactgctgccacggtgcctgagctgttgtcagggaggcaggcgacatactcctcacctagaagaggcagccactggaccccgggttctgctcctcctggctccaccccacgcccccacatccgcccgccgcactcacaggctcccatgctgttcccttggcccggaggccccccccagagaggccttcctgagccctgcccagtgtctgcagggcccaggtcccacctggctgggaaggacagagctgccccacccaccggcactcaccacagccactgtccagcaaggggatgccaagcagaggctggccagccagggagccaggcccagcacacgtggctgcctcgggctgcaccacccgcacctgctgctcctccgcmcatygcggcagccacgccaggccacagtcacactcaaacgggttcccactcaggtttctgcggggcaggggcaggtgttggggaccaggtctggtgggaagggtctatgccagccccccactggcaaccaggccctggagccaccctgacagcacygcctcccctgccccaaccaagccggcactggggggctccaagcaggtagtgaactgcccccaggatctggtctcaagcctggaaggggacacrgaccaactgggagggcagaagggatactgggggcctggggtccagccaggaccccacccaaagaaccacaacttacatttcacttaaattaaataaattagcaaatattccttcttctaacgtagaaatcttgttgttgcttatatccctggaagagasgggggattcggcaaagctgacggaagcccccacagctgagcagcaagaggcggtgccgccagcccacccggagtgagccccgcatgctggcacgactgggggacactcacagctctgccagcgccgaraggttcgccaggagcccaacgtccagcgcccggagcaggttgtgggagacgtctctgaggagtgartggccgtgggtcagggccagagcccytagtaggccagaggccwtccctgggcccatcccacacattkccagcatccccaagctawggcctcccacccttgagctccccactcccagaggtcaggaggggmctttctgatggaagacccaaatgaacactcayctggggaaaccaagccrggagaggcctgggggcctcagccctctgcacccatctcagccctatgccgagtgccacmtggacctgtccacccagggycaggaagggcacggacccccaacccatcccacgcagggmcaaggccccccatcccctgtccacagtcccccacagagccaaggtctcccaaccctgtcyacagcccccacacagactcgaggggcccccatctcctgttctgaacccaacagggtggtcccactgtgggaccacaaccaggtatgactgtrtgagaagcaggctcactaccaggctaccagggagcacagsggagcaggcgccacctygaggcataaacccagagaaacaagacctccaagacggccaggcactggggcacacgccggtaacacagcaccgtgggagctgagacggaaggatcgcctgrgcccaggattttgaaaccaccctgggcaacacagtgagaccccgtatctacaaaaaaatacacattagccaggcatggcggcatgcgcctggggtcccaagtactcgggaggtagaggagagaaaaatcacttgagcccagagaggtcaaggctacagggagctgagatcgcatcactgtactccagctggggtgaaacggcgagactctacctcaaaaataaataaatacatacataattaataaataaaacatcaaagaccagccgacctaactccatctaaaatacacaacttctacgcaaaatataaataaaattagaaaacaaactacaatctcagaaaagcactagcaacttasacgacatactaaaggccaaaaataccctcctgacacacagctaataaagaaaamgtcaactattccagttaaaaagaagaaaaggaaactgggtgtggtggcttatgcctgtaaacccagtgctttgggaaggccaggagtttgagaccaggatggacagcatagcaagaycccatctctacaaggaaaaaaagaatcagccaggcatggtagtgtgtaactgtagttccagctactcggggggctgaggaggaaggatcgcttgagccagggaagtcgaggctgcagtgagctatgattgtgccactgcagtccagcctgggcgacagagcaagacccggtctcgaaagaaaacaaagagaaagcaaggaaagaaagatggccgggcacggtggctcactcctgtaatgccagaactttgggaggccaaggtgggtggatcatgagatcaagagatcgagaccatcctggccaacagggtgaaaccctgtctctactaaaaatgcaaaaattagccgggcatggcggcgggagcctgtagtgccagccactcaggaggctgaggcaggagaatcacgtgaacccgggaggcgaaggttgcagtgagccaagatcacgccactgcaatccagcctggtgacagagcgagactccatctcaaaagaaaaaaaaaagaaaagaaaagaaagaaagggaggagagagagaagaaaaggagaaggggaaagagccgggtgcaatggctcctgcctgtaatcccagcactttgggaggctgaggcgggcgcatcacctgaggtcaggagttcaagaccagaccgaccaacacggagacaccctgtctctaccaaaactacagaattagtcgggcgtggtggcaagcacctgtaattccagctactcaggaggcttaggcaggagaatcacttgaacccgcgaggcagaggttgcagtgagctgagatcgcacccctgcactccagcaccccatcctgcaagagtgaagctccatctcaaaaaataaaaataaaaaaaaaaaggatggagggtgagagggagggaggaaagaaagagaaaactccaaaaacaaaaaaagaaaaaccaggcaattagaagaagcacaattggtcacagccgtaggaaaaacatcccatgtcagtagtcagtgaagaaaaagcaacagaaaccacagggcggcagcatgtctctcttttcagagctgcccgagttacaaaccaggtcctggagctggtgatgcggaggtgagtagacagagagctggggcaaaccgagaactccacctcccctcggcctcaagcacctcgggggtcactctgccgcccaccctgggcacccctcctggtcccacgcactcccagtagtgctcctggcacagggactatggctccgcaggtctgcacaccacccccctgctccccaggaccccgaggyctcacctcctgccacgggcctctacttccccaggtgtcaccctccccacgagtgacccagcaggtgcctccgcctagacttgctcttcccagcaatgaccacccggcagccagccccaagccggggsggcctccatccctgaacacccgcccagcccctgycagcctccagccctgctcctcccaccggagctccgctcccacaggagcctacccggsgcaggagagacgcacacacaggctgcccggtggggcccggggccagggcaagagcttgagaagggaaccaacaaagaaggggaccagaggccaccccagctgaggggacagagcagccgaggccttctccgtgccaggaagcagcaccagccacggacggtggagccaggccctcacctgggctgggtgcccagacagatgagacgctgggcactggctcccggagcttctcgttccatctgcggatggagggcacggttgggggtgcagttcccttcccccaggggctgtgggacactcagagagcctatgcctgtgccctgggctccgggaggggagaggatctgggggccaggcacacagggaacggcccctccggcagggccaccacttcccccctaactgaaccctgcttctctgccgtcccctcctctacaccaaggtagggacacgggctgaggtgctccccactgcccataaggatgggtgggcccacagccgcgctgctaggcatccacaccatccccgccgtggggtgggacagggtggtggctgggagaccagcaagaggccattctcgagacagggtgaggcagctggactcacacccactgcccaagcaccatgcccgagggggaacactgtgccgtgaggaactgcagttagacctgaggagggactttccagcggctgcggcggcagcagaaccaatgctttagggagaaatgaggcaccgggacccgaggcgcaggagccctaaggggcgagaggtgctgcagaggccacggtgaacacaggcaggccccctggaagggacacagctgtgaaactgccccagggaggggcacaggctctcgcacctgcccccaggcatggggagcagctcccacccaggccacgggagaaaggaaagaaggaaaagcctgaagatgtttggccacacctcattttctggaaaatccatcaagagtggctgctgctgggagctgacaagccagggcaggggtgggggcaggtcagccgaggaccccagagccccccggctccccgcccatcccactgtgaaccaggcctgggggtgccatggacacttcttccaygccagcaggcagccctgcctgtcaccggttctggccatgcactccctgcgtgccaggctccaggctggctccttctcccggccctcaccccagcccaaggcccagaaatgcagcaaggtcttggggaccccgctcggccgagctcccagggcccagggcagtggaatgaagctggggcccagacaggagccaggtgcagtcccccagcccccagggtgtggaagcgtctgccctgggtaggactcaggtgccccctgggtgtggaagcatctgccctgggcaggactcaggtgtgggcttcagggacagggaacagcacaggggtccccgtggagtcctcacctcgcttgctcccgtactttttcacgtctccatctgcttttgccatcgccgttctgggggaacgccaaggcctagccaggcagcctcgcgccagcccccccaccccgcccctcgggcttcctctgcacccgccaggtgacatcatcgccgctgtctgatgccctgcccccacgttctggttccctgcaaggatgggggamacagcagggcccaggcatctggcagcaggaccaccgagcggccctaagsccaggcaagagcacagagcagagtgcagggtcctctggggtyccargcccttgctgccccacgcactcctcaccccagttcctgctatragctggaagggtgggagccaggtgcacagggacagcctgatgggtgcccgagggccaggatgtgctcccagggaagctgaagccaagcttgtygggagragtacacccccatggggggcaggacggtgccccagccccgggacacaaggggyccccagcgccgagcgtccgatctggaaggcrggaggagttaggaccatcctagcgtgggacccagcgggctccttagcggctgctggggcaccactgggtggagaaggaagtcccaggtgtgtggccacagtacgggtcttcaccccttcccagcacccttgccaatcctggagcaggagcagcaacagcagagggtgtggccaggcctggaggctgcccctccacacccgtmacaggtggggccacgtcccagggctgtgggcagcagggccagcctgccggcccgaggtakctgasacgtgtctcatgctgcagcgggtctgcccgccacccgggcgtgtgaaccccaggtcgggccccctcgccctggagcctcggcccctcaggggtgttcccagccaggcgctggctctcctgccctccccctgggctctgcccacagttggcgcgagggtgggtgaagcctgaggctggcagggccgggaagtcttgkggctgggccttctgccccacaggcgctcctgggccgggggagccgggstcggggaatgcaacagtgggactgaggagaacttccctgggtgtggggcagctcccggggccctcccaatccacagcagagggaatggccccagacaaaccagacctgcctcagagtctcacactcagagctgagtgccccaggcgcccactccccagaccagatgctgagtggggtctgggggccggacggagcccccaaagaaacatctgcacattccagacacgtgtggtcagcagcgggtgtgcgccaggcccggcacccccgcccgcgctggccgcctcactggaaactgggctggggggaccggctcggaggggccgcctgcggagcttatgtaaccgctcctccctcggcaggggcaggacaggacgccagacccagggaggccccatgccccctgccaggccccgtcctctcctggaggagctggttcccctccgcccagcaagaggacccccaggcccgtccctcccgagagcaggcccagggtgaggaaatgggctgcagtgtgggcgctggagaggacaggggacaggcggcagtgccacccccactgcggccccttcctcgctgggccagccgagccatgacctcatctgtttccctctgcgctgtgctcctttctatttaaggagagtgaggcggcttccagggccggaaatgatcctgtttaaattaacgggctgcagtttgggacggtgctcatttgaaaaaaaacagtgcagccccgggctgggcagatggctgctggctccgcctaccacttccatggggagggccagggaggccggccacaaccctggccccacgaggggtgggggttgcagcctctgatacaggacgaggctgccaggccccaagcaacagagccctgcacgagggtctctgggtcccagacacggggtgtgagactagctggggagccccaggctcagcggcattctgtccttacagatccctcccacggctgaactgtccccaggatgagatgccgggggtgacatgggcagcctcaggtcctccmgggacccacaggcaggcacagggatggagactccggcctcggaggctgaacgagggagatgagaaaggggagtctgcgatgtccttgcctacacagatggaaaaacacagccagctcaaaaagggccgtctggagacgagcccacctgtggggtgtaggaaggagagcgcttcatacgtatgctacctgccgctggggtcggggccacccttccagttcaaggggagaatgagggccggctcctggtgcccctgcacgcagctgacatggagccaggcgttgtgacccccttgcatccctctccactcccacccttcacagcctgtgtgggcaggtgctgcactgaccttacgctcctgatgggcacactgaggctcaaggggccctcctcctyccccaacaccatcccccaaacacctccccgggcagccagcagggtccagtgtgtcaatggaggaagccaaggtaggaagagggatggtgggggggggggcaagcaaactggccatctgcgcccggctgtgcgggcacagcagtgccctggagagggcagcagcacagatccagcggggcagccggaatcccatcacccactcggctgtgggcacagccaatgatggtacgagccatcctgaggccagggccacgatgcacagtggacgggctcagaacccggagcccctgtactcccacagctgtgacgttccctgggcatgggcttgccccagcgctggcctcattcctgcctcaaccagaaggaagagctggsttccgcctctgcctgggcacaaagccctttctgaggtggcctcacagaagccagcctgtcttcagatcatggcgctgctaaggtcaggaatgccaggctgggccakggctgggcctcgggagctgcagggagaaaaggacccagcccgcctcagccccagatgtagcccttctcctgccaccagtgcctgggcaccctggcccctaggcaaggacagctgccaagccatgaagagcgaggtgttctgggaaagggcgtgagctgcattttccagctgcgctcactctgcagggagactgtggcgcccccgctgctgtgcccgcagacgtgcccggcctcagccagctggagcgcaggcagcagagtgcaggccaggcccagacagcagcgggmtgttttcattccagggtgcttggcgggctgggctgccgtggccactgcagagctccagaaaagaacaygtgtgtctccctccaaagtatrttcctygctggaaagcagatcccaggcagggtctcccccacgagcagggggagaggcaccccaaggtgggggagcgagggcagtggcagaaccaccccataccctaggggacccagggaggggcttgcagatgcgggacccacatttggsagcggtgcccggccactgtcacsagatggtggccagcgcatcacccactcatgggccaggatggcagaggagatccacagagacggctccagcaggaggccctcayagagatgccctggcctcagaagagccaacagaaagccgggaagggggacgtcgaggctcaggcttggcacaacctccccaaagctcccaaagactctcggtgcccaccagcgacagcgcacaccgccaccacctaacagcaagaatgcagcggggtccgcacatcagggcgggcactgagcggaactcaggcagtgccactcgccagcttacgtcaaaagaacaaaaggagtgaggacggtactcgcggctctgccaacacttcccagccccgcacgtctcacacacaccagaacgcgtcaaaaggcaccaatgggcaaacacccagatgtaggcacaagcaggagtgggccgggtcttgtgagcccccacagccacgcggccctgcgctgaaggcaccgaggctgggtgctgaggggtccataggagtccacccgcccaggctgcactggctcccgtcgtccagtgtctggtctaagcacaggcacagtgtctggctctcaccctcaggctgttacactctgctctgtggcagggcaggtctcacagtgcatggaggacaggggaatgggcccccggaacccctgagggaaccgacagagctactttaacaaggtatgattgttggggctgccagtggctgagccaggtcactgctacactgccctgcagggtgcatctaatcatggagcccactttacaggtgaggaaactgaggctgagagactggaccaaggtcacaccagaggtggaggcgctgggacgtgaacccaggtctgactccagggcgcaaattccctacatctgggttcccagcctccttcctgaaactgaacaggaaactagagagaagggacacagcagggatgagccagggagggagaggtgggaggggctggcagggagggagaggtgggaggggctggcagggagggagaggtgggaggggctggcagggagggagaggtgggaggggctggcagggagggagaggtgggaggggctggcagggagggagaggtgggaggggctggcagggagggagaggtgggaggggctggagggagggagaggtgggaggggctggcagggagggagaggtgggaggggctggcagggagggagaggtgggaggggctggcagggagggagaggtgggaggggctggcagggagggagaggtgggaggggctggcagggagggagaggtgggaggggctggcagggagggagaggtgggaggggctggcagggagggagaggtgggaggggctggcagcacccaagcagctgcacctgggcgcagggcccctcagcccctcggggagtgcaagcacatcgcagcccgactcggaagcgccactgccacctctgtctgtctataaaccagggcactagtgtgggccccaggcaccctgtgcggctgcaggggtctgccccagagcatgctgatgaaatcatcaccacggcttctcaaagagcctcaatttcctggtgtgtaaaatgagaccaggagtggctgcaaccctgcggtgccgtgatgaggtatggagagacaagaacacagagggctcagcgcggagcccggcgtggccaccgcggggagagggtgcggactcttcctagaccttttctttttgagacagagtttcactctgtctcccaggctggagtgcaatggtgcaatcttgcctcactgcgacctctgcctcccaggttcaagcgattctcctgcctcagcccccaaagtagctgagactacaggcatgcgccaccacgctcagcattttttttttttgagacagagtctcgctctgttgaccaggctagagtgcagtggtgtgatattggctcactgcaacctccgcctcccgggttcaagtgattctcctgcctcagcctcctaattagctgggattacaggcgcccacgaccacacctcgctaatttttgtatttttagtagaacggggtttcaccatgttggtcaggctggtcacaaactcctgaccttgtgatccccccaccttggcctcccaaagtgctgagattacaggcgtgaaccaccgcgcccaccctgttttttttttttttttttaaagaccgtttcctagtcgcccaggctggagtgcagtggcaccatcacagctaactgcagtctcaacctcatagactcagggaatcctcccccctcagcctcccaactagctgggactacaggcgccaccactaatatctatttattggtctcgctatgttgcccaggctggcctcaaactcctggcctcaagccatctgctctcctaaagtgctgggrttacaggcgtgaggcaccgsgcccggstggacagtggttttgatttacgtttccctcatgactaatgaggccgaccatcttytcacacgctgttggccatctgtgcgtcttctttggagaaatctctgttcagatcctgtgatttttttttttttttttttttttttttgagacagggtcttgctctgtgacccagcctggagtgcagtggtgtgatcacagctcactgcagccttgacctcctcggctcaagtgatgtcccacctcagtctcctgaatagctgggaccacagatgcataccaccacgcccggccaatgttcttttattttttagagaccggggtctcaccctgttgcccaggctggtgtcaaactcctgggctcaagcgatccacccaccctggcctcccaaactgctgggattccaggcgtgagtgaccccttgtccatgtttaaacggggtccctgtctgttgttgaatcatagtgttccctgtatgatctggatgcaagccgatactgcatggatgacctgcaggtgctctctgtctccacagtcgcctctgcagtgggmgctcgggtgccccacattcccaactgctgcagacacaaccaaagcctccccatcccttcccccacccctgccggcaatcgcgtacaggagtgagcgtgtgacttcttgtccacatttttgtccacaagtttggcgagtttgcatccgygtctaakaaagaaactrccgtttctcacgcaggcacgttctgaacgcccgagtgcgggagcmacgtaagacccggctcagggaccccgggtgaggccagctgsacatgcaggatgcaggtcctcaccactgcctccgctcggctgccagggctcttcctagaagacacaggcctctcctaggctctcctgacagaggccctacccctgcccccgagtcaccttgccccttggggactctctctgggcarctccctgtgggagctttgaaacctggcttcaatgtcacctgcactgggggtccttccaggccagccccctccccatcatccatctctgtccttggagaatcatctgcgtgttggttgaacgcgggctccagtgataacggagccctcgagggtggccctccttctgctgagggctcatggaggccttggtgacaatccctagtcctygctctcaggatccagggaccagaaatgggagccaggggcccctccgtggcctggccagccccccaaggaagctgtgtctstggcagttgcgctctaaggcatcaggcctaggggtcgstscagaatgmctgtyttccccgacgscaatcccaggcaggggccccggggtctgcgcctgctgtccctacactctcccacactctcctgtcattcagggatgcaggtgggaaagggcaaggccccgggtgctcctatattttacatcagtgaaccaagcacctaccaagtccctcgatgtgcccagtcctggaccccagcatttgcgagacagcagcagacccaggtgacccccagccagggtgagtggcaaccagcaccagaagtggcctttagagcagggggccctgagctgatgacatctacacctaggycastgccagccaggacaacctctgggacaatgggatgtcggctccaacgaccaatttacaagaaacacaaagsacacactcacagcaccacggaggwgacaccatggaggtggcacccccaagacacagcgagaaatccaggctgcaggagccagtttcttcaacaaattgcacaaggaaaaagagaggaagggaagctcctagacatcatcggacatttaaaagacaggcggtggctcaagcctgtaatcccagcactttgggaggctgaggcgggaggatcacgaggtcaggagatccagaccatcctggctaacacggtgaaaccccgtctctactaaaaatacaaaaaattagctgggcatggtggcgggcaccagtccaggctactcaggaggctgaggcaggagaatggcgtgaacccaggaggcggagcttgcagtgagctgagatggcactgctgcactccagcctgggcaacagagtgagactccatctcaaataataaaaataaataaataaataaataaataaaatacatcactcacacctgtaatcccagcactttgggaggccgaggcaagcagatcacctaaggccaagagttcaagaccagcctgaccaacatggtgaaaccccatctctactaaaaatatttttaaaaattagccgggcgtggtggcgcgcgcctctaatcccagctactcaggaggctgaggcaggagaatcgcttgaacccgggagatggaggctgcagtgagccgagatcacaccattgtcctccagcctgggtgacagagccagactccgtctcaaacaaaacaaaacaaaagacatcagctagctggtccaagcacagtggtgttcacaacgaattgatcacagccaggtagaattcttcattctttctccagtcctactgctttgcttgaccagccttaaagacacacatatatttttgtctgggcgcgttggctcacacctgtaatcccaacactttgggaggccaaggcaggcggatcacctgaggtcaggagtttgagaccagcctgaccaacgtggagaaaccccgtctctcctaaaaatacaaaattagccaggcatggtggcacatgcctgtaatcccagctactggagaggctgaggcaggagaatcacttgaacccgggaggcggaggttgccgtgaggtgagatcgcgccactgcactccagcctgggcaacaagagcgaaactccgtctcaaaaaaaaaaaaaaagtatatatttttaaaagacattggccgggtgcggtggctcacgcctgtaatcccagcactttgggaggccgaggtgggcagatcacgaggtcaggagatcgagaccatcctggccaacacagtaaaaccccgtctctactaaaaatacaaaaattagctgggcacggtggtgcatgcctgtaaacccagctaccaggtactcgggaggctgaggcaggagaatcgcttgaaccagggagtcggaggttgcggtgagctgagatcatgccactgcactgcggcctggagacaagagcaagactccgtctcaaaaaaaaaaaaaaaaagaaaaaaaaaaagacatcaactaattgcagtgtgtggaccttatttggctcttaattcaaactattaaaccaaaaatgtgaacacaccaggccttcggtggcatgaaggaactgtctgttgtgttaggtgggtctgcagtattgcgatgccctccaaaatgcttgcagataaaagggtggctggaatttggttcaaaacatgggtcagggctgggcgtggtggctcatgcctgtaatcccagcactttgggaggccgaggcgggcggatcatctgaggtcaggagttcaagaccagcctgaccaatatggagaaaccctgtctctactaaaaatacaaaattagccaggcatggtggtgcacgcctgtaatcccagctactcgggaggctgaggcaggaaaaagcgcttgaacccaggaggcggaggttgccatgagccgagatcgtgccattgcactccagccttggcaacaagagtgaactctgtctcaaaaaaaaaaaaaaaaaaaaaaaacacatgggtcaggagggagaagggtcggggcagggagggcagggcaggctctggggtggggggtctgtgagtcagccacggctctgcccacgtctccccacgragcttcgagccacgcagagcagcacgttttgcagtacgccatcttttccaaaagccaccacctctcggcagcatcmttaacccaaggcaggctgtggcctcagaagccccggctgtcctccacctggaactggacacagctgtccctgctgagcttcagcagccagggagccacaagtggagaggcacctgcgtgagccccccaggaaggctactggtgacacccagacagcaacgctcttggacccttraacacctgccagcagctgtgatctgtgtccttcacctctcccagcttgacccctcttccctggggaaaacccagccgtctccccgaggaggagtttgcagggtagacagcaaaatggctgggctgccccacagcacagagggtggcctggggggccagccagggccttcacatccttcctagggccctagtttcccatgggtcccctcaccccaccttccagaactctcccagcggcggccccaggtgtgtacagaacagcacccacctgcccacatgaggtcaccctgtgccctgttgcacacttgrggggcctggcattcggaatcttgccagctcaggctgggacaggccaccaacycccagggtccccctcctccaaaccccaggaccagagcctaagaggacaacacaaggcaggggcgggggytccactgctgtgccaagggcctggagaacacgggccttgctctccgctcagcagccaccagcgcccttctctcccggacagctcccgaggggctgctctcatggacaccatcaggtgctgggaagcaggaaccaccaggacctggacagagtccccagtgaccggcctggcagacagaggagccctcagctacagcatcacaaacaacgggtggggtaggtctgatgcaattctgtgggtgctgttgccaggcaggaggaggccatctccacagagacagccgcgagacacacgcgtccgcagtcagggagcgcaggagcaatgtggccccgaggggcacgggctccattggtccaggagaacccattcttctcccaccctcgagaccacccagcaaagccccaaggacacacggctcccctaaggaagggtggccacaggcgggagtgacccagaaacgttacaaaaccaaatgccagaacccayccaatgtttagcaagcctggggatgtgccacgtcccccagggatccagcacgcacccaaggagacactgtcccggcgaggagcctggagcctgggaaatacaaggcatcagactggtcccaagactctccccagcgctggggacaactgtctgcttatcttagtcccctccgcccttttcaatccaaccctgggtcctgggcacctcatagttccaaacccctgctatgcacatcccggctgtgatgcctgggacaggtcgtgtcacctctccaaacctgtttcctcatctgtgaaatgcaaatctccacggtccctatgcctcggatggtcagagtcaggattccgcatgacgacccccaacaggagcctggcacagacctggctctgggcagcgtctccataaaggccacctgttgtttttatctcccgaaagcgaacatgacaaggctttaaccccccacggmaatccsccctcacccctgttctcaggatagccttggaacccaatagcagagcgcctgaggcccttcatgaccccagcccacccgcgagcccacctcccaccctgcccctacccctcacacctcccgtggccagcctccagcctcacggtctttgctcacaccgttcaccccccttcttctggacccacctcatcgccccttcctaagcatcagcccaattcttgcacatccatcaaatccttttccagacacctcctggaactcttccctgccgccccctacagccatccccacctctccgggtaccccgcagccccaggccgcatcccaattcctctccaattagcgactgtttgtcctcccagctgagcgcggcctccgsgccccgcccccgctggcgtctgcagagcccccgggtgggacgtctgtctccagacccggggtttttcggctccccsgggccgtgccaaccgcggctccaggcgttccttatttagcagggccgcygtgcygcgccggagcctcgccctgggagcgtcctggcccgcgtcctgcttcccgtcccgggccagggaacscgcccacrcccgcccgtcccgcggcctctcccgggtgccgctgggcccgctactcacagcgctgtggcgtccgcggggatgcgcagcgcgggaccgagcgtccgcagcccgcggcccgagcagttgacgcggcaggcggcgccgggcgctrggccgcagaggcaggggggctcgcarggcccgcagccgcgcccggggccccccgccagcgccccgagccacaggcccaggcccwgggccagcgccaggcgggcgggcgcggcgggcggcatcgttagggcagcgcgcgcatggccccgccgtccccaggcccgcccgcgcgcggaggccgcrgctcaggcggggcccgcggacggcatggcgggcgcggggctggatggggctgcggccgcgacctgctgctgagcgacgcccgctcggggctcggggccaggccgctccgggagctcggccgcccgctcggacgctggcgctgcagtgcgggccccgccgcggctcctcctcctcctccccgcgcggcgcgggscggacggggcgagggggggcggggcgggtgcaggctccgcccccttcgccacagcgcgaccgggccagcgatgagggactggcatccggaggcttcaccctccgctccacagggtcggcagcagggcggggcctccggaagctccgccccacgcgttcccggggcgcatgcgacgtggggcggagcgtctggaagctccgcccgtcgcactgcagagtcggccgaggcgcacgagctatttttcacgctccgccccgctgcaggctaaagtgcgtgggcgggaagcggtgggcagggtgccatctggctccgcccttctcctgtggtgtgggccaggcggcggsttcctcctcctgcagcagccacaggctccaccctgatccttcttccgcggtgtggatccttctcccgcgatctccgtgcgcggcccgagtcagtacccgcagcctcccgacgcacccgctggctccaagcctccctaccccaggtttcctggctgagagagagacagagggagagagggggaagagagagaacaggcaatgggaggttgatggtgagagcttattgaaagacaagagggaggaaacccacatccttcattccccatccattcatttattgccttatttattccattgaatcttcacagctctagaaaaagtgtgctacaattattccctttattaaatgaggtcactgaggcacagacagtttaagaaatttgccagcagggcacagtggctcactccggtaatcccagaactttgagagggggaggaaggtggatcccttgagtccaggagttggagaccagcctggccaacatggcgagaccccgtttctacaaaaattagccaaaattagccaaactggctcacrcttgtagtcccaggtactcgagaggctgaggccggaggagcgtgtgagcccagtaggcagtggctgcgctgagccgtgattgtgccactgcactcccgcctgggcaaaagagtaagatcctgtctcgaaaaaaaaaaaaatggaaaaaagaaaaaaagaactggctgggagtggtggctcatgcctgtaatcccagcactttgggaggccgaggcgggcagatcacaagatcagaagttcgagaccagcctagccaacatggtgaaacctcatctctactaaaaatacaaaaatcagctgggcatggtggcaggcacctataatcccagctactagggagcctgaggcagtagaatcgcttgaacctgggaggcagaggttgtgccactgcactccagcctgggcaacagagcaagactccgtctcaaaaaaaaaaaaagaaatttaccaggtcacacagcaggtggatggtaaggctgcgattgtattccaaacccagcttttaattgcagtcaaatgacagacttaagattcaaggactccagtggagggaagaaacagccacaagaaactgctgccaaatgagcaaaacagattaaccaagtctcaatgattgtttgaaggcggttgtggaataaaatgcaattgtttagaaaggatttcttaaatagaaaagacatatgtttaaagaagcaaattagttacctggaaatgaaattctaaactatttgaaaaaccatgggggccgggcgtggtggctcatgcctgtaatcccagcactttgggaggccaaggtgggcagatcacaaggtcaggagttcgagaccagcctgaccaacatggtgaaaccccgtctctactaaaaatacaaaaattagctgggggtggtgccacgcgcctgtaatcccagctactcaggaggctgagacaggagaatcgcttgaacccaggaggtggaggttgcagtgagctgagattgtgccatggcactccagcctg
